United States Patent Application Publication US 2007/0048818 A1 - sequence listing, part 7

SEQ ID NO: 10377 - DNA, 5657 bp, Homo sapiens
ttttctttttttttttttttttattatactttaagttctagggtacatgtgcacaacgtgctggtttgttacagatgtatacatgtgccatgttggtgtgctgcacccaataactcgtcatttacattaggtatatctcctaatgctatccctccctctaactccaccccacaacaggccccggtgtgtgatgttccccttcctgtgtccaagtgttctcattgctcaattcccacctatgagtgagaacatgcagtgtttggttttttgtccttgcaatagtttgctgagaatgatggtttccagcttcatccatgtccctgcaaaggacaagaactcatccttttttatggctgcatagtattccatggtgcatatgttccacattttcttaatccagtctatcattgttggacatttgggttggttccacgtatttgctattgtgaatagtgctgcaatgaacatatgtgtgcatgtgtctttatagcagcatgatttataatcctttgggtatatacccagtaatgggatggctgggtcaaatggtatttctagttctagatccctgagggatcgccacactgtcttccacaatggttgaactagtttacagtcccaccaacagtgtaaaagtgttcctatttctccacatcctctccagcacctgttgtttcctgactttttaatgattgccattctaactggtatgagatggtatctcattgtggttttgatttgcttttctctgatggccagtgatgatgagcattttttcatgtgtctgttggtggcatgaatgtcttcttttaagaagtgtttgttcatatcctttgctcactttctgatggcgttgtttttttctcgtaagtttgtttgagttctttgtagattctggatattagccctttgtcagatgagtagattgcaaaaattttctcccattctgtaggctgcctgttcacgctgatggtagtttcttttgctgtgcagaagctctttagtttaattagatcccatttgtcaattttggcttttgttgccattgcttttggcgttttagacatgaagttcttgctcatgcctatgtcctgaatggtaatgcctaggttttcttctagggttttcatggttttaggtctgacatttaagtctttaatccatcttgaattaatttttatataaggcataaggaagggatccagtttcagctttctacatatggctagccagttttcccagcaccatttattaaatagggaatcctttccccatttcttgtttttgtcaggtttgtcaaagatcagatggttgtagatgtgtggtattatttctgagggctctgttctgttccattggtctatatctctgttttggtaccagtaccatgctgtttttgttactgtagccttgtagtatagtttgaagtcaggtagtgtgatgtctccagctttgttcttttggcttaggattgtcttggcaatgtgggctcttttttggttccatatgaactttaaagtagttttttttccaattctgtgaagaaagtcattggtagcttgatgggcatggcattgaatctgtaaattaccttgggcagtatggtcatttttcacaatattgattcttcctacccacgagcatggaatgttcttccatctgcttgtgtcctcttttatttcgttgagcagtagtttgtaattctccttgaagaggtccttcatatcccttgtaagttggattcttaggtaatttattcactttgaagcaattgtgaatgggagttcactcatgatttggctctctgtttgtctgttattggtgtataagaatgcttgtgatttttgcacattgattttgtatcctgagactttgctgaagatgcttatcagcttaaggagattttgggctgagacgatggggttctctaaatatacaatcatgtcatctgcaaacagggacaatttgacttcctcttttcctaattgaatactctttatttctttctcctgtctgattgccctggccagaacttccaacactatgttaaataggagtggtgagagagggcatccctgtcttgtgccagttttcaaaaggaatgcttccagtttttgcccattcagtatgatattggctgtgggtttgtcataaatagctcttattattctgagatacgtcccatcaatacctaatctattgggagtttttagcatgaaggactgttgaattttgtcaaaggccttttctgtatctattgagataatcatatggtggtttttgtctttgggtctgtttatatgctggattacgtttattgatttccgtatgttgaaccagcctcgcatcccagggatgaagcccacttgattgtggtggataagctttttgatgtgctgctggattcggtttgccagtatttcattgaggatttttgcattgatgttcatcagggattctggtctaaaattctcttttgttgttgtgtctctgccacgctttcatatcaggatgatgctggcctcataaaatgagttagggaggattctttctttttctatttattggaatagtttcagaaggaatggtaccacctcctccttgtacctctgctagaattcggctgtgaatccatctggtcctggactttttttggttggtaggctattaattattgcctcactttcagagcctgttattggtctattcagggattcaacttcttcctggtttagtcttgggagggtgtatgtgtccaggaatttatccatttcttctagattttctagtttatttgcatagacatgtttatagtattctctgatggtagtttgtatttctgtgggatcagtggtgacatcccttttatcattttctattgcatctatttgattcttctctcttttcttctttattagtcttgctagcggtctgtcaattttgttcaacttttcaaaaaaccagctcctggattcattgattttttgaagggttttttgtgtctctgtctccttcagttctgctctgatcttagttatttcttgtcttctgctagcttttgaatgtgtttgctcttgcttctctagttcttttaattgtgatgttagggtgtcaattttagatctttcctgctttctcttgtgggcatttagtgctataaatttccctctacacactgctttaaatgtgtcccagagattctggtatgttgtgtctttgttctcactggtttcaaagaacatctttatttctgccttcattttgttatgtacccagtagtcattcaggagcaggttgttcagtttccatgtagttgagcagttttgagtgagtttcttaaccctgagttctagtttgattgcactgtggtctgagagatagtttgttataatttctgttcttttacattagctgaggagtgctttacttccaactatgtggtcaattttggaataagtgtgatgtggtgctaagaagaatgtatattttgttgattgggggtggagagttctgtagatgtctattaggtccacttggtgcagagctgagttcaattcccggatatccttgttaactttctgtttcgttgatctgtctaatgttgacagtggggtgctaaagtctcccattattattgtgtgggagtctaagtctctctgtaggtctctaaggacttgctttatgaatctgggtactcctgtattgggtgcatatatatttaggatagttagctcttcttgttgaattgatccctttaccactatgtaatggccttctttgtcaattttgatctttgttggtttaaagtctattttatcagagactaggatcgcaacccctgcctttttttgttttccatttgcttggtagatcttccttcatccgtttattttgagcctatgtgtgtctctccacctgagatgggtctcctgaatagagcacactgatggctcttgactctttatccaatttgccagtctgtgtcttttaattggagcatttagcccatttacatttaaggttaatattgttatgtatgaatttgatactgtcatgatgttagctggttattttgctcattagttgatgcagttgcttcctagcatcgaagatctttacagtttggcatgtttttgcagtggctggtaccagttgttcctttccatgtttaatgctttcttcaggagctcttgcagagcaggcctggtggtgacaaaatctttcagcatttgcttgtctgtaaaggattttatttctccttcactaacgaagcttgatttggctggatatgaaattctgggttgaaaattcttttctttaagaatgttgaatattggccaccactctcttctggcttgtagagtttctgccaagagatccactgttattctgatgggcttccctttgtggataacccgacctttctctctgactgcccttaacattttttctttcatttcaactttggtgaatctgacaattatgtatcttggagttgctcttctcgggaatatctttgtggcattctctgtatttcctgatttgaatgttggcctgccttgctaggttggggaagtactcctggataatatcctgcagagtgttttccagcttggttcaattctctccgtcactttcaggtacaccaatcagacgtagatttggtcttttcacatagtcccatatttcttggaggctttgttcatttctttttcctcttttttctctaaacttctcttcttgtttcattttattcatttgatcttcaatcactgataccctttcttccagttgatcgaatcggctactgaagcttgtgcattcatcatgtagttctcacgccatggttttcagctccatctggtcatttaaggacttctctacactggttattctagttagccattcatctaatcttttttcaaggtttttagcttctttgtgatggtttcgaacttcctcctttagctcggagaggtttgatagactgaagtcttctctcaactcgtcaaagtcattctccatccagctttgttctgttgctggtgaggagctgcattcctttggagggggagaggtgctctgatttttagaattttcagcttttctgctctgttttttccccatctttgtggttttatctacctttggtctttgatgatggtgacgtacagatggggttttggtgtggatgtcctttttgtttgttagttttccttctaacagtcaggatcctcagctgcagatctgttggagtttgctggaggtccactccagacactgtttgcctgggtaccagcagtggaggctgcagaacagcaaatattgctgaacatcaaatgttgctgcctgatcgttcctctggaagcttcgtctcagaggggtacccggccatgtgaggtgtcagtctgcccctactggagggtgcctcccagttaggctacttgggggtcagggaccacttgaggaggcagtctgactgttttcagatctcaaactccgtgctgggagaaccactactctcctcaaagctgtcagacagggacatttaagtctgcagaggtttctgctcccttttgtttggctatgccctgcccccagaggtggagtctacagaggcaggcagtcctccttgagctgcggcgggctccacccag

SEQ ID NO: 10378 - DNA, 6050 bp, Homo sapiens
tttctatcattttttttcttcctttttttttcccctttattattatactttaagttttagggtacatgtgcacattgtgcaggttagttacataggtatacatgtgccatgctgatgcgctgcacccactaacttgtcacctagcattaggtatatctcccagtgctatccctcccccctccccccaccacacaacagtccccagagtgtgatgttccccttcctgtgtccatgtgatctcattgttcaattcccacctatgagtgagaatatgcggtgtttggttttttgttcttgcgataatttactgaaaatgatgatttccaatttcatccatgtccctacaaaggacatgaactcatcatttttttatggctgcatagtattccatggtgtatatgtgccacattttcttaatccagtctatcattgttggacatttgggttggttccaagtctttgctattgtgaataatgccgcaataaacatacgtgtgcatgtgtctttatagcagcatgatttatagtcctttgggtatatacccagtaatgggatggctgggtcaaatggtatttctagttctagatccctgaggaattgccacactgacttccacaatggttgaacgagtttacagtcccaccaacagtgtaaaagtgttcctgtttctccacatcctctccagcacctgttgtttcctgactttttaatgattgccattctaactggtgtgagatggtatctcattgtggttttgatttgcatttctctgatggccagtgatgatgagcattttttcatgtgttttttggctgcataaatgtcttcttttgagaagtgtctgttcatgtccttcgcccactttttgatggggttgtttttttcttgtaaatttgtttgagttcattgtagattctggatattagccctttgtcagatgagtaggttgcgaaaattttctcccattttgtaggttgcctgttcactctgatggtagtttcttttgctgtgcagaagctctttagtttaattagatcccatttgtcaattttgtcttttgttgccattgtttttggtgttttagacatgaagtccttgcccatgcctatgtcctgaatggtaatgcctaggttttcttctagggtttttatggttttaggtctaacgtttaagtctttaatccatcttgaattgatttttgtataaggtgtaaggaagggatccagtttcagctttctacatatggctagccaattttcccagcaccatttattaaatagggaatcctttccccattgcttgtttttctcaggtttgtcaaagatcagatagttgtagatatgcggcattatttctgaggtctctgttctgttccattgatctatatctctgttttggtaccagtaccatgctgttttggttactgtaggcttgtagtatagtttgaagtcaggtagtgtgatgcctccagctttgttcttttggcttaggattgacttggcgatgcgggctcttttttggttccatatgaactttaaagtagttttttccaattctgtgaagaaagtcattggtagcttgatggggatggcattgaatctgtaaactaccttgggtagtatggccattttcacgatattgattcttcctacccatgagcatggaatgttcttccatttgtttgtatcctcttttatttccttgagcagtggtttgtagttctccttgaagaggtccttcacatcccgtgtaagttggattcctaggtattttattctctttgaagcaattgtgaatgggagttcactcatgatttggctctctgtttggctgttattggtgtataagaatgcttgtgatttttgtacaatgattttgtatcctgagactttgctgaagttgcttatcagcttaaggagattttgggctgagacaatggggttttctagatatacaatcatgtcatctgcaaacagggacaatttgacttcctcttttcctaattgaataccctttatttccttctcctgcctaattgccctggccagaacttccaacactatgttgaataggagtggtgagagagggcatccctgtcttatgccagttttcaaagggaatgcttccagtttttgcccattcagtatgacattggctgtggttttgtcataaatagcccttattattttgaaatacgtcccatcaatacctaatttattgagagtttttagcatgaagggttgttgaattttgtcaaaggccttttctgcatctattgagataatcatgtggtttttgtctttggctctgtttatatgctggattacatttattgattttcgtatgttgaaccagccttgcatcccagggatgaagcccacttgatcatggtggataagctttttgatgtgctgctggattcgttttgccagtattttattgaggatttttgcatcaatgttcatcaaggatattggtctaaaattctcttttttggttgtgtgtctgccaggctttggtatcagaatgatgctggcctcataaaatgagttagggaggattccctctttttctattgattggaatagtttcagaaggaatggtaccagttcctccttgtacctctggtagaattcggctgtgaatccgtctggtcctggactctttttggttggtaagctattgattattgccacaatttcagatcctgttattggtctattcagagattcaacttcttcctggtttagtcttgggagaatgtatgtgtcgaggaatttatccatttcttctagattttctagtttatttgcgtagaggtgtttgtagtattctctgatggtagtttgtatttctgtgggatcggtggtgatatcccctttatcattttttattgcatgtatttgattcttctctctttttttctttattagtcttgctagctagtggtctatctattttctgatcctttcaaaaaaccagctcctggattcattaattttttgaagggttttttctgtctctgtttccttcagttctgctctgattttagttatttcttgccttctgctagcttttgaatgtgtttgctcttgcttttctagttcttttaattgtgatgttagggtgtcaattttggatctttcctgctttctcttgtgggcatttagtgctataaatttccctctacacactgctttgaatgcgtcccagagattctggtatgttgtgtctttgttctcattggtttcaaagaacatctttatttctgccttcatttcgttatgtacccagtagtcattcaggagcaggttgttcagtttccatgtagttgagcggttttcagtgagattcttaatcctgagttctagtttgattgcactgtggtctgagagatagtttgttataatttctgttcttttccatttgctgaggagagctttacttccaagtttgtggtcaattttggaataggtgtggtgtggtgctgaaaaaaatgtatattctgttgatttggggtggagagttctgttgatgtctattaggtccacttggtgccgagctgagttcaattcctgggtatccttgttgactttctgtctcgttgatctgtctaatgttgacagtggggtgttaaagtctcccattattaatgtgtgggagtctaagtctctttgtaggtcactcaggacttgctttatgaatctcggtgctcctgtgttgggtgcatatatatttaggatagttagctcttcttgttgaattgatccctttaccattatgtaatggccttctttgtctcttttgatctttgttggtttaaagtctgttttatcagagactaggatggcaacccctgcctttttttgttttccatttgcttggtagattttcctccatccttttattttgagcctatgtgtgtctctgcatgtgagatgggtttcctgaatacagcacactgatgggtcttgactctttatccaatttgccagtctgtgtcttttaattggaggacttagtccatttacatttaaagttaatattgttatgtgtgaatttgatcctgtcattatgatgttagctggtgattttgctcgttagttgatgcagtttcttcctagtctcgatggtctttacattttggcatgattttgcagcggctggtaccggttgttcctttccatgtttagcgcttcctccaggagctcttttagggcaggcctggtggtgacaaaatctctcagcatttgcttgtctgtaaagtattttatttctccttcacttatgaagcttagtttggctggatatgaaattctgggttgaaaattcttttctttcagaatgttgaatattggcccccactctcttctggcttgtagggtttctgccgagagatccactgttagtctgatgggcttccctttgagggtaacccgacctttctctctagctgcccttaatattttttctttcatttcaaccttggggaatctgacaattatgtgtcttggagttgctcttctcgaggagtatctttgtggcgttctctgtatttcctgaatctgaacgttggcctgccttgctagattggggaagttctcctggataatatcctgcagagtgttttccaacttggttccattctccccatcactttcaggtacaccaatcagacgtatttggtcttttcacatagtcccatatttcctggaggctttgctcatttctttttattcttttttctctaaacttcccttcttgcttcatttcattcatttcatcttccatcgctgataccctttcttccagttgatcgcatcggctcctgaggcttctgcattcttcacgtagttctcgagccttggttttcagctccatcagctcctttaagcacttctctgtattggttattctatttatacattcttctaaatttttttcaaagttttcaacttctttgcctttggtttgaatgtcctcccatagctcagagcaatttcatcgtctgaagccttcttctctcagcctgtcaaagtcattctccgtccagctttgttccgttgctggtgaggaactgtgttcctttggaggaggagaggcgctctgctttttagagtttccagtttttctgttctgttttttccccatctttgtggttttatctacttttggtctttgatgatggtgatgtacagatgggtttttggtgtggatgtcctttctgtttgttagttttccttctaacagacaggaccctcagctgcagggcttttggagtaccctgccgtgtgaggtgtcagtgtgcccctgttggggggtgcctcccagttaggctgctcgggggtcaggggtcaggcacccgcttgaggaggcagtctgcccgttctcagatctccagctgcgtgctgggagaaccactgctctcttcaaagctgtcagacagggacatttaagtctgcagaggttgctgctgtctttttgtttgtctgtgccctgcccccagaggtggagcctacagaggcaggcaggcctccttgagctgtggtgggctccacccagttcgagcttcctggctgctttgtttacctcagcaagcctgggcaatggcgggcgcccctcgcccagcctcgctgccgccttgctgtttgatctcagactgctgtgctcgcaatcagcgagactccatgggcgtaggaccctccgagccaggtgcggggtataatctcgtggtgcgccgttttttaagcccgtgggaaaagcgcagtattcgggtgggagtgacccgattttccaggtgccgtctgtgacccctttctttgactcggaaagggagctccctgaccccttgcgcttcccaagtgaggcgatgcctcgccctgcttcggctcgcgcacggtgcgtgcacccactgacctgcgcccactgtctggcactccctagtgagatgaacccggtacctcagatggaaatgcagaaatcacgctgcatcgctcacgctgggagctgtagaccggagctgttcctattcggccatcttggctccaca

SEQ ID NO: 10379 - DNA, 6033 bp, Homo sapiens
atataaatcttttctttttattatactttaagttttagggtacatgtgcacattgtgcaggttagttacatatgtatacatgtgccatgctggtgcgctgcacccactaactcgtcatctaacattaggtatatctcccaatgctatccctcccccctccccccaccccacaacagtccccagagtctgatgttccccttcctgtgtccatgtgttctcattgttcaattcccacctatgagtgagaatatgcggtgtttggttttttgttcttgcgatagtttaccgagaatgatgatttccaatttcatccatgtccctacaaaggacatgaactcatcattttttatggctgcatagtattccatggtgtatatgtgccacattttcttaatccagtctatcattgttggacatttggattggttccaagtttttgctattgtgaataatgccacaataaatatacatgtgcatgtgtctttatagcagcatgatttatagtcctttgagtacatacccagtaatgggatggctgggtcaaatggtatttctagttctagatccctgaggaatcgccacactgacttccacaatggttgaactagtttacagtcccaccaacagtgtaaaagtgttcctatttctccacatcctctccagcacctgttgcttcctgactttttaatgattgccattccaactggtgtgatatgatatctcattgtggttttgatttgcatgtctctgatggccagtgatggtgagcattttttcatgtgttttttggctgcataaatgtcttcttttgagaagtgtctgttcatgtccttcgcccactttttgatggggttgtttgtttttttcttgtaaatttgtttgagttcattgtagattctggatattagccctttgtcagatgagtaggttgcaaaaattttctcccattttgtaggttgcctgttcactctgatggtagtttcttttgctgtgcagaagctctttagtttaattagatcccatttgtcaattttgtcttttgttgccattgcttttggtgttttagacatgaagtccttgcccatgcctatgtcctgaatggtaatgcctaggttttcttctagggtttttatggttttaggtctaacgtttaagtctttaatccatcttgaattgatttttgtataaggtgtaaggaagggatccagtttcagctttctacatatggctagccagttttcccagcaccatttattaaatagggaatcctttccccattgcttgtttttctcaggtttgtcaaagatcagatagttgtagatatgcggcgttatttctgagggctctgttctgttccattgatctatatgtctgttttggtaccagtaccatgctgttttggttactgtagccttgtagtatagtttgaagtcaggtagtgtgatgcctccagctttgttcttttggcttaggattgacttggcgatgcgggctcttttttggcttcatgtaaactttaaagtagttttttccaattctgtgaagaaagtcattggtagcttgatggggatgacattgaatctgtaaattaccttgggcagtatggccattttcacgatattgattgttcctacccatgagcatggaatgttcttccatttgtttgtatcctcttttatttccttgagcagtggtttgtagttctccttgaagaggtccttcacatcccttgtaaattggattcctaggtattttattctctttgaagcaattgtgaatgggagttcactcatgatttggccctctgtctgtctgttgttggtgtataagaatgcttgtgatttttgtacattgattttgtatcctgagactttgctgaagttgcttatcagcttaaggagattttgggctgagacaatggggttttctagatatacaatcatgtcatctgcaaacagggacaatttgacttcctcttttcctaattgaataccctttatttccttctcctgcctaattgccctggccagaacttccaacactatgttgaataggagtggtgagagagggcatccctgtcttgtgccagttttcaaagggaatgcttccagtttttgcccattcagtatgatattggctgtgggtttgtcagagatagtcttattattttgaaatacgtcccatcaatacctaatttattgagagtttttagcatgaagggttgttgaattttgtcaaagggcttttctgcatctattgagataatcatgtggtttttgcctttggttctgtttatatgctggattacatttattgatttgcatatattgaaccagccttgcatcccagagatgaagcccacttgatcatggtggataggctttttgatgtgctgctggatttggtttgccagtattttattgaggatttttgcatcaatgttcaccaaggatattggtctaaaattctcttttttggttgtgtctttgcccggctttggtatcagaatgatgctggcctcataaaatgagggaggattccctctttttctgttgattggaatagtttcaatcaaatttcaagaaggaatggtaccagttcctccttgtacctctggtagaattcggctgtgaatccatctggtcctggactctttttcgttggtaagctattgattattgccacaatttgagatcctgttattggtctattcagagattcaacttcttccttgtttagtcttgggagagtgtatgtgtcgaggaatgtatccatttcttctagattttctagtttatttgcgtagaggtgtttgtagtattctctgatggtagtttgtatttctgtgggattggtggtgatatcccctttatcattttttattgcgtctatttgattcttctctctttttttctttattagtcttgctagcggtctatcaattttgttgatcctttcaaaaaaccagctcctggattaattaattttttgaatggttttttgtgtctctatttccttcagttctgctctgattttagttatttcttgccttctgctagcttttgaatgtgtttgctcttgcttttctagttcttttaattgtgatgttaggtgtcaattttggatctttcctgctttctcttgtgggcatttagtgctataaatttccctctacacgctgctttgaatgcgtcccagagattctggtatgttatgtctttgttcttgttggtttcaaagaacatctttatttctgccttcatttcgttatgtacctagtagtcattcaggaggaggttgttcagtttccatgtagttgagcagttttgagtgagattcttaatcctgagttctagtttgattgcactgtggtctgagagatagtttgttataatctctgttcttttacatttgctgaggagagctttacttccaagtatgtggtcaattttggaataggtgtggtgtggtgctgaaaaaaatgtataatctgttgatttggggtagagagttctgtagatgtctattaggtccacttggtgcagagctgagttcaattcctgggtatccttgttgactttctgtcttgttgatctgtctaatgttgacagtggggtgttaaagtctcccattattaatgtgtgggagtctaagtctctttgtaggtcactcaggacttgctttatgaatctgggtgctcctgtattgggtgtctatatatttaggatagttagctcttcttgttgaattgatccctttaccattatgtaatggccttctttgtctcttttgatctttgttggtttaaagtctgttttatcagagacgaggattgcaacccctgcctttttttgttttccatttgcttggtagatcttcctccatccttttattttgagcctatgtgtgtctgtgcatgtgagatgggtttcctgaatacagcacactgatgggtcttgactctttatccaatttgccagtctgtgccttttaattggagcatttagtccatttacatttaaagttagtattgttatgtgtgaatttgatcctgtcattatgatgttagctggttattttgctcattagttgaggcagtttcttcctagtctcaatggtctttacattttggcatgattttgcagtggctggtacttgttgttcctttccatgtttagtgcttcctttaggagctcttttagggcaggcctggttgtgacaaaatctctcagcatttgcttgtctgtaaagtattttatttctccttcacttatgaagcttagtttggctggatatgaaattctgggttgaaaattcttttctttaagaatgttgaatattggccccactctcttctggcttgtagagtttctgccgagagatctgcgttagtctgatgggcttccctttgagggtaacccgacctttctctctggctgcccttaacattttttccttcatttcatctttggtgaatctgacaattatgtgtcttggagttgctcttctcgaggattatctttgtggcgttctctgtatttcctgaatctgaatgttggcctgccttgctagattggggaagttctcctggataatatcctgcagagtgttttccaacttggttccattctccccatcactttcaggtacaccaatcagacatagatttggtcttttcacgtagtcccatatttcttggaggctttgctcatttctttttattcttttttctctaaccttcccttctcacttcatttcattcatttcatcttccatcactgataccctttcttccagttgattgcatcggctcctgaggcttctgcattcttcacgtagttctcgagccttggttttcagctccatcagctcctttaagcacttttctgtattggttattctagttataaattcttctaaatttttttcacagttttccacttctttgcctttggtttgcatgtcctcccgtagctcggagtaatttgatcgtgtaaagccttcttctcttagctcgtcaaagtcattctccgtccagctttgttccattgctggtgaggaactgcattcctttggaggaggagaggcgctctgctttttagagtttcgtttttctgttctgttttttccccatctttgtggttttatctacttttggtctttgatggcggtgatgtacagatgggtttttggtgtggatgtcctttctgtttgttagttttccttctaacagacaggaccctcagctgcaggtctgttggagtacccggccatgtgagctgtaagtctgcccctgctggggggtgcctcccagttaggctgcttgggggtcagggatcagggacccacttgaggcagtctgccagttctcagatctccagctgcatgctgggagaaccactgctctctccaaagctgtcagacagggacatttaagtctgcagaggttactgctgtctttttgtttgtctgtgccctgcccccagaggtggagcctacagaggcaggcaagcctccttgagctgtggtgggctccacccagttcgagcttcccagctgctttgtttacctaagcaagcctgggcaatggcgggcgcccctcccccagccttgctgccgccttgcagtttgatctcagactgctgtgctagcaatcagcgagactccgtgggcataggaccctctgagccaggtgcgggatataatctcctggtgcgccattttttaagcccatcggaaaagcgcaatattcaggtgggagtgacccgattttccaggtgccgtctgtcaccccttttttgactaggaaagggaactccctgaccccttgcgcttcctgagtgaggcaatgcctcaccctgcttcggctcgcacacggtgtgcgcacccactgacctgggcccactttctggcactcgctagtgagatgaacctggtacctcagatggaaatgcagaaatcacctgtcttctgcgtcgctcacgctgggacctgtagaccggagctgttcctattcggccatcttggctcccg

SEQ ID NO: 10380 - DNA, 5029 bp, Homo sapiens
gctgttttctttttgtttattattataatttaagtttgagggtacatgtgcacaatgtgcaggtttgttacatatgtatacatgtgccatgttggtgtgctgcacccattaactcgtcatttagcattaggtatatctcctaatgctctccctacccgctacccccaccccacaacaggccccaagtgtgtgatgttccccttcctgtgtccatgtgttctcattgttcatttcccacctatgagtaagaacatgcggtgtttggttttttctccttgcgatggtttgctgagaatgatggtttccagcttcatccatgtccctacaaaggacatgaactcatcattttttaaggctgcatagtattccatggtgtatatgtgccacattttcttaatccagtctatcattgttggacatttgggttggttccaagtctttgctattgtgaatagtgccacaataaacatacgtgtgcatgtgtctttatagcagcatgatttatagtcctttggatatacatccagtaatgggatggctgggtcaaacgatatttctagttctagatccctgaggaatcgccacactgacttccacaattgttgaactagtttacagtcccaccaacagtgtaaaattgttcctatttctccacatcctcttcagcacctgttgtttcctgacttcttaatgatcgccattctaactggtgtgagatggtatctcattgtggttttgatttgcatttctctgatggccagtgatgatgagcattttttcatgtgtcttttggctgcataaatgtcttcttttgagaagcgtctgttcatatccttcgcccacttgttgatggggttgtttttttcttgtaaatttgtttgagttctttgtagattctggatattagccctttgtcagatgagcagattgcaaaaattttgtcccattctgtaggttgcctattcactctgatgatagtttcttttgctgtgcagaagctctttagtttaattagttcccatttgtcagttttggcttttgttgccattgctttgggtgttttagacatgaagtccttgcccttgcccatgcctatgtcctgaatggtattgcctaggttttcttctagggtttttatggttttaggtctaacatttaaatctttaatccatcttgaattaatttttgtataaggtgtaaggaagggatccagtttcagctttctacatatggctagccagttttcccagcaccatttattaaatagggaatcctttccccattgcttgtttttgtcaggtttgtcaaagatcagatagttgtagataacgtggcattatttctgagggctctgttctgttccattggtctagatctctgttttggtaccagtaccatgctgtttgggttactgttgccttgtagtatagtttgaagtcaggtagtgtgatgcctccagctttgttcttttggcttaggattgacttggcgatgcgggctcttttttggttccatatgaactttaaagtagttttctccaattctgtgaagaaagtcattggtagcttgatggggatggcattgaatctataaattaccttgggcagtatggccattttcacgatattgattgttcctacccatgagcatggaatgttcttccatttgtttgtatcctcttttattttcattgagcagtggtttgtagttctccttaaagaggtccttcacatcccttgtaagttggatcctaggtattttattctctgaagcaattgtgaatgggagttcactcatgatttggctctctgtttgtctgctaatggtataagaatgcttgtgatttttgcacattgattttgtatcctgagactttgctgaagttgcctatcagcttaaggagattttgggctgagacgatgggttttctagatatactatcacatcatctgcaaacaggaacaatttgatttcctcttttcctaactgaataccctttatttccttctcctgcctgattgccctggccagaacttccaacactatgttgaataggagtggtgagagagggcatccctatcatgtgccagttttcaaagggaatgcttccagtttttgcccattcagtatgatattggctgtgggtttgtcatagatagctcttattattttgagatatgtcccatcaatacctaatttattgagagtttttagcatgaagtgctgttgaattttgtcaaaggccttttctgcatctattgagataatcatgtggtttttgtcattggttctgtttatatactggattatgtttaatgatttgcatatgttgaaccagccttgcatcccagggatgaagcccacttgatcatggtggataagctttttgatgtgctgctggattcggtttgccagtattatattgaggatttttgcattgatgttcatcagggatcttggtctaaaattctctttttttgttgtgtctctgccaggctttggtatcaggatgatgctggcctcataaaatgagttagggaggattccctctttttctattgattggaatagtttcagaaggaatggtaccagctcctccttgtacctctggtagaattcagctgtgaatctgtctggtcccggactttttttggttggtaagctattaattattgcctcaatttcagagcctgttatcggtctattcagagattcaacttcttcctggtttagtcttgggagggtgtatgtgtcaaggaatttatccatttcttctagattttctagtttatttgcgtagaggtgtttatactattctctgatggtagtttgtatttctgtaggatcagtggtgatatcccctttatcattttttaattgcatctatttgattcttctctgttttcttctttattagtcttgctagtggtctatcaattttgttgatcttttcacaaaaccagctcctggattcattgattttttgaagggttttttgtgtctctatttccttcagttctgctctgatcttagttatttcttgccttctgctagcttttaaatgtgtttgctcttgcttctctagttcttttaattgtgatgttagggtgtcaattttagatctttcctgctttctcttgtgggcatttagtgctataaatttccctctacacactgctttgaatgtgtcccagagattctggtatgttgtgtctttgttctcattggtttcaaagaacatctttatttctgccttcatttcattatgtacccagtagtcactcaggagcaggttgttcagtttccgtgtagttgagtggttttgagtgagtttcttaatcctgagttctagtttgattgcactgtggtctgagagacagtttgttataatttctgttcttttacatttgctgaggagtgctttacttccaactatgtggtcaattttggaataggtgtggtgtggtgctgaaaagaatgtctattctgttgatttggggtggagagttctgtagatgtctattaggtctgcttggtgcagaactgaattcaatttctggatatccttgttaactttctgtctcgttgatctgtctaatgttgacagtggggtgttaaagtctcccattattattgtgtgggagtctaagtctctttgtaggtctctaaggacttgctttatgaatctgggtgctcctgtattgggtgcatatatatttaggatagttagctcttcttgttgcattgatccctttaccatcatgtaatggccttctttgtcacttttgatctttgttggtttaaagtctgttttatcagagactaggattgcaacccctgcctttttttgttttccatttgcttggtagatcttcctccatccctttattttgagcctatgtgtgtctctgcatgtgagatgggtttcctgaatacagcacactgatgggtcttgactctttatccaatttgccagtctgtgtcttttaattggagcatttagcccatttacatttaaggttaatattgttatgtgtgaatttgatcctgtcattatgatgttagctggttattttgctcgttagttgatgcactttcttcctagcctcgctggtctttacaatttggcatgtttttgcagtgggtggtaccagttgttcctttccatgtttagtgcttccttcaggagctcttttagggcaggcctggtggtgagaaaatctctcagcatttgcttatctataaagtattttatttctccttcacttatgaagcttagtttcactggataagaaattctgggttgaaaattcttttctttaagaatgttgaatattggcccccactctcttctgccttctagagtttctgccgagagatccattgttagtctgataggcttccctttatgggtaacccgacctttctctctggctgcccttaacattttttcctgcatttcaactttggtgaatctgacaattctgtgtcttggagttgctcttcttgaggagtatctttgtggcgttctctgtatttcctgaatctgaatgttggcctgccttgctagattagggaagttctcctggataatatcctgcagagtgttttccaacttggtcccattctccctgtcactttcaggtacaccaatcagacatagatttggtcttttcacaaagtcccatatttcttggaggctttgttcatttctttttattcttttttctctaaacttctcttctcacttcatttcattcgtttgatcttccatcactgataccctttcttccagttgatcgaattggctactgaggcttgtgcattcgtcacgtagttctcgtgccttggttttcagctccatcaggtcctttaaggacttctttgcattggttattctagttagccatttgtctaatcttttttcaaggtttttaacttctttgccatgggttcgaacttcctcctttagcttggagtagtttgattgtctgaagccttctctcagctcgtcagagtcattctccat

SEQ ID NO: 10381 - DNA, 6044 bp, Homo sapiens
attgctgtttttttttttttttattatactctaagttttagggtacatgtgcacattgtgcaggttagttacatatgtatacatgtgccatgctggtgcgctgcacccactaatgtgtcatctagcattaggtatatctcccaatgctatccctcccccctcccccgaccccaccacagtccccagagtgtgatattccccttcctgtgtccatgtgatctcattgttcaattcccacctatgagtgagaatatgcagtgtttggttttttgttcttgcgatagtttactgagaatgatggtttccaatttcatccatgtctctacaaaggatatgaactcatcattttttatggctgcatagtattccatggtgtatatgtgccacgttttcttaatccagtctatcattgttggacatttgggttggttccaagtctttgctattgtgaatagtgccacaataaacatacgtgtgcatgtgtctttatagcagcatgatttatactcatttgggtatatacccagtaatgggatggctgggtcaaatggtatttctagttctagatccctgaggaatcgccacactgacttccacaatggttgaactagtttacagtcccaccaacagtgtaaaagtgttcctatttctccacatcctctccagcacctgttgtttcctgactttttaatgattgccattctaactggtgtgagatgatatctcatagtggttttgatttgcatttctctgatggccagtgatgatgagcatttcttcatgtgttttttggctgcataaatgtcttcttttgagaagtgtctgttcatgtccttcacccactttttgatggggttgtttgtttttttcttgtaaatttgtttgagttcattgtagattctggatattagccctttgtcagatgagtaggttgcgaaaattttctcccatgttgtaggttgcctgttcactctgatggtagtttcttttgctgtgcagaagctctttagtttaattagatcccatttgtcaattttgtcttttgttgccattgcttttggtgttttggacatgaagtccttgcccacgcctatgtcctgaatggtaatgcctaggttttcttctagggtttttatggttttaggtttaacgtttaaatctttaatccatcttgaattgatttttgtataaggtgtaaggaagggatccagtttcagctttctacatatggctagccagttttcccagcaccatttattaaatagggaatcctttccccattgcttgtttttctcaggtttgtcaaagatcagatagttgtagatatgcggcattatttctgagggctctgttctgttccattgatctatatctctgttttggtaccagtaccatgctgttttggttactgtagccttgtagtatagtttgaagtcaggtagtgtgatgcctccagctttgttcttttggcttaggattgacttggcaatgcgggctcttttttggttccatatgaactttaaagtagttttttccaattctgtgaagaaagtcattggtagcttgatggggatggcattgaatctgtaaattaccttgggcagtatggccattttcacgatattgattcttcctacccatgagcatggaatgttcttccatttgtttgtctcctcttttatttccttgagcagtggtttgtagttctccttgaagaggtccttcacatcccttgtaagttggattcctaggtattttattctctttgaagcaattgtgaatgggagttcacccatgatttggctctctgtttgtctgttgttggtgtataagaatgcttgtgatttttgtacattgattttgtatcctgagactttgctgaagttgcttatcagcttaaggagattttgggctgagacgatggggttttctagataaacaatcatgtcgtctgcaaacagggacaatttgacttcctcttttcctaattgaataccctttatttccttctcctgcctgattgccctggccagaacttccaacactatgttgaataggagcggtgagagagggcatccctgtcttgtgccggttttcaaagggaatgcttccagtttttgcccattcagtatgatattggctgtgggtttgtcatagatagctcttattattttgaaatacgtcccatcaatacctaatttattgagagtttttagcatgaagggttgttgaattttgtcaaaggctttttctgcatctattgagataatcatgtggtttttgtctttggctctgtttatatgctggattacatttattgatttgcgtatattgaaccagccttgcatcccagggatgaagcccacttgatcatggtggataagctttttgatttgctgctggattcggtttgccagtattttattgaggatttttgcatcaatgttcatcaaggatattggtctaaaattctcttttttggttgtgtctctgcccggctttggtatcagaatgatgctggcctcataaaatgagttagggaggattccctctttttctattgattggaatagtttcagaaggaatggtaccagttcctccatgtacctctggtagaattcggctgtgaatccatctggtcctggactctttttggttggtaaactattgattattgccacaatttcagagcctgttattggtctattcagagattcaacttcttcctggtttagtcttgggagagtgtatgtgtcgaggaatgtatccatttcttctagattttctagtttatttgcgaagaggtgtttgtagtattctctgatggtagtttgtatttctgtgggatcggtggtgatatcccctttatcattttttattgtgtctatttgattcttctctcttctttctttattagtcttgctagcggtctatcaattttgttgatcctttcaaaaaaccagctcctggattcattgattttttgaagggttttttgtgcctctatttccttcagttctgctctgattttagttatttcttgccttctgctagcttttgaatgtgtttgctcttgcttttctagttcttttaattgtgatgttagggtgtcaattttggatctttcctgctttctcttgtaggcatttagtgctataaatttccctctacacactgctttgaatgcgtcccagagattctggtatgtggtgtctttgttctcgttggtttcaaagaacatctttatttctgccttcatttcgttatgtacccagtagtcattcaggagcaggttgttcagtttccatgtagttgagcggctttgagtgagattcttaatcctgagttctagtttgattgcactgtggtctgagagatagtttgttataatttctgttcttttacatttgctgaggagagctttacttccaactatgtggtcaattttggaacaggtgtggtgtggtgctgaaaaaaatgtatattctgttgatttggggtggagagttctgtagatgtctattaggtctgcttggtgcagagctgagttcaattcctgggtatccttgttgactttctgtctcgttgatctgtctaatgttgacagtggggtgttaaagtctcccattattaatgtgtgggagtctaagactctttgtaggtcactgaggacttgctttatgaatctgggtgctcctgtattgggtgcataaatatttaggatagttagctcctcttgttgaattgatccctttaccattatgtaatggccttctttgtctcttttgatctttgttggtttaaagtctgttttatcagagactaggattgcaacccctgcctttttttgttttccattggcttggtagatcttcctccatccttttattttgagcctatgtgtgtctctgcacgtgagatgggtttcctgaatacagcacactgatgggtcttgactctttatccaacttgccagtctgtgtcttttaattgcagaatttagtccatttatatttaaagttaatattgttatgtgtgaatttgatcctgtcattatgatgttagctggtgattttgctcattagttgatgcagtttcttcctagtctcgatggtctttacattttggcatgattttgcagcggctggtaccggttgttcctttccatgtttagtgcttccttcaggagctcttttagggcaggcctggtggtgacaaaatctctcaacatttgcttgtctataaagtattttatttctccttcacttatgaagcttagtttggctggatatgaaattctgggttgaaaattcttttctttaagaatgttgaatattggcccccactctcttctggcttgtagggtttctgccaagagatccgctgttagtctgatgggctttcctttgagggtaacccgacctttctctctggctgcccttaacattttttccttcatttcaactttggtgaatctgacaattatgtgtcttggagttgctcttctcgaggagtatctttgtggcgttctctgtatttcctgaatctgaacgttggcctgccttgctagattggggaagttctcctggataatatcctgcagagtgttttccaacttggttccattctccacatcactttcaggtacaccaatcagacgtagatttggtcttttcacatagtcccatatttcttggaggctttgctcatttctttttattcttttttctctaaacttcccttctcgcttcatttcattcatttcatcttccattgctgatacccttacttccagttgatcacatcggctcctgaggcttctgcattcttcacgtagttctcgagccttggttttcagctccatcagctcctttaagcacttctctgtattggttattctagttatacattcttctaaatttttttcaaagttttcaacttctttgcctttggtttgaatgtcctcccgtagctcagagtaatttgatcgtctgaagccttcttctctcagctcgtcaaaatcattctccatccagctttgttctgttcctggtgaggaactgcgttcctttggaggaggagaggcgctctgcgttttagagtttccagtttttctgttctgttttttccccatctttgtggttttatctacttttggtctttgatgatggtgatgtacagatgggttttcggtgtagatgtcctttctggttgttagttttccttctaacagacaggaccctcagctgcaggtctgttggaataccctgccgtgtgaggtgtcagtgtgcccctgctggggggtgcctcccagttaggctgctcgggggtcaggagtcagggacccacttgaggaggcagtctgtctgcccgttctcagatctccagctgcgtgctgggagaaccactgctctcttcaaagctgtcagacagggacacttaagtctgcagaggttactgctgtctttttgtttgtctgtgccctgcccccagaggtggagcctacagaggcaggcaggcctccttgagctgtggtgggctccacccagttcgagcttcccggctgctttgtttacctaagcaagcctgggcaatggcgggcgcccctcccccagcctcgttgccgccttgcagtttgatctcagactgctgtgctagcaatcagcgagattccgtgggcgtaggaccctccgagccaggtgtgggatatagtctcgtggtgcgccgtttcttaagccggtctgaaaagcgcaatattcgggtgggagtgacccgattttccaggtgcgaccgtcacccctttctttgactcggaaagggaactccctgaccccttgcgcttcccaggtgaggcaatgcctcgctctgcttcggctcgcgcacggtgcgcacacacactggcctgcgcccactgtctggcactccctagtgagatgaacccggtacctcagatggaaatgcagaaatcaccgtcttctgcgtcgctcacgctgggagctgtagaccggagctgttcctattcggccatcttggctcctcccctc

SEQ ID NO: 10382 - DNA, 4732 bp, Homo sapiens
tctctttttttattattattattgtactttaagtttttagggtacatgtgcacaacgtgcagatttgttacatatgtatacatatgccatgttggtgtgctgcacccattaacttgtcatttaacattcggtatatctcctaatgctatccgtccccgctccccccacccaacaacaggccccagtgtgtgatgttccccttcctgtgtccatgtgttctcattgttcaattcccacctatgagtaagaacatgcggtgtttggttttttgtccttgcaatagtttgctgagaatgatggtttctagcttcatccatgtccctacaaaggacatgaactcatcatttttatggctgcacagtattccatggtgtatatgtgccacattttcttaatccagtctatcattgttggacatttgggttggttccaagtctttgctattgtgaatagtgccgcaataaacatatgtgtgcatgtgtctttatagcagcatgatttataatcctttgggcatatacccagtaatgggatagctgggtcaaatggtatttctagttccagatccctgaggaatcgccacactgacttccataatggttgaactagtttacagacccaacaacaatgtaaaagtgttcctatttctccacatcctctccagcacctgttgtttcctgactttttaataatcgccattctaactggtgtgagatggtatctcattgtggttttgatttgcatttctctaatggccagtgatgatgaacatttttccatgtgtcttttggctgcataaatgccttcttttgagaagtgtctgttcatatcctttgcgcactttttgatggggttgtttgtttttttcttgtaaatttgttggagttcattgtagattctggttattagccctttgtcagatgagtagattgcaaaaattttctcccattctgtaggttgcctgttcactctgatggtggtttcttctgctgtgcagaagctctttagttcaattagatcccatttgtcaattttggcttttgttgccattgcttttggtgttttagacatgaagtccttgcccatgcctatgtcctgaatggtattacctaggttttcttctagggtttttatggttttaggtctaacatttaagtctttaatccatagtaaattaatttttgtataaggtgtaaggaagggatccagtttcagctttctatatatggctagccagttttcccagcaccatttattaaatagggaatcctttccccattgcttgtttttgtcaggtttgtcaaagatcagatagttgtacatatgcagcattatttctgagggctctgttctgttccattggtctacatctctgttttggtacaagtaccatgctgttttggttactgtagccttgtagtgtagtttgaagtcaggtagcgtgatgcctccagctttgttcttttggcttaggattgacttggcaatgcgggctcttttttggttccatatgaactttaaagtagttttttccaattatctgaagaaagtcattagtagcttgatggggatggcattgaatctataaattaccttgggcagtatggccatcttcacaatattgattcttcctacccatgagcatggaatgttcttccgtttgtttgtatcctcttttatttcattgagcagtggtttgtagttctccttgcagaggtccttcacatcccttgtaagttggattcctaggtattttattctctttgaagcaattgtgagtgggagttcactcacgatttggctctctgtttgtctgttattggtgtataggaatgcttgtgatttttgcacattgattttgtatcctgagactttgctgaagttgcctatcagcttaaggagattttaggttgagacaatggggttttctagatatacaatcatgtcagctgcaaacagggacaatttgacttcctcttttcctaattgaatgccctttatttccttctcctgcctaattgccctggccagaacttccaacactatgttgaatatttgtggtgagagagggcatccctgttttttgccagttttcaaagggaatgcttccagtttttgcccattgagtatgatattggctgtgggtttgtcatagatagctcttattattttgagatatgtcccatcaatatctaatttattgagagtttttatcataaagagttgttgaattttgtcaaaggccttttctgcatctattgagatagccgtgtggtttttgtcattagttctgtctatatgctggattaggtttattgattttcctatgttgaaccagccttgcatcccagggatgaagcccacttgatcatggtggataagctttttgatgtgctgctggattcagtttgccagtattttattgaggatttttgcatcgatgttcatcaggtatattggtctaaaattctctttttttgttgtgtctctgccagactttggtatcaggatgatgctggcctcataaaatgagttagggaggattccctctttttctattgattagaatagtttcagaaggaatagtaccagctcctccttgtacctctggtagaattcagctgtgaatccatctggtcctggactttttttggttggtaagctattaattattgcctcaatttcagagcctattattggtctattcagagattcaacttcttcctggtttagtcttgtgagagtgtatgtgtcgaggaatttatccatttcttctagattttctagtttatttgcatagacgtgtttatagtattctctgatggtagtttgtgtttctgtgggatcgttggtgatatcccctttatcattttttattgcatctatttgattcttctctcttttcttctttattagtcttgtttgctagtggtctatcaattttgttgatcttttcaaaaaaccagcttctggatttattgattttttgaagggttttttgtgtctctatttccttcagttctgctctgatcttagttatttcttgccttctgctagcttttgaatgtgtttgctcttgcttctctagttattttaattgtgatgttagggtgtcagttttagatctttcctactttctcttgtgggcatttagtgctataaatttccctctacacactgttttgaatgtgtcccagagattttggaatgttttgtctttgttttcattggtttcaaagaacatctttatttctgccttcatttcattatgtacccagtagtcattcaggagcaggttgttcagtttctatgtagttgagcggttttgagtgagtttcttaatcctgtggtctagtttgattgcactgtggtctgagagacagtttgttataatttttgttcttttacatttgctaaggagtgctttacttccaactatgtggccaattttggaataggtgtggtgtggtgctgagaagaatgtatattctgttgatttggggtggagagttctgtagatgtctattaggtctgcttggtgcagagctgagttcaattcctggatatccttgttaactttctgtctcttgatctgtctaatgttgacagtggggtgttaaagtctcccattattatagtgcgggagtctaagtctatttgtaggcctctaaggacttgctttatgaatctgggtgctcctgtattaggtgcatatatatttaggatagttagctcttcttgttgaattgatccctttaccattatgtaatggccttctttttctcttttgatctttgttggtttaaagtctgttttatcagagactagagttgcaacccctgcctttttttgttttccatttgcttggtagatcttcctccatccctttattttgagcctatgtgtgtctctgcacgtgagatgggtttcctgaatacagcacagtgataggtcttgactctttatccaatttgccagtctgtgtcttttaattggagcatttagcccatttacatttaaggttaatattgttatgtatcaatttgatcctgtcatgatggtgttagctggcaattttgctcattagttgatgcagtttcttcctaacctcgatggtctttacaactcggcatgtttttccagtggctggtactggcttttcctttccatatttagtgcttccttcaggagctcttttaggtcaggcctggtggtgacaaaatctctcagcatttgcttgtctgtaaagtgttttatttctccttcacttatgaagcttagtttggctggatatgaaattctgggttgaaaattcttttctttaagaatgttgaatattggcccccactctcttctggcttgtagagtttctgccaagagatccgctgttagtctaatgggcttccctttgtgggttacccgacctttctctctggctgcccttaccattttttccttcatttcaactttggtgaatctgacaattatgtgtcttggagttgctcttctcaaggagtatctttgtggtgttctctgtatttcctgaatttcaatattggcctgccttgctagattggggacattctcctggataatatcctgcagagtgttttccatcttggttccattctccccatcactttcaggtacaccagtcagatgtagatttggtcttttcacatagtctggtcttttcacatagtcccatatttcttggaggctttgttttttt

SEQ ID NO: 10383 - DNA, 4830 bp, Homo sapiens
acttttttttaaaattatactttaagttctagggtacatgtgcacaatgtgcagatttgttacatagatatacatgtgccatgttggtttgctgcacccatcaactcgtcatttacattaggtatttctcctaatgctatccctccccttgcccccaaccccacaacaggccccagggtgtgatgttccctgccctgtatccaagtgttctcattgttcaactcccacctgtgagtgagaacatgcggtgtttggttttctgtccttgtgatagtttgctcagcatgatggtttccagcttcatccatgtccccacaaaggacatgaactcatccttttttatggctgcatagtattccatggtgtatacatgccacattttcttaatccagtctatcattgatggacctttgggttggttccaagtctttgctattgtgaatactgccacaataagcatacgtgtgcatgtgtctttatagcagcatgatttataatcctttgggtatatacccagtaatgggatggctgagtcaaatggtatttctagttctagatccttgaggaattgccatactgtcttccacaatggttgaactagtttacactcccacccacagtgtaaaagcattcctgtttctccacatcctctccagcatctgttgtttcctgactttttaatgatcgccattctaactggtgtgagatggtatctcattatggttttgatttgcatttctctgatgaccagtgatgatgagcattttttcatgtgcctgttggctgcataaatgtcttcttttgagaagtgtttgtttatatcttttgcccactttttgatggggttgtttgtttttttcttgtaaatttgtttacattctttgtggattctggatattagccctttgtcagatggataggttacaaaaattttctcccattctttaggttggctgttcactctgatggtcgtttcttttgctgtgcagaagctctttagtttaattagatcccatttgtctattttggcttttgttgccattgcttttggtgttttagtcatgaagtccttgcccatgcctatgtcctgaatggtattgtttaggttttcttccagggtttttatggttttaggtctaacatttaagtctttaatccaccttgaattaatttttgtgtaaggtgtaaggaagggatccagtttcagctttctacatatggctagccagttttcccagcaccatttattaaatagggaatcctttccccatttcttgtttttgtcaggtttgtcaaagatcagatggttgtagatgtgtggtattatttctgaggcctctgttctgttctattcgtctatatatctgttttggtaccagtaccatgctgtttcggttactgtagccttatagtatagtttgaagtcaagtagcatgatgcctccagctttgttcttttggattaggattgtcttggcaatgcaggctcttttttggttgcatatgaactttaaagtagttttttccaattctgtgaagaatgtcattggtagcttgatggggatggcattgaatctataaattaccttgggcagtatggccctttccacagtattgattcttcctaaccatgagcatggaatgttcttccatttgtttgtgtcctcttttattttgttgagcagtggtttgtagttcttgttgaagaggaccttcacatcccttgtaagttggatgcctaggtattttattctctttgtagcaattgtgaatgagagttcactcatgatttggctctctgtttgtctgttattggtgtataggaatgcttgtgatgtttgcacattgattttgtatcctgagactttgctgaagttgcttatcagcttgaggagattttgagctgagatgatgggtttttctaaatatacaatcatgtcatctgcaaacagggacagttcgacttcctcttttcctaattgaataccctttatttctttctcttgcctgattgccctggccagaacttccaacactatgttgaataggagtggtaagagagggcatccctgtcttgtgctagttttcaaagggaatgcttcagtttttgcccattcagtatgatattggctgtgggtttgtcataaatagcttttattattttgagatacattccatcaatacctagttcattgagagtttttagcatgaagggctgttgtattttgttgaaggtcttttctgcatctattgagataatcatgtggtttttgtcattgttctgtttatgtgatggattatgtttactgatttgcatatgttgaaccagccttgcattccagggatgaagctgacttaatcgtggtggataagctttttgatgcactgctggatttggtttgccagtattttattgaggatttttgcatcgatgttcatcagggatattggcctaaaattctctttttttgttttgtctctgctagactttggtatcaggatgatacttgcctcataaaatgaattagggaggataccctctttttgtattgattggaatagtttcagaaggattgatacaaagaggtttgtacctctgctagaatttggctgtgaatccgtctggtcctggactttttttggttggttaggctattagttattgcctcaatttcagagcctgttattggtctattcagagattcaacttcttcctggtttagtcttgggagggtgtatgtgtccaggaatttatccatttcttctagattttctagtttatttgcatagaggtgtttatagtattctctgatggtagtttgtatttctgtgggatcagtggtgatatcccaatttatcgttttttattgcgtctatttgattcttctctcttttcttctttattagtcttgctagcggtttatcaattttgttgatcttttcaaaaaaaaaaacagctcctggattcattgatttttttgaagagttttttgtgtctctatctccttcagttctgctctgatcttagttatttcttgccttctgctagcttttgaatttgtttactcttgcttctctagttcttttaattgtgatgttagggtgttgattttagatcttttctgctttctcttgtgggcatttagtgctataaatttccctctacacatggctttaaatgtgtcccagacattctggtatgttgtgtctttgttctcgttggtttcaaagaacatctttatttctgccttcatttcgttatgtccccagtagtcattcaggagcaggttgttcagtttccatgtagttgtgcagttttgagtgagtttcttaatcccgagttctaatttgattgcactgtggtctgagagacagtttgttatgatttctcttcttttatgtttgctgaggagtgctttacttccaactatgtggtcagttttacaataagtgcgatgtggtgctgagacaaatgtatattctgttgatttggggtggagagttctgtagatgtctattaggtctgcttggtgcagagctgagttcaagtcctggatatccttgttaagtttctgtctcgttgatccgtctaatattgacagtggggtgttgaagtctcctattattattgtgtgggagtctaagtctctttgtaggtctctgaggacttgctttatgaatctggatgctcctgtattgggtgcatatttatttaggatagttagctcttcttgttcaatcgatccctttaccattatgtaatggccttctttatctcttttgatctttgttggtttaaagtctgttttatcagagactaggattgcaacccctgcttttttttgctttccatttgcttggtagatcttcctccatccctttattttgagcctatgtgtgtctctgcatgtgagatgggtctcctgaatacagcacactgatgggtcttgactctatccaatttgccagcctgtatctttcaactggggcatttagcccatttacatttaaggttaatattatgtgtgcatttgatcctgtcattatgatgttagctggctattttgcccattagctgatgtagtttattcctagcattgatggtttttacaatgtagcatgtttttgcagtggctggtaccagttattcctttccatgtttagtgcttccttcaggagctcttgtaaggcaggcctggtggtgacaaaatctctcagcatttgcttgtctgtaaaggattttatttctccttcacatatgaaggttagtttggctggatatgaaattctgggttgaaaattcttttctttaagaaagttgaatcttggcccctactctcttctggcttgtagagtttctgctgagagatctgctgttagtctgatgggcttccctttgtgggtaacctgatgtttctctctggctgcccttaatattttttccttcatttcaaccttggtgaatctgacaattatgtgtcttggggttgctcttctcgaggagtatctttgtggtgttctctgtatttcctgaatttgaatgttggcctgccttactaggttggggaagttctcctgggtaatatcctgaagagtgttttccaacttggatccattttccctgtcactttcaggtacaccaatgaaacgtagatttggtcttttcacatagtcccatatttcttggaggctttgtttgtttctttttactcttttttctctaaacttctctttttgttttatttcattgatttgatcttcaatcactgataccctttcttccacttgatcgcattggctattgaagcttgtgcatgcatctcgtagttct

SEQ ID NO: 10384 - DNA, 11028 bp, Homo sapiens
tttattttttgagatggagtctccctctgccacccaggcaggagtgcagtggcgtgatctcagctcactgcaagctccacctcctgggttcacgccattctcctgcctcagcctcccaagtagctgggactacaggcacccgccaccacgcccagctaatttttgcatttttagtacagacagggtttcaccatgttagccaggatggtctcaatctcctgaccttgtgatccgcccgcctaggcctcccaaagtgctgggattacaggcatgagccaccgcgcccagccttacataatagttatttttaaaatctgcttagtaatatttgcaaaataggtaattcaagcaaatcttcccactgaaaacaaatagaaaagttagacaaaataatttttacaagataacttgaagctatgagaaaaaaggaggctgtaaaaaaattataaaccaaaaatgtaggagaaaagggcagagagagacaaatctagcatttggggcaacttcaaatgtaagagggtgcatagatcctggaagagtagctaagcagctcagaacctaagaagtgcttttgaacaacttgtaaggtagaaagacaaaacttgaaatccaagattccagtgctttatattaggaacccaaaaagctgtaccttaagaacaaagataactcagtaatataccaaccctcaaaaaatgaagaaagttcaataatctcaagccctgaaattagattaagtttatcccaattgtttgtgctcccagccacttgtcagatgcaaaagtaaagcttcactgaagaaaaataacattatcttagtttattatctctagaattgtttatatacaatatcttgtgctcaaccaaaaataaacagacacaaaacagagacaaaaattgtgacaagacagacagcaaaagagagagagagaggagagagagagggaaagggaggagaagagaaagagagaaagaaagagagaaattagttaatagaaacaaagcaatcaaatatcaagataataaagttatcaaaactaaatgttgaatcagctaactagatagtggacttgttgaaaactatgccaaatattttcaaggaaatatatcaagattggaaatattttcctaaaaaactctcaggaatcacaaaagaagtgaatcagatcaaaattccaaaatcaaaaatacaataatcaaaattaagaatccaatggataaatttaagaacaaatttgtattaatctaaatactatattcagattaagttacaattgtgaaataataaaaaatatatataatggtctctgtccaaagtacttggcacagagttcctaaaactcttataatgtcctaagcaataggagtgctagaattatttcttctaatgtgtggtctctgttctggttcctgagagatagctcctgatacccttgtagaccagggtgctaggagaatcttctgttataacatttggcctttgccccttggttcccaacacagcgctccttccaatcccttggaatatcctgggtgataggagaatcttttcttctaatgaagcaattcttggtgggcttctggatagcctcaggataggggctggttgccaggggcaactcaccatgtgattaaaagcttggaacattcagacccacccctaacctctggagaggaaaaaggggctaaaggttgagtttatcactaatgcccagtgatgtaatcaaccatccatatgtaatgaagccttcatcaaaacctaaagtaacttgcttcagatgagctttgaaacagtggaacacatggaagttcctgggggatgggtattcagagagggtataggaactccacactccttctcatgtgccttgccctatgcacctcttccatctggctgttcatctttgtaatatcctttataataaactggtttaaatgtaaataaagtgtttcccagagaaggaggtcatgggaacccccaatttatagctggtcatcagatgcccaggttacaacctactatttgcaactagcacctgcagcgggggaggtcttgtgggattgagtcctcaacctatgggatctgatgctatctacaggtagatagtgtaagaattgagttgaataagagtataccagctattgtctgctgaagaatctactacagaatcaattggttgctggtagggagaaatccccacaaattttggtgaccagaggccacaaaagtattctaaatactttttttctttatttctcaatgcttttttttccctatatctcagagaagctgaagagagaattagtgatttggaagacaagtagatggggagagagtgttcaggataagcatatattaaaagcacaaaaaatacaaaaaagtaaaataacaaaacacttaaaagacacactaacaaggtctgacacacctggactcttagaataaggggacaaataatcagctaagaaaactctaaacctaatgaaaatgccatagcttatgagctcaagaagtatatatgaagaggaaacaataacaacttctgtttctacccaagatacagaaataggaaccagatttaccatcgtaccataaacaaatggaaagcaaaaaatatatatatgaaaattgattttcggaccctgagtaacaggcaatgtagggctataatcctggataacaagaaaacaaataagcaaggtaaaccttatgcttttaccagcttgtgtttagaggcaatttcaaagctgtagtaaagaaaggggaaccaaaatagagcctaatggtctcactaagtgaagggaacagaatgtgatttaaaatttttttttattttttcccttatgtttcatttaggattttctcaatgtctgattttcataatttttctttatatttatcttgtgtggagtttgctgaacctctcacatctcttgcctattatctcttcaattgttgcttaagtctcattctctttctcctttcttcctgggactttacttatatatactgtcatgcaacacttaacaaagggaatatatgttttgaaaatttcattattaggtaatttcatcattgtgtaaacatcatagagtatatttctgcaaacctaaatggaaagtgtacaatagcctattgcacacttaggctatatggtgtagcctattgctcctagcctacaaacttgtatagcattttactgtgctgagtactgcaggccattgtaatacaatagtatttttgtatctaaacatagaaaagatacagtgatagtgctatattataatcttctcagaccgccatcatatttctagtctattgaattcttcattcattcatatttttctatgttttggtaatttatattcacttgactttgagttcctcaatgttatctaggatgtacaatctaatgttaaaccattcccatgagttcttaaattagttattgcttttcttttcagatccataatattcacttgaaaattttttatagattgtatttatctgttgaaattgccatctttttatcaatattgtcatttttctgctttccttaacaaattttatattcattttatagtctttgctgctaattccagcatctggatcatctggggactggtctatatagttatctttaattatggatcatatttttcacctttttcatatgtctcatcattgttttatttatgccagaaagaacaatagagactggagtaaatgttatgttccttcataaagagcatcccttgtcctctattaagcaggtgggatgaatggctggctatttttgaactaattattaattgagctgggtgacagttcggttgctactttagtttgactctgtcacaatttaataaaatgtatgagaagtagcaaggaagaaatacagactgatagaattcacacatagaaaatcaaaaagaacttacagactggatacaaggtcgatatgcaaaaatcagtagtttttttatacatcgacaaacaaaaaatgaaattttaaatgatatcatctacaatagtatccaaatatattacatttctaggaattaatctaagaaaacatgtaaagcatctctattcagaacaatataacacattatggaaagaaataagcatccaaatcagggtccagccaactttttctgtaaggatcaagtaataagtattttagcctttgtagctagctggtctatatcataactgcccaattctgcattataatgccaacacagaaatagacaatgtgtaaaccaataggtgtgactgtgctcccataaaactttttttcaaaaacaggcagaggatacatatttatcctatagactatagtttgttgacccctgatctaaataatcacagaaataaaatatattaatatgtcataaatatacaataactgtgtccattctccccaaattgattttttaattcaaatccttcacagtcaaattcagatgtttgtggggttattttttgtttgtttgttttttgttttggtaaatattgacaagctaattccaacatacaataaaaattaaatgggcaaaaatttgccaagacaacactgaagaaaaacagaattaaaagacttcagagatgtcaagagttttttaacactctagtaattaacaaagcgtgctattgccaacagaatatatgcctagacaaataggacctaggaggcaatccagtaacgtctttgcatgtacaaatatttgattcatgagaaagctatcactgcaaagcagtggagaagggatggtcattccaataaccaatctagatgggtcatctagatagaaataatgtaaaagaagataccctcatataatacacaaaattaattatatgtatatgatagatctaaatgtgaaaaataaaacaatgagacttccaaaagaaactacagaggaatattttcagaactttgaggtaggcaaaaatttcttaaccagtacatataaaagactagtggcaaaagagaagacattaaaaagaaacacgtctaattatcaaagacattttgagtgaaaagggaagccatgggctgagagaagatgttttcagagacttagatagatattacataaaagaagatctccaggtgaaaagatgccaaggattataacacatcaggaaaaatgaaaatcaaaatcacaaaaagatatcaataagagttggagtggctaaaatagcaagaatgataatattaagtattggtgaaaatgtgggaggcctaagttggaagaacttaggtgggccgtaagttggaagactatattatatgctaaagttgaatatagacattggaagaactacattgcatgctaaagttaaatgtacacatttcctattaaccaatttcatttttaggtatagttcaaaaagaaatatatgcacatatacacaataatgttcacagtggcaccattcgtaataatccaataaatttgtgttatttcccataaaactgggaaacaacacaaattcttgacatcagtagaatggataaatcatttgtagaatattaattcaatatactattatgcaataatgaaaataaactactgtcccacatataatatggttatacctcagaaaaataatgcagagtaaaagaatttgccaaatatggaaaatatgtattatattgtttcatttttttaattttattattattatactttaagttttagggtacatgtgcacaacgtgcaagtttgttacatatgtatacatgtgccatgttggtgtgctgcacccattaactcgtcatttagcattaggtatatctcctaatgctatccctcccaacttcccccaccccacaacagtccccagtgtgtgatgttccccttctgtgtccatgtgttcttattgttcaattcccacctatgagtgagaacatgcggtgtttggtttttcgtccttgccatagtttgctgagaattatggtttccagcttcatccatgtccctacaaaggacatgaactcatcattttttatggctgcatagtattccatggtgtatatgtgccacattttcttaatccagtctatcattgttggacatttgggttggttccaagtctttgctattgtgaatagcaccgtgataaacatacgtgtgcatgtgtctttatagcagcatgatttataatcctttgggtatatacccagtaatgggatggctgggtcaaatggtatttctagttctagatccctgaggaatcgccacactgaattccacaatggttgaactagtttacagtcccaccaacagtataaaagtgttcctatttctccacatcctctccagcacctgttgtttcctgactttttaatgatcaccattctaactggtgtgagatggtgtctcattgtggtttcaatttgcatttctgtgatggccagtgatgatgagcattttttcatgtgttttttggctgcataaatgtcttcttttgagaagtgtctgttcatatccttcacccactttttgatggggttgtttctttttttcttgtaaatttgtttgagttcattgtaaattctggatattacccctttgtcagatgagtaggtggcaaaaattttctcccattctgtaggttgcctgttcactctgatggtagtttcttttgctgtgcagaagctctttagtttaatgagatcccatttgtcaattttggcttttgttgccattgcttttggtgttttagacatgaaggctttgcccatgcctatgtcctgaatggtactgcctaggttttcttctagggtttttatggttttaggtctaacatttaagcctttaatccatcttgaattaatctttgtataaggtgtaaggaagggatccagtttgagctttctacatgtggctagcctgttttcccagcaccatttattaaatagggaatcctttccccattgcttgcttttcaggtttgtcaaagatcagatagttgtagatatgtggcattatttctgagggctctgttctgttccactggtctatatctctgttttggtaccagtaccatgctgtttgggttaccataggcttgtagtatagtttgaagtcaggtagtgtgatgcctccagctttgttcttttggcttaggattgacttggcaatgcaggctcttttttggtttcatatgaactttaaagtagttttttccaattctgtgaagaaagtcattggtagcttgatggggatggcattgaatctataaattaccttgggcagtatggccattttcacgatattgattcttcctacccatgagcatagaatgttcttccatttgtttgtatcctcttttatttcattgagtagtggtttgttgttctccttgaagaggtccttcacatcccttgtaagttggattcctaggtattttattctctttgaagcaattgtgaatgggagttcactcatgatttggctctctgtttgtatgttattggtgtataagaatgcttgtgatttttgtacattgattttgtatcctgagactttgctgaagttgcttatcagcttaaggagattttgggctgagacgacggggttttctagatatacaatcatgtcatctgcaaacagggacaatttgacttcctcttttcctaattgaataccttttatttctttctcctgcctgattgccctggccagaacttccaacactatgttgaataggagtgttgagagagggcatccctgtcttgtgccagttttcaaagggaatgcttccagtttttgtctattcagtatgatattggctgtgggtttgtcatagatagctcttattattttgagatacgtcccatcaatacctaatttactgagagtttttagcatgaagcattgttgaattttgtcaaaggctttttctgcatctattgagataatcatgtggtttttgtctttggttctgtttatatgctggattacatttcttgatttgcgtatgttgaaccagtcttgcatcccagggatgaagcccagttgatcatggtggataagctttttgatgtgctgctggattcagtttgccagtattttattgagaatttttgcttcaatgttcatcaaggatattggtctaaaattctcttttttggttgtgtctctgccaggctttggtatcaggatgatgctggcctcataaaatgagttggggaggattctctctttttctattgattggaatagtttcagaatgaatggtaccagatcctccttgtacctctgttagaattcagctgtgaatccatctgctactggacattttttggttggtaagctgttaattattgcctcaatttcagagcctgttattggtctattcagagattcaacttcttcctggtttactcttgggagagtgtatgtgtcaaggaatttatccatttcttctaggttttctagtttatttgcatagaggtgtttatagtattctctgatggtagtttgtatttatgtgggatcagtggtgatatctcctttgtcactttttattgcatctatttgattcttctctcttttcttctttattagtcttgctagagggctatcaattttgttgatcttttcaaaaaaacagctcctggattcattgatttttttaaagggtttttttgtgtctctatttccttcagttcttctctgatcttagttatttcttgccttctgctagcttttgaatgtgtttgctcttgctactctagttcttttaattgtgatgttagggtgtcaattttagatctttcctgctttctcttgtgggcatttagtgctataaatttccctctacacactgctttgaatgtgtcccagagattctggtatgttgtgtctttgttctcgttggtttcaaagaacatctttatttctgcctttatttcgttatgtacccagtagttattcaggagcaggttgttcagtttccatgtagttgagcagtttggaggaagtttcttagtcctgagttctagtttgattgcactgtggtctgagagacagtttgttataatttctgttcttttacatttgctgaggagtgctttactctcaactatgtggtcaattttggaataggtgtggtgtggtgctgaaaagaatgtatattctgttgatttggggtggagagttctgtagatgtctattaggtcggcttggtgcagagctgagttcaattcctggatatccttgttaactctctgtctcgttgatttgtgtaatgttgacagtggggtgttaaagtctcccattattattgtgtgggtgtctaagtctctttgtaggtcactaaggacttgctttacgaatctgggtgctccagtattgggtgcatatatatttaggatagttagttcttcctgttgaattgatccctttaccattatgtaatggccttctttgtctcttttgattttgttggtttaaagtctgttttatctgagactaggattgcaacccctgccttttttttgttttccatttgcttagtagaccttcctccatccctttattgtgagcctacgtgtgtctctgcatgtgagatgggtttcctgaatacatcacactgatgggtcttgactctttatccaatttgccagtctgtgtcttttaattggagcatttagcccatttacatttaaggttagtattgttatgtgtgaatttgatcctgtcattatgatgttagctggttattttgctcgttagttgatgcagtttcttcctagccttgatggtctttacaatttggcatgtttttgcagtggctggtgccagtttttcctttccatgtttattgcttctttcaggagctcttttagggcaggcctggtggtgacaaaatctctcagcatttgcttgtctataaagtattttatttctccttcacttatgaagcttaatttggctggatatgaaattctggattgaaaattcttttctttaagaatgttgaatattggcccccattctcttctggcttgtagaatttctgctgagagatcagctgttagtctgatgggcttccctttgtgggtaacccgacctttctctctggctgcccttaacattttttccatcatttcaactttggtgaatctgacaattatgtgtcttggagttgctcttctcgaggagtatctttgtggtgttctctgtatttcctgaatctgaatgttggcctgccttgctagattggggaagttctcctgggtaatatcctgcagagtgttttccaacttggttccattctccctgtcgctttcagatacaccaatcagatgtagatttggtcttttcacatagtcccatatttcttggaggcttcgtttgtttcgttttattcttttttctctaaacttctcttctcacgtcatttcattcatttcatcttccatcgctgataccctttcttccagttgatcgcaacagctactgaggcttgtgcattcgtcacgtagttctcgtcccatggttttcagctccatcaggttctttaaggacttctctgcattggttattctagttagccatttgtctaatttttttttcaaggtttttaacttctttgccattggttcgaacttcctcctttagcttggagtagtttgatcttctgaagccttctctcagctcgtcaaagtcattctctgtccagctttgttctgttgctggtgaggagctgcattcctttggaggagaagaggcgctctgatttttagtgtttctggtttttctgctctgttttttccccatctttgtggttttatctacctttggtctttgaagatggtgatgtacagatgggtttttggtgcggatgtcctttctgtttattagttttccttctaacagtcaggaccctcagctgcaggtctgttggagttactggaggtccactccagaccctgtttgcctgggtatcagcagcagtggctgcagaacagcagatattggtgaaccacaaatgctgctgcctga

SEQ ID NO: 10385 - DNA, 6036 bp, Homo sapiens
ttaagttttctttatatcttctttttttttaattatactttaagttttagggtacatgtgcacattgtgcaggttagttacatatgtacacatgtgccatgctggtgcgctgcacccactaacttgtcatctagcattaggtatatctcccagtgctatccctccccccgccccccaccccacaacagtccccagagcgtgatattccccttcctgtgtccatgtgatctcattgttcaattcccacctatgagtgagaatatgcggtgtttggttttttgttcttgcgatagtttactgagaatgatgatttccaatttcatccatgtccctacaaaggacatgaactcatccttttttatggctgcatagtattccatggtgtatatgtgccacattttcttaatccagtctatcattgttggacatttgggttggttccaagtctttgctattgtgaataatgccgcaataaacatacgtgtgcatgtgtctttatagcgcatgatttatagtcctttgggtatatacccagtaatgggattgctgggtcaaatggtatttctagttctagatccctgaggaatcgccacactgacttccacaatggttgaactagtttacagtcccaccaacagtgtaaaagtgttcctatttctccacatcctctccagcacctgttgtttcctgactttttaatgattgccattctaactggtgtgagatggtatctcattgtggttttgatttgcatttctctgatggccagtgatgatgagcattttttcatgtgttttttggctgcataaatgtcttcttttgagaagtgtctgttcttgtccttcgcccactttttgatggggttgtttgtttttttcttgtaaatttgttgagttaattgtagattctggatattagccctttgtcagatgagtaggttgcgaaaattttctcccattttgtaggttgcctgttcactctgattgtagtttcttttgctgtacagaagctctttagtttaattagatcccatttgtcaattttgtcttttgttgccattgcttttggtgttttagacatgaagtccttgcccatgcctatgtcctgaatggtattgcctaggttttcttctagggtttttatggttttaggtttaacgtttaaatctttaatccatcttgaattgatttttgtataaggtgtaaggaagggatccagtttcagctttctacatatggctagccagttttcccagcaccatttattaaatagggaatcctttccccattgcttgtttttctcaggtttgtcaaagatcagatagttgtagatatgcggcgttatttctgagggctctgttctgttccattgatctatatctctgttttggtaccagtaccatgctgttttggttactgtagccttgtagtatagtttgaagtcaggtagcgtgatgcctccagctttgttcttttggtttaggattgacttggcgatgtgggctcttttttggttccatatgaactttaaagtagttttttccaatctgtgaagaaaggcattggtagcttgatggggatggcattgaatctgtaaattaccttgggcagtatggccattttcacgatattgattcttcctacccatgagcatggaatgttcttccatttgtttgtatcctcttttatttccttgagcagtggtttgtagttctccttgaagaggtccttcgcatcccttgtaagttggattcctaggtattttattctctttgaagcaattgtgaatgggagttcactcatgatttggctctctgtttgtctgttgttggtgtataagaatgcttgtgatttttgtacattgattttgtaccctgagactttgctgaagttgcttatcagcttaaggagattttgggctgagacaatggggttttctagatatacaatcatgtcatctgcaaacagggacaatttgacttcctcttttcctaattgaataccctttatttccttctcctgcctaattgcgctggccagaacttccaacactatgttgaataggagtggtgagagagggcatccctgtcttgtgccagttttcaaagggaatgcttccagtttttgcccattcagtatgatattggctgtgggtttgtcatagatagctcttattattttgaaatacgtcccatcaatacctaatttattgagagtttttaggatgaaaggttgttgaattttgtcaaaggccttttctgcatctattgagataatcatgtggtttttgtctttggctctgtttatatgctggattacatttactgatttgcgtatattgaaccagccttgcatcccagggatgaagcccacttgatcatggtggataagctttttgatgtgctgctggattcggtttgccagtattttattgaggatttttgcatcaatgttcgtcaaggttattggtctaaaattctcttttttggttgtgtctctgcccggctttggtatcagaatgatgctggcctcataaaatgagttagggaggattccctctttttctattgattggaatagtttcagaaggaatggtaccagttcctccttgtaccttgtggatccttgtgaatccatctggtcctggactctttttggttggtaaactattgattattgccacaatttcagctcctgttattggtctattcagagattcaacttcttcctggtttagtcttgggagagtgtatgtgtcgaggaatttatcgatttcttctagattttctagtttatttgcgtagaggtgtttgtagtattctctgatgatagtttgtatttctctgggatcagtggtgatatcccctttatcattttttattgtgtctatttgattcttctctctttttttctttattagtcttgctagcggtctatcaattttgttgatcctttcaaaaaaccagatcctggattcattgattttttgaagggtttttgtgtctctatttccttcagttctgctctgattttagttatttcttgccttctgctagcttttgaatgtgtttgctcttgcttttctagttcttttaattgtgatgttagggtgtcaattttggatctttcctgctttctcttgtgggcatgtagtgctataaattttcctctacacactactttgaatgcatcccagagattctggtatgttgtgtctttgttctcgtcggtttcaaagaacatctttatttctgccttcatttcgttatgtacccagtagtcattcaggagcaggttgttcaatttccatgtagttgagtggttttgagtgagattcttaatcctgagttctagtttgattgcactgtggtctgagagatagtttgttataatttctgttcttttacatttgctgaggagagctttacttcgaagtatgtggtcaattttggaataggtgtggtgtggtgctgaaaaaaaagtatattctgttgatttggggtggagagttctgtagatgtctattaggtccgcttggtgcagagctgagttcaattcctgggtatccttgttgactttctgtctcgttgatctgtctaatgttgacagtggggtgttaaagtctcccattattaatgtgtgggagtctaagtctctttgtaggtcactcaggacttgctttatgaatctgggtgctcctgtattgggtgcatatatatttaggatagttagctcttcctgttgaactgatccctttaccattatgtaatggccttctttgtctcttttgatctttgttggtttaaagtctgttttatcagagactaggattgcaacccctgcctttttttgttttcctttggcttggtagatcttcccccatccttttattttgagcctatgtgtgtctctgcacgtgagatgggtttcctgaatacagcacactgatgggtcttgactctttatccaatttgccagtctgtgtcttttaattggagcatttagtccatttacatttaaagttaatatagttatgtgtgaatttgatcctgtcattatgatgttagctggtgattttgctcgttagttgatgcagtttcttcctagtctcgatggtctttacattttggcatgattttgcagcggctggtaccggttgttcctttccatgtttagcgcttccttcaggagttcttttagggcaggcctggtggtgacaaaatctctcagcatttgcttgtctgtaaagtattttatttctccttctcttatgaagcttagtttggctggatatgaaattctgggttgaaaattcttttctttaagaatgttgaatattggcccccactctcttctggcttgtagggtttctgccgagagatccgctgttagtctgatgggcttccctttgagggtaacccaacctttctctctggctgcccttaacattttttccttcattttaactttggtgaatctgacaattatgtgtcttggagttgctcttctcgaggagtatctttgtggcgttctctgtatttcctgaatctgaatgttggcctgccttgctagattggggaagttctcctggataatatcctgcagagtgttttccaagttggttccattctccccatcactttcaggtacaccaatcagacgtagatttggtcttttcacatagtcccatatttcttggaggctttgctgatttctttttattcttttttctctaaactttccttctcgcttgatttcattcatttcatcttccattgctgataccctttcttccagttgatcacatcggctcctgaggcttctgcattcttcacgtagttcttgagccttggttttcagctccatcagctcctttaagcacttctctgtattggttattctagttatacattcttctaaatttttttcaaagttttcaacctctttgcctttggtttgaatgtcctcccgtagctcagagtaatttgatcgtttgaagccttcttctctcagctcgtcaaagtcattctccatccagctttgttccgttgctggtgaggaactgcgttcctttggaggaggagaggtgctctgcgttttagagtttccagtttttctgttctgttttttccccatctttgtggttttatctacttttggtctttgatgatggtgatgtacagatgggttttcggtgtggatgtcctttctgtttgttagttttccttctaacagacaggaccctcagctgcaggtctgttgcaataccctgccgtgtgaggtgtcagtgtgctcctgctgggggtgcctcccagttaggctgctcgggggtcaggggtcagaggcccacttgaggaggaagtctgcccgttctcagatctccagctgcatgctgggagaaccactgctctcttccaagctgtcagacagggacatttaagtctgcagaggttactgctgtctttttgtttgtctgtgccctgcccccagaggtggagcctacagaggcaggcaggcctccttgagctgtggcgggctccacccagttcgagcttcccggctgctttgtttacctaagcaagcctgggcaatggcgggcgcccctcccccagcctcgctgccgccttgcagtgtgatctcagactgctgtgctagcaatcagcgagacaccgtgggcgtaggaccctctgagccaggtgtgggatataatcttgtggtgcgccgtttttaaagccggtctgaaaagcgcaatattcgggtgggagtgacccgattttccaggtgagtccgtcacccctctctttgactcggaaagggaactccctgaccccttgcgcttcccaggtgaggcaatgcctcaccctgctttggcttgcgcacggtgcacgcacccactggcctgcgcccactgtctggcacaccctagtgagatgaaccagatacctcagacggaaatgcagaaatcacccatcttctgcgtcactcacgctgggagctgtagaccggagctgttcctatttggccatcttcggttctt

SEQ ID NO: 10386 - DNA, 6495 bp, Homo sapiens
cctgaagtgatcttcacccaattgttctttctgatcctaataagaacagaagtgccaactgtatgcaagtcactttttttgctcaattaatctgtgccacatttatggcttgcacagcgttggtggaatgatttactaaaaagatatcaaaacgacttttgccttcactgagcacatgattacagcttccctgctggggccttccatgaagggagacctacccagatggcagccaacctgaatggtaatcaccaacttgtacctactccacccaagcaactcaaatcttagcttctttttttttttttttttcaagtatttttatttttttattttttattttttatttttttttacattaaacagcagaagtctttgttagacctgaagtttattagaccttgtcttgttgacttagggaaattcttttttttttttttttaattttttttttttattatactctaagttttagggtacatgtgcacattgtgcaggttagttacatatgtatacatgtgccatgctggtgcgctgcacccactaacgtgtcatctagcattaggtatatctcccaatgctatccctcccccctcccccgaccccaccacagtccccagagtgtgatattctccttcctgtgtccatgtgatctcattgttcaattcccacctatgagtgagaatatgcggtgtttggttttttgttcttgcgatagtttactgagaatgatggtttccaatttcatccatgtccctacaaaggacatgaactcatcattttttatggctgcatagtattccatggtgtatatgtgccacattttcttaatccagtctatcattgttggacatttgggttggttccaagtctttgctattgtgaatagtgccgcaataaacatacgtgtgcatgtgtctttatagcagcatgatttatagtcctttgggtatatacccagtaatgggatggctgggtcaaatggtatttctagttctagatccctgaggaatcgccacactgacttccacaatggttgaactagtttacagccccaccaacagtgtaaaagtgttcctatttctccacatcctctccagcacctgttgtttcctgactttttaatgattgccattctaactggtgtgagatgatatctcatagtggttttgatttgcatttctctgatggccagtgatgatgagcatttcttcatgtgttttttggctgcataaatgtcttcttttgagaagtgtctgttcatgtcctttgcccactttttgatggggttgtttgtttttttcttgtaaatttgtttgagttcattgtagattctggatattagccctttgtcagatgagtaggttgcgaaaattttctcccatgttgtaggttgcctgttcactctgatggtagtttcttttgctgtgcagaagctctttagtttaattagatcccatttgtcaattttggcttttgttgccattgcttttggtgttttggacatgaagtccttgcctacgcctatgtcctgaatggtaatgcctaggttttcttctagggtttttatggttttaagtctaacgtttaaatctttaatccatcttgaattgatttttgtataaggtgtaaggaagggatccagtttcagctttctacatatggctagccagttttcccagcaccatttattaaatagggaatcctttccccattgcttgtttttctcaggtttgtcaaagatcagatagttgtagatatgcggcattatttctgagggctctgttctgttccattgatctatatctctgttttggtaccagtaccatgctgttttggttactgtagccttgtagtatagtttgaagtcaggtagtgtgatgcctccagctttgttcttttggcttaggattgacttggcgatgcgggctcttttttggttccatatgaactttaaagtagttttttccaattctgtgaagaaagtcattggtagcttgatggggatggcattgaatctgtaaattaccttgggcagtatggccattttcacgatattgattcttcctacccatgagcatggaatgttcttccatttgtttgtgtcctcttttatttccttgagcagtggtttgtagttctccttgaagaggtccttcacatcccttgtaagttggattcctaggtattttattctctttgaagcaattgtgaatgggagttcactcatgatttggctctctgtttgtcggttgttggtgtataagaatgcttgtgatttttgtacattgattttgtatcctgagactttgctgaagttgcttatcagcttaaggagattttgggctgagacgatggggttttctagataaacaatcatgtcgtctgcaaacacggacaatttgacttcctcttttcctaactgaataccctttatttccttctcctgcttgattgccctggccagaacttccaacactatgttgaataggagcggtgagagagggcatccctgtcttgtgccagttttcaaagggaatgcttccagtttttgcccattcagtatgatattggctgtgggtttgtcatagatagctcttattattttgaaatacttcccatcaatacctaatttattgagagtttttagcatgaagggttgttgaattttgtcaaaggctttttctgcatctattgagataatcatgtggtttttgtctttggctctgtttatatgctggattacatttattgatttgcgtatattgaaccagccttgcatcccagggatgaagcccacttgatcatggtggataagctttttgatgtgctgctggattcggtttgccagtattttattgaggatttttgcatcaatgttcatcaaggatattggtctaaaattctcttttttggttgtgtctctgcccggctttggtatcagaatgatgctggcctcataaaatgagttagggaggattccctctttttctattgattggaatagtttcagaaggaatggtaccagttcctccttgtacctctggtagaattcggctgtgaatccatctggtcctggactctttttggttggtaaactattgattattgccacaatttcagagcctgttattggtctattcagagattcaacttcttcctggtttagtcttgggagagtgtatgtgtcgaggaatgtatccatttcttctagattttctagtttatttgcgtagaggtgtttgtagtattctctgatggtagtttgtatttctgtgggatcagtggtgatatcccctttatcattttttattgtgtctatttgattcttctctctttttttctttattagtcttgctagcggtctatcaattttgttgatcctttcaaaaaaccagctcctggattcattgattttttgaagggttttttgtgtctctatttccttcagttctgctctgattttagttatttcttgccttctgctagcttttgaatgtgtttgctcttgcttttctagttcttttaattgtgatgttagggtgtcaattttggatctttcctgctttctcctgtaggcatttggtgctataaatttccctctacacactgctttgaatgcgtcccagagattctgttatgtggtgtctttgttctcgttggtttcaaagaacatctttatttctgccttcatttcgttatgtacccggtagtcattcaggagcaggttgttcagtttccatgtagttgagcggctttgagtgagattcttaatcctgagttctagtttgattgcactgtggtctgagagatagtttgttataatttctgttcttttacgtttgctgaggagagctttacttccaactatgtggtcaattttggaataggtgtggtgtggtgctgaaaaaaatgtatattctgttgatttggggtggagagttctgtagatgtctattaggtctgcttggtgcagagctgatttcaattcctgggtatccttgttgactttctgtctcgttgatctgtctaatgttgacagtggggtgttaaagtctcccattattaatgtgtgggagtctaagtctctttgtaggtcactcaggacttgctttatgaatctgggtgctcctgtattgggtgcataaatatttaggatagttagctcctcttgttgaattgatccctttaccattatgtaatggccttctttgtctcttttgatctttgttggtttaaagtctgttttatcagagactaggattgcaacccctgcctttttttgttttccattggcttggtagatcttcctccatccttttattttgagcctatgtgtgtctctacacgtgagatgggtttcctgaatacagcacactgatgggtcttgactctttatccaacttgccagtctgtgtcttttaattgcagaatttagtcaatttatatttaaagttaatattgttatgtgtgaatttgatcctgtcattatgatgttagctggtgattttgctcgttagttgatgcagtttcttcctagtctcgatggtctttacattttggcatgattttgcagcggctggtaccggttgttcctttccatgtttagcgcttccttcaggagctcttttagggcaggcctggtggtgacaaaatctctcagcatttgcttgtctataaagtattttatttctccttcacttatgaagcttagtttggctggatatgaaattctgggttgaaaattcttttctttaagaatgttgaatattggcccccactctcttctggcttgtagggtttctgccgagagatccgctgttagtctgatgggctttcctttgagggtaacccgacctttctctctggctgcccttaacattttttccttcatttcaactttggtgaatctgacaattatgtgtcttggagttgctcttctcgaggagtatctttgtggcgttctctgtatttcctgaatctgaacgttggcctgccttgctagactggggaagttctcctggataatatcctgcagagtgttttccaacttggttccattctccacatcactttcaggtacaccaatcagacgtagatttggtcttttcacatagtcccatatttcttggaggctttgctcatttctttttattcttttgtctctaaacttcccttctcgcttcatttcattcatttcatcttccattgctgataccctttcttccagttgatcgcatcggctcctgaggcttctgcattcttcacgtagttctcgagccttggttttcagctccatcagctcctttaagcacttctctgtattggttattctagttatacattcttctaaatttttttcaaagttttcaacttctttgcctttggtttgaatgtcctcccgtagctcagagtaatttgatcgtctgaagccttcttctctcagctcttcaaaatcattctccatccagctttgttctgttgctggtgaggaactgcgttcctttggaggaggagaggcgctctgcattttagagtttccagtttttctgttctgttttttccccatctttgtggttttatctacttttggtctttgatgatggtgatgtacagatgggttttcggtgtagatgtcctttctggttgttagttttccttgtaacagacaggaccctcagctgcaggtctgttggaataccctgccatgtgaggtgtcagtgtgcccctgctggggggtgcctcccagttaggctgctcgggggtcaggggtcagggacccacttgaggaggcagtctgcccgttctcagatctccagctgcgtgctgggagaaccactgctctcttcaaagctgtcagacagggacacttaagtctgcagaggttactgctgtctttttgtttgtctgtgccctgcccccagaggtggagcctacagaggcaggcaggcctccttgagctgtggtgggctccacccagttcaagcttcctggctgctttgtttacctaagcaagcctgggcaatggcgggcgcccctcccccagcctcgttgccgccttgcagtttgatctcagactgctgtgctagcaatcagcgagattccgtgggcgtaggaccctctgagccaggtgtgggatatagtctcgtggtgcgccgtttcttaagccggtctgaaaagcgcaatattcgggtgggagtgacccgattttccaggtgcgtccgtcacccctttctttgactcggaaagggaactccctgaccccttgcgcttcccaggtaaggcaatgcctcgccctgcttcggctcgcgcacggtgcgcacacacactggcctgcgcccactgtctggcactccctagtgagatgaacccggtacctcagatggaaatgcagaaatcacccgtcttctgcgtcactcacgctgggagctgtagaccggagctgttcctattcggccatcttggctcctccaaatcttagcttctttattcctg

SEQ ID NO: 10387 - DNA, 5521 bp, Homo sapiens
tacatgtgtacaatgtgcaggtttgttacatctgtatacatgtgccatgtatacatgtgctgcacccattaactcatcatttacattaggtatatctcctaatgctttccctccccccttcccccaccttacaacaggccccggtgtgtgatgttccccttcctgtgtccaagtgttctcattgttcagttcccacctatgagtgagaacatgcagtgtttggttttttgttcttgcgatagtttgctgaggatgatggtttccagcttcatccatgtccctatgaaggacatgaactcatccttttttatggctgcatagtattccatggtgtatatgtgccacattttctcaatccagtctatcattgttggacatttgggttggttccaagtctttgctattgtgaatagggctgcaataaacatatgtgtgcatgtgtctttatagcagcatgatttataatcctttgggtatatacccagtaatgggatggctgggtcaaatggtatttctagttctagatccttgaagaatcaccacactgttttccacaatggttgaactagtttacagtcccaccaacagtgtaaaagtgttcctatttctacacatcctctccagcacctgttgtttcctgactttttaatgattgccattctaactggtgtgagatggtatctcactgtggttttaatttgcatttctctgatggccagtgatgaagagcattttttcatgtgtctgttggctgcataaatgtcttcttttgagaagtgtctgttcatatccttcgcccacttgttgatggggttgtttgatttttttcttataaatttgtttgagttctttgtagattctggatattagccctttgtcagatgagtagattacaaaaattttctcccattctgtaggttgcctcttcactctgatggtagtttcttttgctgtgcagaagctccttagcttaattagatcccatttatcaattttggcttttgttgccattgcttttggtgttttagacatgaagtccttgcccatgcctatgtcctgaatggtattgcctaggttttcttctagggtttttatggttttaggtctaacatttaagactttaatcaatcttgaattaattttggtataaggtgtaaggaagggatccagtttcaggtttctacatatggctagccagttttcacagcaccattttttaaatagggaatcctttctccattgcttgttttgtcagttttgtcaaagactggatagttgtagatgtgtggtattatttctgagggctctgttctgttccattggtctatatctctgatttggtaccagtaccatgctgttttggttactgtggccttgtagtatagtttgaagtaaggtagcgtgatgcctccatctttgttcttttggcttaggattgacttggcaatgtgggctcttttttggttccacatgaactttaaagtagttttttccagttccgtgaagaaagtaattggtagcttgatggggatggcattgaatctataaattactttgggcagtatggccattttcacgatattaattcttcctatccatgagcatggaatgttattccatttgtttgtatcttcttttatttcattgagcagtggtttgtagttctccttgaagaggtccttcacatcccttgtaagttggattcctaggtattttattctctttgaagcaattgtgaatgggagttcactcatgatttggctctctgtttgtctgttattggtgtataagaatgcttgtgatttttgcacattgattttgtatcctgagattttgctgaagttgcttatcagcttaaggagattttgggctgagatgatggggttttctaaatatacaatcatgtcatctgcaaacagagacaatttgacttcctcttttcctaattggatactctttatttctttctcctgcctgattgccctggccagaacttccaatactatgttgaagaggagtggtgagagagggcatccctgtcttgtacctgttttcaaaggaaatgcttccagtttttgcctgttcagtatgatattggttgtgggtttgtcataaatacctcttattattttgagatacatcccatcaatacctaatttattgagagtttttagcatgaagagctgttgaattttgtcaaaggctttttctgcatctattgagataatcatgtggtttttgtcattggttctgtttatatgttggattacatttattgatttgcatatgttgaaccagccttgcattccagggatgaagtccacttgatcatggtggataagctttttgatgggctgctggattctgtttgcccgtattttattgaggattttttcatcgatgttcatcagggatattggtctaaaattctctttttttttctgtgtctctgccagcctttggtatcaggatgatgctggcctcataaagtgaattagggaggattccctctttttctattgactggaatagtttcagaaggaatggtaccagctcctcctagtacctctggtagaattcggctgtgaatccgtctggtcctggactttttttggttagtaggctattaattattgcctcaatttcagagcctattattggtctattcagggattcaacttcttcctggtttagtcttgggagggtgtatgtgtccaggaatttatccatttcttctagattttctagtttatttgcatagggtgtttatagtattctctgatgatagtttgtatttctgtgggatcagtggtgatatcccctttatcattttttattgcatctatttgattcttctctcttttcttctttattagtcttgctagtggtctatcaattttgttgatcttttcaaaaaaccagctcctggattcattgattttttgaagggttttttgtgtctctatctccttcagttcttctctgatcttagttatttcttgccttctgctagcttttgaatgtgtttgctcttgcttctctagttcttttaattgtgatgttagggtgtcagttttagatctttcctgctttctcttgtgggcatttagtgctataaatttccctctacacactgctttaaatgtgtcccagagattctgatatgttgtgtctttgttctcattggtttcaaagaacatctttatttctgccttcacttcgttatgtacccagtagtcattcaggagcaggttgttcagtttccatgtagttgagcggttttgagtgagtttcttaatcctgagttctagtttgattgcactgtggtctgagagacaatttgttataatttctgttcttttacatttgctgaggagtgctttacttccaactaagtggtcaattttggaataagtgtgatgtggtgctgagaagaatgtatattctgttgattctgggtggagagttctgtagatgtctattaggtccacttggtgcagagctgagttcaattcctggatatccttgttaactttctgtctcattgatctgtctaatattgacagtggggtgttaaagtctcccattatcattgtgggggagtctaggtctctttgtaggtcactcaggacttgctttatgaatctgggtgctcttgtattgggtgcatacatatttaagttagctcttcttgttgaattgatccctttaccattatgtaatggccttctttgtctcttttgatctttgttggtttaaagtctgttttatcagagactaggattgcaacccctgcctttttttgttttccaattgcttggtagatcttcctccatctctttattttgagcctatgtgtgtctctgcacatgagatgggtctcctgaatacagcacaccgatgagtcttgactctttatccaatttgccagtctatgtcttttaattggagcacttagcccataacaagcttaatattgttatgtgtgagtttgatcctgtcattatgatgttggctggttactttgctcgttagttgatgcagtttcttcctagccttgatggtctttacaatttggcatgtttttgcagtggctcataccagttgttcctttccatgtttagtgcttccttcaggagctcttttagggaaagcctggtggtgacaaaatctctcagcatttgcttgtctgtaaagtattttatttctccttcacttatgaagcttagtttggctggatatgaaattctgggttgaaaataattttctttaagaatgttgaatattggcccccactaacttctggcttgtagagtttctgccaagagatccactgttagtctgatgggtttccctttgtgggtaacccgacctttctctctggctgcccttaacattttttccttcatttcaactttggtgaatctgacaattatgtatcttggagttgctcctctcgaggagtatctttgtggcattctctgtatttcctgaatttgaatgttggcctgccttgctaggttggggaagttctcctggaaaatatcctgcagagtgttttccaacttggttccattctccccgtcactttaagctacaccaatcagatgtagatttggtcttgtcacatagtcccgtatttctcgggtactttgttcgtttctttttactcttttttctctaaacttctgttcttacttcatttcattcatttgatcttcaatcactgataccctttcttccagttgatcaaatcagctactgaagcttgtgcattcatcatgtagttctcatgccatggttttcagctccatcaggtcctttaaggacttctcttcattggttattctacttagccattcgtctaatcttttttcaaggtttttaacttctttgcactgggttcgaacttcctcctttagctcggagaagtttgatcatctgaagccttcttctctcaactcgtcaaagtcattctccttccagctttgttccgttcctggcgaggagctgtgttcctttggagggggagaggtgctctgatttttagaattttcagcttttctgctctgttttttccctgtctttgtggttttatctacctttggtctttgatgatggtgacgtacagatggggtttttgtgtggatgtcctttctgtttgttagttttccttctaacagtcaggaccctcagctgcaggtctgttggagtttgctggaggtccactccagacactgtttgcctgggtatcaccagcagaggctgcagaacagcgaatattgctgaacagcaaatgtttctgcctgatcgttcctctggaagcttcgtctcagaggggtacccagccgtgtgaagtgtcagtctgcctctactgggagatgcctcccaattaggctactcggaggtcagggacccacttgacgaggcagtctgtctgttctcagatctcaaactccatgctgggagaaccactactctcttcaaagctgtcagacagggacatttaagtctgcagagg

SEQ ID NO: 10388 - DNA, 6060 bp, Homo sapiens
tttctttttttttaattttattttattattattttttcttttattattatactttaagttttagggtacatgtgcacattgtgcaggttagttacatatgtatacatgtgccatgctggtgcgctgcacccactaactcgtcatctagcattaggtatatctcccagtgctatccctcccccctccccccaccccacaacagtccccagagtgtgatgttccccttcctgtgtccatgtgatctcattgttcaattcccacctatgagtgagaatatgcattgtttggttttttgttcttgcgatagtttactgagaatgatgatttccaatttaatccatgtccctacaaaggacatgaactcatcattttttagggctgcatagtattccatggtgtatatgtgccacattttctgaatccagtctatcattgttggacatttgggttggttccaagtctttgctattgtgaatagtgccgcaataaacatacgtgtgcatgtgtctttatagcagcatgatttatagtcctttgggtatatacccagtaatgggatggctgggtcaaatggtaattctagttctagatccctgaggaatcgccacactgacttccacaatggttgaactagtttacagtcccaccaacagtgtaaaagtgttcctatttctccacatcctctccagcacctgttgtttcctgactttttaatgattgccattctaactggtgtgagatggtatctcattgtggttttgatttgcatttctctgatggccagtgatgatgagcattttttcatgtgttttttggctgcataaatgtcttcttttgagaagtgtctgttcatgtcctttgcccactttttgatggggttgtttgtttttttcttgtaaatttgtttgagttcattgtagattcttaatattagccctttgtcagatgagtaggttgcgaaaattttctcccattttgtaggttgcctgttcactctgatggtagtttcttttgctgtacagaagctctttagtttaattagatcccatttgtcaattttggcttttgttgccattgcttttggtgttttagacatgaagtccttgcccatgcctatgtcctgaatggtaaagcctaggttttcttctagggtttttatggttttaggtctaacgtttaagtctttaatccatcttgaattgatttttgtataaggtgtaaggaagggatccagtttcagctttctacatatggctagccagttttcccagcaccatttattaaatagggaatcctttccccattgcttgtttttctcaggtttgtcaaagatcagatagttgtagatatgcggcgttatttctgagggctctgttctgttccattgatctatatctctgttttggtaccagtaccatgctgttttggttactgtagccgtgtagtatagtttgaagtcaggtagtgtgatgcctccagctttgttcttttggctcaggattgacttggcgatgcgggctcttttttggttccatatgaactttaaagtagttttttccaattctgtgaagaaaggcattggtagcttgatggggatggcattgaatctgtaaattaccttgggcagtatggccattttcacgatattgattcttcctacccatgagcatggaatgttcttacatttgtttgtatcctcttttatttccttgagcagtggtttgtagttctccttgaagaggtccttcacatcccttgtaagttggattcctaggtattttattctctttgaagcaattgtgaatgggagttcactcatgatttggctctctgtttgtctgttgttggtgtataagaatgcttggatttttgtacattgattttgtatcctgagactttgctgaagttgcttatcagcttaaggagattttgtgctgagacaatggggttttctagatatacaatcatgtcgtctgcaaagagggacaatttgacttcctcttttcctaactgaataccctttatttccttctcctgcctaattgccctggccagaacttccaacactatgttgaataggagtggtgagagagggcatccctgtcttgtgccagttttcaaagggaatgcttccagtttttgcccattcagtatgatattggctgtgggtttgtcatagatagctcttattattttgaaatatgtcccatcaatacctaatttattgagagtttttagcatgaagggttgttgaattttgtcaaaggccttttctgcatctattgagaaaatcatgtggtttttgtctttggctctgtctatatgctggattacatttattgatttgcatatattgaaccagccttgcatcccagggatgaagcccacttgatcatggtggataagctttttgatgtgctgctggattcgtttggccagtattttattgaggatttttgcatcaatgttcatcaaggatgttggtctaaaattctcttttttggttgtgtccctgccaggctttggtatcagaatgatgctggcctcataaaatgagttagggaggattccctctttttctattgattggaatagtttcagaaggaatggtaccagttcctccttgtacctctgatagaattcagctgtgaatccatctggtcctggactctttttggttggtaagctattgattattgccacaatttcagatcctgttattggtctattcagagattcaacttcttcctggtttagtcttgggagagtgtatgtgtcgatgaatttatccatttcttctagattttctagtttatttgggtagaggtgtttgtagtattctctgattgtagtttgtatttctgtgggatcggtggtgatatcccctttatcattttttattgcatctatttgattcttctccctttttttctttattagtcttgctagcagtctatcaattttgttgatcctttcaaaaaaccagctcctggattcattaattttttgaagggttttttgtgtctctatttccttcagttctgctctgattttagttatttcttgccttctgctagcttttgaatgtgtttgctcttgcttctctagttcttttaattgtgatgttagggtgtcaattttggatctttcctgctttctctggtgggcatttagtgctataaatttccctctacacactgctttgaatgcgtcccagagattctggtatgttgtgtctttgttcttgttggtttcaaagaacatctttatttctgccttcatttcgttatgtacccagtagtcattcaggagcaggttgttcagtttccatgtagttgagcggttttgagtgagattcttaatcctgagttctagtttgattgcactgtggtctgagagatagtttgttataatttgtgttcttttacatttgctgaggagagctttacttccaagtatgtggtcaattttggaataggtgtggtgtggtgcagaaaaaaatgtatattctgtggatttggggtggagagttctgtagatgtctattaggtccgcttggtgcagaggtgagttcaattcctgggtatccttgttgactttctgtctcgttgatctgtctaatgttgacagtggggtgttaaagtctcccattattaatgtgtgggagtctaagtctctttgtaggtcactaaggacttgctttatgaatctgggtgctcctgtattgggtgcatatatatttaggacagttagctcttcttgttgaattgatccctttaccattatgtaatggccttctttgtctcttttgatctttgttggtttaaagtctgttttatcagaaactaggattgcaacccctgcctttttttgttttccatttgcttggtagatcttcctccatccttttattttgagcctatgtgtatctctgcacatgagatgggtttcctgaatacagcacactgatgggtcttgactctttatccaatttgccagtctgtgtcttttaattggagcatttagtccatttacatttaaagttaatattgttatgtgtgaatttgatcctgtcattatgatgttagctggtgattttgcttgttagttgatgcagtttcttcctagtctcgatggtctttacattttggcatgattttgcagcagctgacaccggttgtccctttccatgtttagcgcttccttcaggagctcttttagggcaggcctggtggtgacaaaatctctcagcatttgcttgtctgtaaagtattttatttctccttcacttatgaagcttagtttggctggatgtgaaattctgggttgaaaattctttcctttaagaatgttgaatattggcccccactctcttctggcttgtagggtttctgctgagagatccgctgttagtctgatgggtttccctttgagggtaacccgacctttctctctggctgcccttaacattttttccttcatttcaactttggtgaatctgataattatgtgtcttggagttgctcttctcgaggagtatctttgtggtgttctctgtatttcctgaatctgaacgttggcctgccttgttagattggggaagttctcctggataatatcctgcagagtgttttccaacttggttccattctccccgtcactttcaggtacaccaatcagacgtagatttggtcttttcacatagtcccatatttcttggaggctttgctcatttctttttattcttttttctctaaacttcccttctcacttcatttcattcatttcatcttccattgctgataccctttcttccagttgatcgcatcggctcctgaggcttctgcattcttcacgtagttctcgagccttggttttcagctccatcagctcctttaagcacttctctgtattggttattctagttatacattcttctcaatttttttcaaagttttcaacttctttgcctttggtttgaatgtcctcccatagctcagagtaatttgatcgtctgaagccttcttctctcagcttgtcaaagtcgttctccgtccagctttgttctgttgctggtgaggaactgtgttcctttggaggaggagaggcgctctgctttttagagtttccagtttttctgttctgttttttccccatctttgtggttttatctacttttggtctttgatgatggtgatgtacagatgggtttttggtgtggatgtcctttctgtttgttagttttccttctaacagacaggaccctcaggtgcaggtctgttggagtaccctgccgtgcgaggtgtcagtgtgcccctgctgggggtgcctcccagttaggctgctcgggggtcaggggtcaggtacccacttgaggaggcagtctgcccgttctcagatctccagctgcgtactgggacaaccactgctctcttcaaagctgtcagacagggacatttaagtctgcagaggttactgctgtctttttgtttgtctgtgccctgcccccagaggtggagcctacagaggcaggcaggcctccttgagctgtggtgggctccacccagttcgagcttcccggctgctttgtttacctaagcaagcctgggcaatggcgggcgcccctcccccagcctggctgctgccttgcagtctgatctcagactgctgtgctagcaatcagtgagactctgtgggcgtaggaccctccctgccaggtgtgggatataaactcgcgctgcgccgttttttaagcccgtcggaaaagcgcagtattcgggtgggagtgacccgattttccaggtgagtccgtcacccctttctttgactcggaaagggaactccctgaccccttgcgcttccggagtgaggcaatgcctcgccctgcttcggctcgcgcacggtgggcgcacccactgacctgtgcccactgtctggcactccctactgagatgaacctggtacctcagatggaaatgcagaaatcacccgtcttctgcgtcgctcacgctgggagctgtagactggagctgttcctattcggccatcttggctcctccc

SEQ ID NO: 10389 - DNA, 6064 bp, Homo sapiens
ttttattggttttctttttgcttatttatttttttttcttttttttttattatactttaagttttagggtacatgtgcacattgtgcaggttagttacatatgtatacatgtgccatgctggtgcgctgcacccactaactcgtcatccagcattaggtatatctcccaatgctatccctcccccctccccccaccccaccacagtccccagagtgtgatattccccttcctgtgtccatgtgatctcattgttcaattcccacctatgagtgagaatatgcggtgtttggttttttgttcttgcgatagtttactgagaatgatgatttccaatttcatccatgtccctacaaaggacatgaactcatcattttttatggctgcatagtattccatggtgtatatgtgccacattttcttaatccagtctatcattgttggacatttgggttggttccaagtctttgctattgtgaataatgccgcaataaacatacgtgtgcatgtgtctttatagcggcatgatttatactcatttgggtatatacccagtaatgggattggtgggtcaaatggtatttctagttctagatccctgaggaatcgccacactgacttccacaatggttgaactagtttacagtcccaccaacagtgtaaaagtgttcctatttctccacatcctctccagcacctgttgtttcctgactttttaatgattgccattctaactggtgtgagatggtatctcattgtggttttgatttgcatttctctgatggctagtgatgatgagcattttttaatgtgttttttggctgcataaatgtcttcttttgagaagtgtctgttcatgtccttcgcccactttttgatggggttgtttgttttttccttgtaaatttgtttgagttcattgtagattctggatatcagccctttgtcagatgagtaggttgaaaaaattttctcccattttgtaggttacctgttcactctgatggtagtttcttttgctgtgcagaagctctttagtttcattagatcccatttgtcaattttgtcttttgttgccattgcttttggtgttttggacatgaagtccttgcctatgcctatgtcctgaatggtaatgcctaggttttcttctagggtttttatggttttaggtctaacgtttaaatctttaatccatcttgaattgatttttgtataaggtgtaaggaagggatccagtttcagctttctacatatggctagccagttttccagcaccatttattaaatagggaatcctttccccattgcttgtttttctcaggtttgtcaaagatcagatagttgtagatatgcagcgttatttctgagggctctgttctgttccattgatctatatctctgttttggtaccagtaccatgctgttttggttactgtagccttgtactatagtttgaagtcaggtagtgtgatgcctccagctttgttcttttggcttaggattgacttggcgatgcgggctcttttttggttccatatgaactttaaagtagttttttccaattctgtgaagaaagtcattggtagcttgatggggatggcattgaatctgtaaattaccttgggcagtatggccattttcacgatattgattcttcctacccatgagcatggaatgttcttccatttttttgtatcctcttttatttccttgagcagtgctttgtagttctccttgaagaggtccttcacatcccttgtaagttgggttcctaggtattttattctctttgaagcaattgtgaatgggagttcactcatgatttggctctctgtttgtctgttgttggtgtataagaatgcttgtgatttttgtacattgattttgtatcctgagactttgctgaagttacttatcagcttaaggagattttgggctgagacaatggggttttctagatatacaatcatgtcgtctgcaaacagggacaatttgacttcctcttttcctaattgaataccctttatttccttctcctgcctaattgccctggccagaacttccaacactatgttgaataggagtggtgagagagggcatccctgtcttgtgccagttttcaaagggaatgcttccagtttttgcccattcagtatgatattggctgtgggtttgtcgtagatacctcttattattttgaaatacgtcccatcaatacctaatttactgagagtttttagcatgaagggttgttgaagtttgtcaaaggctttttctgcatctattgagataatcatgtggtttttgtctttggctctgtttatatgctggattacatttattgatttgcgtatattgaaccagccttgcatcccagggatgaagcccatttgatcatggtggataagctttttgatgtgctgctgggtttggtttgccagtattttattgaggatttttgcatcaatgttcatcaaggatattggtctaaaattctcttttttggttgtgtctctgcccggctttggtatcagaatgatgctggcctcataaaatgagttagggaggattccctctttttctattgattggaatactttcagaaggaatggtaccagttcctccttgtacctctggtagaatccggctgtgaatccatctggtcctggactctttttggttggtaaaccattgattattgccacaatttcagctcctgttattggtctattcagagattcaacttcttcctggtttagtcttgggagagtgtatgtgtcaaggaatttatccatttcttctagattttctagtttatttgcatagaggtgtttgtagtattctctgatggtagtttgtatttctgtgggatcggtggtgatatcccctttaacattttttattgcgtctatttgattcttctctctttttttctttattagtcttgctagcggtctatcaattttgttgatcctttcaaaaaaccagctcctggattcattaattttttgaagggttttttgtgtctctatttccttcacttctgctctgattttagttatttcttgccttctgctagcttttgaatgtgtttgctcttgcttttctagttcttttaattgtgatgttagggtgtcaattttggatctttcctgctttctcttgtgggcatttagtgctataaatttccctctacacactgctttgaatgcatcccagagattctggtatgttgtgtctttgttctcgttggtttcaaagaacatctgtatttctgccttcatttcgttatgtacccagtagtcattcaggagcaggttgttcagtttccatgtagttgagcggctttgagtgagattcttaatcctgagttctagtttgattgcactgtggtctgagagatagtttgttataatttctgttcttttacatttgctgaggagagctttacttccaactatgtggtcaattttggaataggtgtggtgtggtgctgaaaaaaatgtatattctgttgatttggggtggagagttctgtagatgtctattaggtccgcttggtgcagagctgagttcaattcctgggcatccttgttgactttctgtctcgttgatctgtctaatgttgacagttcggtgttaaagtctcccattattattgtgtgggagtctaagtctctttgtaggtcactcaggacttgctttatgaatctgggtgctcctgtattgggtgcatatatatttcggatagttagctcttcttgttgaattgatccctttaccattatgtaatggccttctttgtctcttttgatctttgttggtttaaagtctgttttatcagagactaggattgcaacccctgcctttttttgttttccatttgcttggtagatcttcctccatccttttattttgagcctatgtgtgtctctgcacctgagatgggtttcctgaatacagcacactgatgggtcttgactctttatccaatttgccagtctgtgtcttttaattggagaatttagtccatttacatttaaagttaatattgttatgtgtgaatttgatcctgtcattatgatgttagctggtgattttgctcattagttgatgcagtttcttcctagtctcgatggtctttacattttggcatgattttgcagcagctggtaccggttgttcctttccatgtttagcgcttccttcaggagctcttttagggcaggcctggtggtgacaaaatgtctcagcatttgcttgtctgtaaagtattttatttctccttcacttatgaagcttagtttggctggatatgaaattctgggttgaaaattcttttctttaagaatgttgaatattggcccccactctcttctggcttgtagggtttctgccgagagatccgctgttagtctgatgggcttccctttgagggtaacccgacctttctctctggctgcccttaacattttttccttcatttcaactttggtgaacctgacaattatgtgtcttggagttgctcttctcgaggagtatctttgtggcgttctctgtatttcctgaatctgaacgttggcctgccttgctagattggggaagttctcctggataatatcctgcagagtgttttccaacttggttccattctccccatcacttttaggtataccaatcagacgtagatttggtcttttcacatagtcccatatttcttggaggctttgctcatttctttttattcttttttctctaaacttcccttctcgcttcatttcattcatttcatcttccattgctgataccctttcttccagttgatcgcatcggctcctgaggcttctgcattcttcacgtagttcttgagccttggttttcagctccatcagctcctttaaacacttctctgtattgattattctagttatacattcttctaaatttttttcaaagttttcaacttctttgcctttggtttgaatgtcctcccgtagctcagagtaatttgatcgtctgaagccttcttctctcagctcatcaaagtcattctccatccagctttgttccgttgctggtgaggaactgtgttcctttggaggaggagaggcgctctgcgttttagagtttccagtttttctgttctgttttttacccatctttgtggttttatctacttttggtctttgatgatagtgatgtacagatgggttttctgtgtggatgtcctttctgtttgttagttttccttctaacagacaggaccctcagctgcaggtctgttggaataccctgccttgtgaggtgtcagtgtgcccctgctggagggtgcctcccagttaggctgctcaggggtcaggggtcagggacccacttgaggaggcaatctgcccgttctcagatctccagctgcgtgctgggagaaccactgctctcttcaaagctgtcagacagggacatttaagcctgcagaggttactgctgtctttttgtttgtctgtgccctgcccccagaggtggagcctacagaggcaggcaggcctccttgagctgtggtgggctccacccagttcgagcttcctggctgctttatctaagcaagcctgggcaatggcgggcgcccctcccccagcctcgctgccgccttgcagtttgatctcagactgctgtgctagcaatcagcaagactccatgggcgtaggaccctccgagccaggtgtgggatacagtctcgtggtgcgccgttttttaagccggtctgaaaagcgcaatattcgggtgggagtgacccaattttccaggtgcgtccgtcacccctttctttgactcagaaagggaactccctgaccccttgagcttcccaggtgaggcaatgcctcgccctgcttcggctcgcgcaccgtgcgcgcacccactggcctgcgcccactgtctggcactccctagtgagatgaacccggtacctcagatggaaatgcagaaatcccccatcttctgcgtcgctcacactgggagctgtagaccggagctgttcctatttggccatcttggctcctcccccct

SEQ ID NO: 10390 - DNA, 6031 bp, Homo sapiens
cctttttttttttttttttttttattatactctaagttttagggtacatgtgcacattgtgcaggttagttacatatgtatacatgtgccatgctggtgcgctgcacccactaacgtgtcatctagcattaggtatatctcccaatgctatccctcccccctcccccgaccccaccacagtccccagagtgtgatattccccttcctgtgtccatgtgatctcattgttcaattcccacctatgagtgagaatatgcggtgtttggttttttgttcttgcgatagtttactgagaatgatggtttccaatttcatccatgtccctacaaaggacatgaactcatcattttttatggctgtatagtattccatggtgtatatgtgccacattttcttaatccagtctatcattgttggacatttgggttggttccaagtctttgctattgtgaatagtgccgcaataaacatacgtgtgcatgtgtctttatagcagcatgatttatagtcctttgggtatatacccagtaatgggatggctgggtcaaatggtatttctagttctagatccctgaggaatcgccacactgacttccacaatggttgaactagtttacagtcccaccaacagtgtaaaagtgttcctatttctccacatcctctccagcacctgttgtttcctgactttttaatgattgccattctaactggtgtgagatgatatctcatagtggttttgatttgcatttctctgatggccagtgatgatgagcatttcttcatgtgttttttggctgcataaatgtcttcttttgagaagtgtctgttcatgtccttcgcccactttttgatggggttgtttgtttttttcttgtaaatttgtttgagttcattgtagattctggatattagccctttgtcagatgagtaggttgcgaaaagtttctcccattttgtaggttgcctgttcactctgatggtagtttcttttgctgtgcagaagctctttagtttaattagatcccatttgtcaattttggcttttgttgccattgcttttggtgttttggacatgaagtccttgcccacgcctatgtcctgaatggtaatgcctaggttttcttctagggtttttatggttttaggtctaacgtttaaatctttaatccatcttgaattgatttttgtataaggtgtagggaagggatccagtttcagctttctacatatggctagccagttttcccagcaccatttattaaatagggaatcctttccccattgcttgtttttctcaggtttgtcaaagatcagatagttgtagatacgcagcattatttctgagggctctgttctgttccattgatctatatctctgttttggtaccagtaccatgctgttttggttactgtagccttgtagtatagtttgaagtcaggtagtgtgatgcctccagctttgttcttttggcttaggattgacttggcgatgcgggctcttttttggttccatatgaactttaaagtagttttttccaattctgtgaagaaagtcattggtagcttgatggggatggcattgaatctgtaaattaccttgggcagtatggccattttcacaatattgattcttcctacccatgagcatggaatgttcttccatttgtttgtgtcctcttttatttccttgagcagtggtttgtagttctccttgaagaggtccttcacatcccttgtaagttggattcctaggtattttattctctttgaagcaattgtgaatgggagttcactcatgatttggctctctgtttgtctgttgttggtgtataagaatgcttgtgatttttgtacattgattttgtatcctgagactttgctgaagttgcttatcagcttaaggagattttgggctgagacaatggggttttctagataaacaatcatgtcgtctgcaaacagggacaatttgacttcctcttttcctaattgaataccctttatttccttctcctgcctgattgccctggccagaacttccaacactatgttgaataggagcggtgagagagggcatccctgtcttgtgccagttttcaaagggaatgcttccagtttttgcccattcagtatgatattggctgtgggtttgtcatagatagctcttattattttgaaatacgtcccatcaatacctaatttattgagagtttttagcatgaagggttgttgaattttgtcaaaggctttttctgcatctattgagataatcatgtggtttttgtctttggctctgtttatatgctggattacatttattgatttgcgtatattgaaccagccttgcatcccagggatgaagcccacttgatcatggtggataagctttttgatgtgctgctggattcggtttgccagtattttattgaggatttttgcatcaatgttcatcaaggatattggtctaaaattctcttttttggttgtgtctctgcccggctttggtatcagaatgatgctggcctcataaaatgagttagggaggattccctctttttctattgattggaatagtttcagaaggaatggtaccagttcctccttgtacctctggtagaattcggctgtgaatccatctggtcctggactctttttggttggtaaactattgattattgccacaatttcagagcctgttattggtctattcagagattcaacttcttcctggtttagtcttgggagagtgtatgtgtcgaggaatgtatccatttcttctagattttctagtttatttgcgtagaggtgtttgtagtattctctgatggtagtttgtatttctgtgggatcggtggtgatatcccctttatcattttttattgtgtctatttgattcttctctctttttttctttattagtcttgctagcggtctatcaattttgttgatcctttcaaaaaaccagctcctggattcattgattttttgaagggctttttgtgtctctatttccttcagttctgctctgattttagttatttcttgccttctgctagcttttgaatgtgtttgctcttgcttttctagttcttttaattgtgatgttagggtgtcaattttggatctttcctgctttctcttgtaggcatttagtgctataaatttccctctacacactgctttgaatgcgtcccagagattttggtatgtggtgtctttgttctcgttggtttcaaagaacatctttatttctgtcttcatttcgttatgtacccagtagtcattcaggagcaggttgttcagtttccatgtagttgagcggctttgagtgagattcttaatcctgagttctagtttgattgcactgtggtctgagagatagtttgttataatttctgttcttttacatttgctgaggagagctttacttccaactatgtggtcaattttggaataggtgtggtgtggtgctgaaaaaaatgtatattctgttgatttggggtggagagttctgtagatgtctattaagtctgcttggtgcagagctgagttcaattcctgggtatccttgttgactttctgtctcgttgatctgtctaatgttgacagtggggtgttaaagtctcccattattaatgtgtgggagtctaagtctctttgtaggtcactcaggacttgctttatgaacctgggtgctcctgtattgggtgcataaatatttaggatagttagctcctcttgttgaattgatccctttaccattatgtaatggccttctttgtctcttttgatctttgttggtttaaagtctgttttatcagagactaggattgcaacccctgcctttttttgttttccattggcttggtagatcttcctccatccttttattttgagcctatgtgtgtctctgcacgtgagatgggtttcctgaatacagcacactgatgggtcttgactctttatccaacttgccagtctgtgtcttttaattgcagaatttagtccatttatatttaaagttaatattgttatgtgtgaatttgatcctgtcattatgatgttagctggtgattttgctcattagttgatgcagtttcttcctagtctcgatggtctttacattttggcatgattttgcagtggctggtaccggttgttcctttccaggtttagcgcttccttcaggagctcttttagggcaggcctggtggtgacaaaatctctcagcatttgcttgtctataaagtattttatttctccttcacttatgaagcttagtttggctggatatgaaattctgggttgaaaattcttttctttaagaatgttgaatattggccctcactctcttctggcttgtagggtttctgccgagagatccactgttagtctgatgggctttcctttgagggtaacccgacctttctctctggctgcccttaacattttttccttcatttcaactttggtgaatctgacaattatgtgtcttggagttgctcttctcgaggagtatctttgtggcgttctctgtatttcctgaatctgaacgttggcctgccttgctagattggggaagttctcctggataatatcctgcagagtgttttccaacttggttccattctccacatcactttcaggtacaccaatcagacgtagatttggtcttttcacatagtcccatatttcttggaggctttgttcgtttctttttattcttttttctctaaacttcccttctcgcttcatttcattcatttcatcttccattgctgataccctttcttccagttgatcgcatcggctcctgaggcttctgcattcttcacgtagttctcgagccttggttttcagctccatcagctcctttaagcacttctctgtattggttattctagttatacattcttctaaatttttttcaaagttttcaacttctttgcctttggtttgaatgtcctcccgtagctcagagtaatttgatcgtctgaagccttcttctctcagctcgtcaaaatcattctccatccagctttgttctgttgctggtgaggaactgcattcctttggaggaggagaggcgctctgcgttttagagtttccagtttttctgttctgttttttccccatctttgtggttttatctacttttggtctttgatgatggtgatgtacagatgggttttcggtgtagatgtcctttctggttgttagttttccttctaacagacaggaccctcagctgcaggtctgttggaataccctgccgtgtgaggtgtcagtgtgcctcccagttaggctgctcgggggtcaggggtcagggacccacttgaggaggcagtctgcccgttctcagatctccagctgcgtgctgggagaaccactgctctcttcaaagctgtcagacagggacacttaagtctgcagaggttactgctgtctttttgtttgtctgtgccctgcccccagaggtggagcctacagaggcaggcaggcctccttgagctgtggtgggctccacccagttcgagcttcccggctgctttgtttacctaagcaagcctgggcaatggcgggcgcccctcccccagcctcgttgccgccttgcagtttgatctcagactgctgtgctagcaatcagcgagattccgtgggcgtaggaccctctgagccaggtgtgggatatagtctcgtggtgcgccgtttcttaagccggtctgaaaagcgcaatattcgggtgggagtgacccgattttccaggtgcgtccgtcacccctttctttgactcggaaagggaactccctgaccccttgcgcttcccaggtgaggcaatgcctcgccctgcttcggctcgcgcacggtgcgcacacccactgacctgcgcccactgtctggcactccctagtgagatgaacccggtacctcagatggaaatgcagaaatcacccgtcttctgcgtcgctcacgctgggagctgtagaccggagctgttcctattcggccatcttggctcctcctccaaaaa

SEQ ID NO: 10391 - DNA, 6043 bp, Homo sapiens
acttctttttttttttttttttttttagctattcttttttttttattatactttaagttttagggtacatgtgcacattgtgcaggttagttacatatgtatacatgtgccatgctggtgcgctgcacccactaaatcgtcatctagcattaggtatatctcccaatgctatccctcccccctccccccaccccaccacagtccccagagtgtgatattccccttcctgtgaccatgtgatctcattgttcaattcccacctatgagtgagaatatgcggtgtttggttttttgttcttgcgatagtttactgagaatgatggtttccaatttcatccatgtccctacaaaggacatgaactcatcattttttatggctgcatagtattccatggtgtatatgtgccacattttcttaatccagtctatcattgttggacatttgggttggttccaagtctttgctattgtgaataatgccgcaataaacatacgtgtgcatgtgtctttatagcagcatgatttatagtcctttgggtatatacccagtaatgggatggctgggtcaaatggtatttctagttctagatccctgaggaatcgccacactgacttccacaatggttgaactagttgacagtcccaccaacagtgtaaaagtgttcctatttctccacatcctctccagcacctgttgtgtcctggctttttaatgattgccattctaactggtgtgagatggtatctcatagtggttttgatttgcatttctctgatggccagtgatgatgagcattttttcatgtattttttggctgcataaatgtcttcttttgagaagtgtctgttcatgtccttcgcccacttgttgatggggttgtttgttttcttcttgtaaatttgtttgagttcattgtagattctggatattagccctttgtcagatgagtaggttgcgaaaattttctcccatgttgtaggttgcctgttcactctgatggtagtttcttttgctgtgcagaagctctttagtttaattaggtcccatttgtcaattttggcttttgttgccattgcttttggtgttttggacatgaagtccttgcccacgcctatgtcctgaatggtaatgcctaggttttcttctagggtttttatggttttaggtctaacgtttaaatctttaatccatcttgaattgatttttctataaggtgtaaggaagggatccagtttcagctttctacatatggctagccagttttcccagcaccatttattaaatagggaatcctttccccattgcttgtttttctcaggtttgtcaaagatcagatagttgtaggtatgcggcgttatttctgagggctctgttctgttccattgatctatatctctgttttggtaccagtaccatgctgttttggttactgtagccttgtagtatagtttgaagtcaggtagtgtgatgcctccagctttgttcttttggcttaggattgacttggcgatgcgggctcttttttggttccatatgaactttaaagtagttttttccaattctgtgacgaaagtcattggtagcttgatggggatggcattgaatctgtaaattaccttgggcagtatggccattttcacgatattgattcttcctacccatgagcatggaatgttcttccatttgtttgtatcctcttttatttccttgagtagcggtttgcagttctccttgaagaggtccttcacatcccttgtaagttggattcctaggtattttattctctttgaagcaattgtgaatgggagttcactcatgatttggctctctgtttgtctgttgttggtgtataagaatgcttgtgatttttgtacattgattttgtatcctgagactttgctgaagttgcttatcagcttaaggagattttgggctgagacgatggggttttctagataaacaatcatgtcgtctgcaaacagggacaatttgacttcctcttttcctaattgaataccctttatttccttctcctgcctgattgccctgaccagaacttccaacactatgttgaataggagcggtgagagagggcatccctgtcttgtgccagttttcaaagggaatgcttccagtttttgcccattcagtatgatattggctgtgggtttgtcatagatagctcttattattttgaaatacgtcccatcaatacctaatttattgagagtttttagcatgaagggttgttgaattttgtcaaaggctttttctgcatctattgagataatcatgtggtttttgtctttggctctgtttatatgctggattacatttattgatttgcgtatattgaaccagccttgcatcccagggatgaagcccacttgatcatggtggataagctttttgatgtgctgctggattcggtttgccagtattttattgaggatttttgcatcaatgttcatcaaggatattggtctaaaattctcttttttggttgtgtctctgcccggctttggtatcagaatgatgctggcctcataaaatgagttagggaggattccctctttttctattgattggaatagtttcagaaggaatggtaccagttcctccttgtacctctggtagaattcggctgtgaatccatctggtcctggactctttttggttggtaaactattgattattgccacaatttcagctcctgttattggtctattcagagattcaacttcttcctggtttagtcttgggagagtgtatgtgtcgaggaatgtatccatttcttctagattttctagtttatttgcatagaggtgtttgtagtattctctgatggtagtttgtatttctgtgggattggtggtgatatcccctttatcattttttattgtgtctatttgattctcctctctttttttctttattagtcttgctagcggtctatcaattttgttgatcctttcaaaaaaccagctcctggattcattgattttttgaagggttttttgtgtctctatttccttcagttctgctctgattttagttatttcttgccttctgctagcttttgaatgtgtttgctcttgcttttctagttcttttaactgtgatgttagggtgtcaattttggatctttcctgctttctcttgtgggcatttagtgctataaatttccctctacacactgctttgaatgcgtcccagagattctggtatgttgtgtctttgttctcgttggtttcaaagaacatctttatttctgccttcatttcgttatgtacccagtagtcattcaggagcaggttgttcagtttccatgtagttgagtggctttgagtgagattcttaatcctgagttctagtttgattgcactgtggtctgagagatagtttgttataatttctgttcttttacatttgctgaggagagctttacttccaactatgtggtcaattttggaataggtgtggtgtggtgctgaaaaaaacgtatattctgttgatttggggtggagagttctgtagatgtctattaggtccgcttggtgcagagatgagttcaattcctgggtatccttgttgactttctgtctcgttgatctgtctaatgttgacagtggggtgttaaagtctcccattattaatgtgtgggagtctaagtctctttgtaggtcactcaggacttgctttatgaatctgggtgctcctgtattgggtgcatatatatttaggatagttagctcctcttgttgaattgatccctttaccattatgtaatggccttctttgtctcttttgatctttgttggtttgaagtctgttttatcagagactaggattgcaacccctgcctttttttgttttccatttgcttggtagatcttcctccatccttttattttgagcctatgtgtgtctctgcacgtgagatgggtttcctgaatacagcacactgatgggtcttgactcttagatccaacttgccagtctgtgtcttttaattggagaatttagtccatttatatttaaagttaatattgttatgtgtgaatttgatcctgtcattatgatgttagctggttattttgctcgttagttgatgcagtttcttcctagtctcgatggtctttacattttggcatgattttgcagcggctggtaccggttgttcctttccatgtttagtgcttccttcaggagctcttttagggcaggcctggtggtgacaaaatctctcagcatttgcttgtctgtaaagtattttatttcttcttcacttatgaagcttagtttggctggatatgaaattctgggttgaaaattcttttctttaagaatgttgaatattggctcccactctcttctggcttgtagggtttctgccgagagatccgctgttagtctgatgggcttccctttgagggtaacccgacctttctctctggctgcccttaacattttttccttcatttcaactttggtgaatctgacaattatgtgtcttggagttgctcttctcgaggagtatctttgtggcgttctctgtatttcctgaatctgaacgttggcctgccttgctagactggggaagttctcctggataatatcctgcagagtgttttccaacttggttccattctccgcatcactttcaggtacaccaatcagacgtagatttggtcttttcacatagtcccatatttcttggaggctttgctcatttctttttattcttttttctctaaacttcccttctcgcttcatttcattcatttcatcttccattgctgataccctttcttccagttgatcgcatcggctcctgaggcttctgcattcttcacgtagttctcgagccttggttttcagctccatcagctcctttaagcacttctctgtattggttattctagttatacattcttctaaatttttttcaaagttttcaacttctttgcctttggtttgaatgtcctcccgtagctcagagtaatttgatcgtctgaaaccttcttctctcagctcgtcaaagtcattctccatccagctttgttccgttgctggtgaggaactgcgttcctttggaggaggagaggcgctctgcgttttagagtttccagtttttctgttctgttttttccccatctttgtggttttatctacttttggtctttgatgatggtgatgtacagatgggttttcggtgtggatgtcctttctgtttgttagttttccttctaacagacaggaccctcagctgcaggtctgttggaataccctgccgtgtgaggtgtcagtgtgcccctgctggggggtgcctcccagttaggctgctcgggggtcaggggtcagggacccacttgaggaggcagtctgcccgttctcagatctccagctgcgtgctgggagaaccactgctctcttcaaagctgtcagacagggacatttaagtctgcagaggttactgctgtctttttgtttgtctgtgccctgcccccagaggtggagcctacagaggcaggcaggcctcctagagctgtggtgggctccacccagttcgagcttcccggctgctttgtttacctaatcaagcctgggcaatggcgggcgcccctcccccagcctcgctgccgccttgcagtttgatctcagactgctgtgctggcaatcagcgagactccgtgggcgtaggaccctccgagccaggtgtgggatatagtctcgtggtgcgccgttttttaagccggtctgaaaagcgcagtattcgggtgggagtgacccgattttccaggtgcgtccgtcacccctttctttgactcggaaagggaactccctgaccccttgcgcttcccaggtgaggcaatgcctcgccctgcttcggcttgcgcacacccactggcctgcgcccactgtctggcactccctagtgagatgaacccggtacctcagatggaaatgcagaaatcacccgtcttctgcgtcgctcacgctgggagctgtagaccggagctgttcctattcggccatctt

SEQ ID NO: 10392 - DNA, 36783 bp, Homo sapiens
tcatgtaacattaggtatatctcctaatgctatccctcccccctgcccacaccccacaacaggccccagtgtgtgatgttcaccttcctgtgtccatgtgttctcattgttgaattcccacctatgagtgagaacatgcggtgtttggttttttgtccttgtgatagtttgctgtgaatgatggtttccagcttcatccatgtccctacaaaggacatgaactcatccttttttatggctgcatagtattccatggtgtatatgtgccacattttcttaattcagtctatcattgatggacatttgggttggttccaagtctttgctattgtgaatagtgctgcaataaacatacgtgtgtatgtatctttatagcagcatgatttataatcctttgggtatatacccagtaatgggattgctgggtcaaatggtatttctagttctagatccctgaggaatcgccacactgacttccacaatggttgaactagtttacagtcccaccaacagtgtacaagtgttcctatttctccacatcctctccagcacctgttgtttcctgactttttaatgatcaccattctagctggtgtgagatagtatctcattgtggttttgatttgcatttctctgatggccagtgatgacgagcattttttcatgtgttttttggctgcataggtgtcttcttttgagaagtgtctgttcatatccttcgcccactttttgatgggtttgtttttttcttgtaaatttgtttgaattcattgtagattctggatattagccctttgtcagatgggtagattgcaaaaattttctcccattctgtaggttgcctgttcactctgatggtagtttttttttgctgtgcagaagctctttagtttaattagatcccatttctcaattttggcttttgttgccattgctttttgtgttttagacatgaggtccttgcccatgcctatgtcctgaatggtatggcctaggttttcttctagggtttttatggttttaggtctaacatttaagtctttaatccatcttgaattaatttttgtataaggggtgaggaagggatccagtttcagctttctacatatggctagccagttttcccagcaccatttattaaatagggaatcctttccccatttcttgtttttctcaggtttgtcaaagatcagatggttgtagatatgcggcagtatttctgagggctctgttctgttccattgatctatatctctgttttggtaccagtaccatgctgttttggatactgtagccttgtagtatagtttgaagtcaggtagcatgatgcctccagctttgttcttttggcttaggattgacttggcaatgtgggctctttattggttccatatgaactttaaaatagttttttcgaattctgtgaagaaagtcattggtagcttgatggggatggcattgaatctataaattaccttgggcagtatggccattttcacgatattgattcttcctacccatgagcatggaatattcttccatttgtttgtatcctcttttatttcattgagcagtggtttgtagttcttcttgaagaggtccttcacatcccttgtaagttggattcctaggcattttattctctttgaagcaattgtgaatgggagttcatgatttggctctctgtttgtctgttattggtgtataagaatgcttgtgatttttgcacattgattttgtatcctgagactttgctgaagttgcctatcagcttaaggagattttgggctgagacaatggggttttctagatatacaatcacgtcatctgcaaacagggacaatttgacttcctcttttcctaattgaataccctgtatttccttctccagcctgattgccctggccagaacttccaacactatgttgaataggattggtgagagagggcatccctgtcttgtgccagttttcaaagggaatgcttccagtttttgcccactcactatgatattggctgtgggcttgtcatagatagctcttattattttgagatacatcccatcaatacctaatttattgagagtttttagcatgaagggttgttgaattttgtcaaaggccttttctgcatctactgagataatcatatggtttttgtcgttggttctgtttatatgctggattacttttattgatttgcgtatgttgaaccagccttgcatgccagggatgaagcccacttgatcatggtggataagcttcttgatgtgctcatgtcatttgcccactatttaatggagttgttagtttttattcttgtaaatttgtttaagttccttatagatttattgattctggatattagacctttgttggatgcatagtttgcaaaaattttctcccattctgtaggttgtttagtctgttgatagttacttttgttgtgcagaagctctttagtttaattagatcccacttgttaatttttgttttagttgcaattgcgtttggtgtctttgtcgtgaaatcttagcctgtgtctacgttctgaatggtattgcctaagttgtctttcagggcttttgtagtgttgggttttacattttatgtttttaatccctcttcagttaatttttgtatatgatgtaaggaaggagtccagtttcaatcttcttcatatggctagtcagttatcccagcaccacttattcgacagggaatcctttccattgtttttggcaggtttgttgaagatcagctagttgtaggtgtgcagcattatgtctgggttctctactctgttccactggtttatgtgtctgcttttgtactaggatcatgctgttttggttattgtagccctgtagtatagtttgaagtcaggtagtgtgatgcctccagccttgttctttgtgcttaggattgccttggctatttgggcccttttttggttccatgtgaattttaaaatagttttttttttctcattctgtgaatactctcaatggtagtttaataggaatcacattgaatctataaattgctttgggcagtatggtcattttaatgatactgattctttctatccatgagcatggtatgtttttcgattatttttgtgtgtcatctctgatttatctgggcagtgttttgttgttctcctagtagagacctttcactaccctagttagttagatgtattcctaggtattttattctttttgtggcaattgtgaatgagagttaattcctgatttggctctaggcttgactttgttggtgtataggaataatagtgatttttgcacattgattttgtatcctaagactttgctgaagttcttctttatcaatttaagaggcatttgggcagagactatagggttttctagagataggatcatgttgtctgcaaacagtggtagttcatcttcctctctccctatttggatgccttttatttctttcaaatcttgcctgattgccctggtcaggaccaatactatgttgaacaggagtggtgagagagggtatccttgtcttggctggttttcaaggggaatgctttcagcttttacacacttagtatgatgttggctgtgggtttgtcatatatggctcttattatcttgaggcatgttccttcaatacatagtttattgagagtttttagcatgaagcgatgttgaattttactgaaggccttttctgcatctattgagataatcatgtggtttttgtctttagttctgtttatgtgatgaatcacatttattgatttgtgtatgttgaaccaaccttccatctcagggataaagcctacttgatcatggtggataagctttttgatgtgctactggattcagtttgccagtattttgttgaggatttttgcattgatattcatcaatgatattggcctgaagttttttgtggtgttgttaaatctctgccagattttggtatcaggatgatgatggcttcatagaatgatttagggaggagtccctcctcctcattttttctggaacagtttcagtaggaatggtaccagctcttcttttatatctagtagaattcagctgtgaatacatctggtcccagacttttcttaggctttttttttttggttggtaggctatttattcctaaatttcagagctcatcactggtatgttcagggattccaattcttcctgaagtctgtcttgggaggatgtatttgtccaggaatttatcaatttcttctagattttctggttgatatgcatagaagtgtccataatattctctggtggttgtgtttctgtgggttaagtagtaatataacccttgttactgattctgtttatttgactctcctccttttcttctttattagtctagctagcagtctatttattgtatttttttttgcagaaaaccacctcctagattcattgatctcttgaatagtttttcatttctcagtctccgtcagttcagctctgattttggttatttgttgtctctgctagtttgtgatttgtttgttcttggttccctagttcttttagttgtgatgttagattgttaacttgagatctttctaactttttgatgtggtcatttagtgctatcaatttctctcttatcactgccttagctgtgtcccaaagattctggtatgttgcatctttgttctcattagtttcaaataatttcttgaaaccttaattttacccagtattcacttaggagtaggctattctatttcatgtaattgtatcattttgagtgaatttcttagtcttaatttctaatttgattacactgtggtatgagagactttttgttatgatttcatttcttttgctttgctgaggagtgttttactttcaattctgtgtctgattttagactatttgccatgtggccttgaaaaaaatgtgtattctattgttttatgtggagatatctatcaggtccatttgacccagtgctgagttctgatcctgaatatctttattaattttctgtctcaataatgtatctcatattatcagtgggttattgaagtctcccattattattgtgtgggattctgagtctctttgaagatctctgagaaagagcatgctttacaaatctgggtgctcctgtgttgggtacatgtatatttaggatggttagattttcttgttgaatggaaccctttaccattatgtaatgttttgtctttttttaatctttgttggtttaaaatctgttttgtcagaaactaggattgcaacccctattttttttctgttttatgtttgcttggtagattcttctccatccctttattttgagcccatgtttgtcattgcatgtgagatgggtcttttgaagacagcatacaaatgggtcttggcactttatccagtttgccactctgtgtctttcaattggggcatttatcccattgacatttaaggttagtattgatatatgtggattttatcctgtcctcatgatgttggctggttattttgcagacttgcttatgtggttgctttatagtgtcactggtcgtgtacttcagtatatttttgtaatggctggtaaagatctttcctttccatatctagtgctttcttccagagctcttgtaaggcaggtctggtggtaacaaattccctcagcctttgcttgtctgaaaaagatcttatatctcttttgcttatgaagcttagtttgcccagatatgaaattctagactggaatttattttctttaagaatcttgaacattggctcccaatctgttctggcttgtagggtttcagctgaaacgtgctctgttagtctgatggctcccctttgtaggtgacctggtttttctctctggctgcctttaacatttttttttttcatttcaaccttggagaatctgatgattatgtgtcgtggggatgatcttcttgtgaagtatcttactgaggttctttgcatttcctgaatttgaatgttggcctctccggtaggttggggaaatttttctggatgatatcctgaaatatgttttccaattttgttctattctcctcatctctttcaggtacaccagtgagtcatagatttatttggtatctttacataatcccatatttctctgaggttttgttcttccttttcattcttttctctctactcttgtctgcctgtcttatttcagaaagaatctaaccctgagattctttcctctgcttggtctattctgctattaatgcctgtgattgcattatgaaattcttgtagtgtgtttttcagctctagccagtcagttacattatcctctatactggctattttgtttgtcagcacctgcaacattttatcatgatttttagcttcctacttttcaaatcttaatgctaagttagaatattaaaaaataatacatagtatgatagcactttttatactttcttaattttaatggaaatatgccctagtgttttatcattagtatgatgattccaattggcataaaataaaaaagcattctgttattttaataaattatatttctattttaacttatatttaaaatagtataaattatttttttgttcttatgctctgtatttttgtgatttgggaattttgccattagattgttgtatgggttacaatgacttatatctcatttatctggtgtatgtgtgtgtgtgtgtgtgtgtatttgtcctatctttatgtttgatattagggttattccaggttttaagaattatttgttgaactttatattttttctattatttaaaaagtattggacctttactatgttttttaaaactaattttattgatgtttactataaatacaataaaatgtacacacatttaaatgtactttgattattttttgttgttgttgttgagataggttctccttctgttgcccaggctggagtgcagtggtgctaccatggctcactgcagccttgatcttctgggttcaagcaatcctcctacctcagcctcctgagtaggtaggaccacaggtgtgcactaccagacctagatttttactttttttttgtaaagacatcatcttgctaccttgctcaggcttgtcttgaactcctagcctccagctattctcctgccttggcctcccagagttctgggattacagatgtgagccactgcaccaagcctaatgagttttgaaaaaataggtgcaccatacttcttatgtgcacttatataacaaccataaaatcaagatataaaacatttcctgcacccttaaaagttagttagctttttgcaattaatcccttccacacctctggttcgatataacccagaccttctttatgacgctagattaaatatttcttttatagaatttcatatacatgaaaatttaaaatatgtacttttttgtttctggagtcttttgctcagcataatgcttttgtgattcatcaaagtttttgcatgcataaaaagtttatttctttttattgctgggtagtattaaattacacagacatgccacagtttatttacccatatacttcttgattgtttttttttttttttttacaatttggtgtcatgtaaaaaaaaaaaaacgctacgaactcgtaaatgtggtaaggacgtgtttttatttctcacgcattaacatccacaagttaatttttcgggtcatataagtgcatgtaaccttataagaaactaacaataattgtatcattttgtcatttcccccagcaatgttcaagggtttcagttgctttacatcctcattggttttgtcagtttttaatgttagccattctcctgggtatgtagtggtatattattttggttttaattcacattgttttgatgactagtgatgtcgagtattatttcttgagcttcttagacattatgccatcttttgtaaaatgtctttaattcttttgccgattgaaacattgaattttcttattataatacatatacatgttagtctagatacaagtatttttcagatacacaagtctgcatattcatattcttaacagtgtccttttagaagatatgtattattatgtaaaagcccaatttatcacttttttctgtttcatgtttactgtgtatcgtatctcagagtcctttgcctatgccaagattgttaacgttttccttaaatattttatatgcatagcctgtcctttgccagataatgaggctgaatgaaagcaagcagagcttggagaatgagagaaggaggatgactctaagttctcttttattctagacttggtttagtgccatttaaactaaagtctgaccattctggggatcctactgaatgtccctgctgtttattaaggtcttcctactttgcctagttgcaacttcaatctctcctagtctaatgtgacctcgaaaattgttcagctttcagctctttgtgattctatcccatgtatgcaaaggatcatatccagcaacatatggatccagcaacatccagatataagagacccctatgcagatttcagagtttttcttctgcctggctccttcctctctgacactttgcctttcaaattctagttgtctcagacttcccagactctgatgtttctccccgacttgacaagactgctatactctgattaattgagccctttttacacagcagtctggaaatggcctccaagcagaaagctatgagtttatagggttcaaatacattgcttccctttcagcaatcacaattctgtgttttttgttgtccagtgtctaaatttttttcccatatagtttatccactgttctggttgtttacagcagtaaggcaaatctgggatgagatatctataatgacaggaattggattctgaatgttttgttttgttttctttcaattgtgtcaaacacacagaaaaaattattattttagccatttttaagtttataggttagtggcattaactgcatgcacactgtcatgcaaccatgatcatcatccatcgccagaattttttatctttcaaaactcaaattctgtacccatcaactctatatctattaaatataactcctcatttccccttttccacaatcctactttccgtctctataaatgtgactgatctcggtatctcatttaaattgaatcatatggtatttgtccttttatgtccagtttattttcacttgacataatgtcttcaaagttattcttattgtagtatgtgttaatttcaccttttcaaagctgaacaatattccattctagatatctaccaggttttgtttatccattcacctgttgatggatacttgtgtggcttccaccttttagctattgtaaataatgcttctataaacatgggtatacaaatatattttccagttactgttttcaattcttttgggtgtatatacagaagtggaattgctggataatatggtaggtttattttcaatttttgaggagccaccataccattttccacagcagctacaccattttataacccatcagcaatgcacaatggttccaatttctgtacatcctcaccaacagttgttattttccatttttgtgtgtgtgtgtttttagcaagtatcataataggtaggaagtggcatctcattatacttttgatttctgtttccccaattattagtgatagtgatattgagcttgttttcataagcttatggaacttttggatatcttcattgataagtcaatttaagtctttgcccagttttaattgggttgtttgtgtttttgttgttgagtgatagaagttcattataatattctgatattaattaattaatccatatcagatatatgattaataaatattttctcacattcagtgggttgcctttttactttgttgataatgtcctttgatgcataaaagttttacttttgattaagtccaatttactcattttttttttctgttgtcgcctgtggttctgttcttgtaatattcaagaaatcaatgccaaatccaaggtatgaatgtttcccccttgttttcttctaagaatttttactgtttcagcattttaatatatttgtctcttgtaacagattttaacttagttaatttgcttgatgttagtgcagcatttctgctcacttttagttacattttgcattgaatatctttttacattctttaagtttcagcctatatgtctttaaatctaaactgagtctcttgtaggtaacatatagtctggtcctgatttttattcattctgccaatatgttttcagttgggggggttgtttagtctacctacatttaaaattatcattgatagtaaagcacttatttttaccactttgttattagttttctgtatgtcttaaagcctttttgtccctcatttcctccactactgcctttctttgtgtttaattgatttttttggtagcagcgtgttttgattctcttctcattttctttcttaaatattctatagatgttttctttttgattacattgaggattacaaataatagcccaaaatcattatctttttaaaattgatactaacttaactccaataccataacaaaattctctacttctttacagttccactctcccctacttaattttaccgatgacacaaattacatcattatatattgtgtacccattaacatgcattcataattatttttattcatttgtcttttaagtcctgtagaaaataaaaagtaaagttacaaagcaaaactgtttttatttgtcatatatttgtctttaccacagaaacttatatttttgtatttttgtatgacttctagttacttgtctagtgtactttcttttaaatgtgaaggacttgcattaacatttcatgtagagtgggtctggaggtaaggaattcccagcttatgcttgtgtgggaatgttggaatgttttaatttcttcctcatttttaaaggacaattttgttggatatggaattctaggttgatagtttttctttcaacatttaaaatatatctttccattgccttctgccctgcaaagtttctgctgaagagtccacttataatctcatcagggatttctgtaagtttttgttgtctagaattttatttttctttctattcctaaatctagtagaattgaatcaatttaatgttccttaagagtttgacaatacattagtttaacttttttgtgtgtcatttgataactgtttttgttgttgttgtttgtttctttgtttgttttgagacagagtcttgctctgttacccaggctggagtgcagtggtgtgaactcggtcactgcagcctccacctcccaggttcaagtgattctcctgcctcagcctcccaagtagctgggattacaggcgcccacaaccacacccagctaatttttgtatttttagtagaaatgaggtttcaccatgttgtccaggcttatctcgaactcctgatctcaggtgacccacccagctcggcctcccaaagtggtgagattacaggcgttagccaccgtgcccactgtatcatttgatgacttttgtttttattctctttacttgatattaatgttgctgatgaaatcgactatatgatgtcacaataatgccaaaataaaataaaaataaaataaaactcttaaccctcagtgggatttgatgttaagcagctgttactcacacttgtggagtcatatgggagttggttaggtaacactgtttttcttggttcaattcatgtctggctattgaatgactgtcagtcagctggggtgactagaacctagcacattggaggactttgcactgttacaactgtctttccttttctaacaggccagactatggatgcttttgtggtgatagcagaggttaggacgtccaagcccacatacacaagctgattttaagcctctgcttgcattaagtttcctaaggttctattttctagggcacgccctacatttgtgtccatatcaaggagtggaacaagtcaccccacttatgatgtaactaaaatttccaagagaaatgagatggattcagggagtggtgaattggtgccattattgcactataacacaccaacctattttctttttattttgtatagaatatacttagttctctatttatttaaaattgcctgtgtacctcctttaaatatcttgttactttttaaaaaaagtttatttttattttttgctttttaataggcagggtacagaactgctcacatatcatatatattcttttctctagtgtaatttcatcattttgtttcattctttctactttatatatttccattttcttttttttttttttttgagacggagtcttgctctgtcgcccaggctggagtgcagtcgcgggatctcggctcactgcaagctccgcctcccgggttcacgccattctcctgcctcagcctcccaagtagctaggactacaggcgcccgccactacgcccggctattttttgtagttttagtagagacggggtttcaccgttttagccgggatggtctcgatctcctgacctcgtgatccgcccgcctcggcctcctgagtagctgggattacaggcatgcaccaccatgtctggctaatttttgtattttttactcctgctccagtttttgagatgtattttttcttgcattctaatgaaaaatattttatatcttttaatagataatagatatatttgttgattatattaggtgatgatttctttctcttgtatttatcaccaggatcctactggtttattcctcattacttattctagggccaggtaaaattgactttagcttggagtggaccagcactttggatgtattgattggtattgatatgtattaaattcttgtcagaattccaggtggtgagaaggtggatgtatagatttcccacacaatttgcacggtgtagcatgcattcatattgtattgtgtttcaatatatttctcttcctcattctctgatatttacaacaaatgaaataatttttccaaatatctctcagctgttaatataggaatggaatgcaagtcttgcttctccttcattgccttccttatttctcttcatctaatcaattgtgacaatattgtgtatatacttgaaaactagaattattgtaagaaatgcatattatctcagtattaaaataatacgttacctcttgttttgctatgtttttctgggatagattctttaaagtggaattactggcataaagtgcattaatacttttgttaatttttggtatggattgaaaaattatttcctgaatattattatcaaattaaagtgctagaagcagtatgaacatatactatcatctggaaaaaaaaccactatgggaattatttgcttattatgaaaaaaatagaatcacaaaaatctgtgaaaaagaaaacaaaaggcagtcatcatttcattgtctagcaatgactattgctattcatctggtttagttatttattttctgccctagttctttctagggtagatagataagtatatagagcaatatatagatagatagttaatagttatagaatgcacacatggatgaaaatactataaggatgagatttaagatgttttacatttttgtcccattatacataacccagcggttaaagtctttacacttattacaaatggtttgtaagtcctagaaagaaaattaagaaaaagatttgttaagtttatgtgtacagtaagcacacacatgcaaaatttcaaaggaatgttgtatcaacttatgatctcaacattcatgttatattaatatttattatttaattttttgaaacattttaaattttatggggaaaatattactttattgttttgtattgatgactagacaagttaaatatattttatgctaatgcttattgtacaaggactactctgtaaaacttttgttaaagtttataatcaatgtttcaactttgattagtacccattgcactttattaacaatcttattttcgctcacacccattactattatattttgtacagataaaaatctcttcttaattttttaaccaatcacatttatattttccattacttttggttcagaaaatctttttacataattaatacattaccttcaacattgcagttgctcagtaaattatgttgaagggctcatgaaatgaaatcctccctaccctccacatttaattctgttctttgcaatagcaacaggaataaaatattatcccagtactcagcttgactgacattttcttatttcagataataaaagaccatgccttgaattctctcagctaagtgtaaaggattccttcagagatttatttattccgagaatagagaccattctgatgatgtatacaaggaacaacctaaactgtgctgagccactgtttgaacaaaataactcacttaatgttaatttcaacacacaaaagaaaacagtctggcttattcacggatacagaccagtaggctccatcccattatggcttcagaacttcgtaaggattttgctgaatgaagaagatatgaatgtaattgtagtagactggagccggggtgctacaacttttatttataatagagcagttaaaaacaccagaaaagttgctgtgagtttgagtgtgcacattaaaaatcttttggtaagtctgggaattttatgtattatacatgctatacaatatattatacgtgctatacaatatgcagtgtgttacattcaataccacaaagtgataataaactatatacttttccccataagcattaacaattactggtttgatataccaatgtatgcagccatcttttctttgtctgcctaaatgaataattctatacctagacatatcctgtgttatttttaaaacattatattaaaatttagtaattattaggttttatttaaaaatcttctgagatttcttttaactctacctataccaacctcagaataaaatagttatcctatgtgggtgggggaaataaactttataattattacaatcttcaggtatcttttaaaatatacggctaaaatatttgcatataatcgagtgtgaattggtaaaagtaaagaaaaatctttttttttttttttttttttttttttgagacagggtctcactctgttgcccaagctggagtacagtggcacgatcttggctcactgcagcctgcacctcccagggtcaagtgatactcctgcatcagccacccgagtagctgggattactggtgcccaccacaatgcccagctaatttttgtatttttagtagagacgaggtttcaccatgttggccaggctggtctcgaactcctgacctcaggtgatctgcccaccttggcctcccaaactgctgggattacaggcaaaaaatcattttgaaaagtagcatacttctgtcagctttggaggtgaacatcagattcattcaagtctgctcaggatttgaatggatcaaataaaattcagtccagttctatgttatctgcactgtgaatgatttttgtttattaagtcaacccttagggagatccatgtctatcctaaaagaaagtaggtagttgtgggtacttgagagaaagaagggtgatatctgattcgggggcattattgagcttgaaatttaaacttgagttgtgttgtgctgaactttcaagactctgctaaaaattgaacaaataacaacacttccaagaagccgttatatgtagtggccaggggtcagactggatgggttcaaactgtatgtccatcttttatcatctgtgtaattttgaacaattacatagcctctctgtgctgcatttccttatttgtacatatagaataacaaaatgttacaaaaatatttatatgaatattgaattaatatatatgtgcttaatcagtgggtgacatttagtaatcattgagtaagatcaactttcattattatttttacacccccaaatttggacaaaacaataccattgctgtagagagacagaggaggtaattgattcaaccatctccaccaacagactattaattacatcattgatttttcctgatgttactggtgttttctcaactaataaatatgtgcctcaaagtgtggagaatgtgaatattaaatagaaatatttaggaaaatttgtaatattagataaaattctaacagtgcctttgcttacagaggcttcatattacagaggaagatttaaatgaccggcagcactggagtctcgagagatactcccttatgttttggggcatggctgtgagaaatctgaagaaaatcataaccttgtgccttgaaagcctgagggtagtttttcattagtggcaagcgctccacatctttctgtaagccatcagacatatcactgtgtgggctggaccatgatctgtccacaagtctcacaatagctccccaagagtgtggtggaagtacactctcatgtagtcttctaatttcccttcctggagctgagactaagaggtattcagacgttggccttggaagattggatgcatcactcctgagctggtgatcaggggaaggaagtcacctaaaatccataaaattaatttcatcatctctgaagtgagaatcattattgaacttttgtgaatcttcctaaggtttttgacacaacctgatcagataaaacaagaaggcaaattagcataattttggagtgagacctaggtttgtgttttagtccatttgggctgctgtaacaaaataccataggctaggtagcttataaacaagaaacatttatttctcatagtttcagggtctgagaagtccaaggagaaggcatcagcagattcagtgtctggtgagggcccaattcctggttcatagattatgccttttcactgtgtcctcacatggtggaagagtagaaggagatccctcaggtctcttctatctgggcagtaatccctttcatgagggttccacactcatgacataattctcctaacccacaagaaggcctcacctccaaatatcatcaccttggggattagaattccaacatatgaattttagggagacacaaacattcagaccacagcagcttggaatccatcttttcctcttatgaatctatgtggctttgggaaagttgttacttctggcagtttccttaataaaattggaattgatccaatattatttatttagcatttaataggtgctactgacagttttaggcattagaataaaaatgaataactcataacgaaattggaagtattaaatatgaactttgtaaggcccatatcgaggtagctagcagaaagtaagcacctagtaatgttgattattataaaacactctgctaattaattgcattttgcatactgttctgcatgagatgatacaattttaaaataaattgatattaaaaatgaataaagaaaaatcaaatattttgtggcaaaagttgaacaaatatatagtcatcttgaaattataaagtctctttcccgatatccccaaaatgaatcaagccagaaaaataatgaattttgaaatgttgatatatgaggggggcatgatttgttattacttgaaatgaatactgtaatattgcctttctctttaattgcagaagcatggtgcatctcttgacaattttcatttcataggtgtgagtttaggggctcatatcagtggatttgttggaaagatatttcatggtcaacttggaagaataacaggtaaaattatttttataaaattattgctttagcatacttttaagtatcagaagttactttgctaattttttttttttttttgagacagagtctcgctctgttgcccaggctgcagtgcagtggtgcgatctcggctcactgcaacctctgcttcgtgggcttaagtgattctcctgcctcagcctcctgagtagctgggattacaggtgcccactcactaccacaccggctaatttttgttttttttaagtagagacagggtttcaccatgttggccagactggtctctaactcctgacctcaagtaatctgcctgcctcggccttccaaagtacttggattacaggcatgagccactgtggccagccactttgcttaaaatttagtgggtacaataattactcaatagaaattatgtacaaacatttattttttctatgttatatttaaatattggctttgttttagttagactctaaagttttgttaagttctcaacagagcttaagttacccaaatggaaatgggagaaaaacatctattcctgcagtcccagctaaattttaaggacatactatcgtaagaatacagaagtaaatatgactcattaaagaaaaatactttatgtattagctaagaatataactatttacttagttatcacaaactttgatgcatttcaactctctaaaaatttttacttgaatgctacaaaagaatcaggagttgcatccaatttgagggactctgggtcccccttcatatttctataacaaagttactgcatccaggaagctcagtcatctaataaggctgatatggattttcattctttcctctatgagtggtagtgactttaggaataggaggataatattcctttcaaccaatttaccttttttgttttgaaaaaaaagcaattattcatatctatggccatagaagacttataataactttaagtgttgataaaagaaaatagtgtccttagttaagtttcaaaaaagggggaaagaggtgaataacatatagatagttatctttacaaaccttatgcatacccttacttactctgattagttttaatgttatcaaatatgtgtgaaaacaaattaactgaatgaatgtaggagggtcaagaaatagcagtttagccaggatttacttatacaaagttccctagtgcttaaagctcattctctttccaaaaccacacttgctcaatttgtactttaaattgtgtttacacatattagtctagcttgaatggcccaaataccaggcaatcatcaggtactaaaaggccaccaaacatggaggttctatatcagaatgatttataggaagatagatgattctgtctcattcagtcaagtgggttaaataaaatggggataatagaggtttttgaaatgaaaaacattatattttactttttttctaggaatttttcagttttatttaaaatttttttaaattttattattattatactttaagttttagggtacatgtgcacaacgtgcgggtttgttacatatgtatacatgtgccatgttggtgtgctgcacccattaactcatcatttagcattaggtatatcgcctaatgctatccctccccacttcccccaccccacaacagtccccagtgtgtgatgttccccttcctgtgtccatgtgttctcactgttcaattcccacctatgagtgagaacatgcggtgtttggttttttgtccttgcgatagtttgctgagaatgatggtttccagtttcattcatgtccctacaaaggacatgaactcatccttttttatggctgcatagtattccatgctgtgtatgtgccacattttcttaatccggtctatcgttgttggacatttaggttggttccaagtctttgctattgtgaatagtgccgctataaacatacatgtgcatgtgtctttatagcagcatgatttataatcctttgggtatatacccagtaatgggattgctgggtcaaatggtatttctagttctagatccctgaggaatagccacactggcttccacagtggttgaactagtttacagtcccaccaacagtgtaaaagtattcctatttctccacatcctctccagcacctattgtttcctgactttttaatgatcgccattctaactggtgtgagatggtatctcaatgtggttttgatttgcatttctctgatggccagtgatgatgagcattttttcatgtgttttttggctgcataggtgtcttcttttgagaagtgtctgctcatatccttcgcccactttttgatggggttgttcgtttttttcttgtaaatttgtttgagttcattgtagattttggatattagccctttgtcagatgagtagattgcaaaaattttctcccattctataggttgcctgttcactctgatggtagtttcttttgctgtgcagaagctctttagtttaattagatcccatttctcaattttggcttttgttgccattgcttttggtgatttagacatgaagtccttgcccatgcctatgtcctgaatggtattgcctaagttttcttctagggtttttattgctttaagactaacatgtaagtctttaatccatgttgaattaatttttgtataaggtgtaaggaagggatccagtttcagctttctacatatggctagccagttttcccagcaccatttattaaatagggaatcctttccccatttcttgtttttctcaggtttgtcaaagatcagatagttgtagatatgcagcattatttctgagggctctgttctgttccattggtctatttctctgttttggtaccagtaccatgctgttttggttactgtagccttgtagcatagtttgaagtcaggtagcatgatgcctccagctttgttcttttggcttaggattgacttggcgatgcgggctcttttttggttccatatgaactttaaagtagttttttcgaattctgtgaagaaagtcattggtagcttgatggggatggcattgaatctataaattaccttttcacaatatattgattcttcctacccatgagcatggaatattcttccatttgtttgtatcctcttttatttcattgagcagtggtttgtagttctccttgaagaggtccttcacatcccttgtaagttggattcctaggtattttattctctttgaagcaactgtgaatgccatttgtttgtatcctcttttatttcattgagcagtggtttgtagttctccttgaagaggtccttcacatcccttgtaagttggattcctaggtattttattctctttgaagcaattgtgaatgggagttcactcatgatttggctctctgtttgtctgttattggtgctatattttactttcaaatatctttttaagatgattgtttcttcattgtatagatgttctcaaaaaactgaattttatcttctctctcctctttttgacaattcccagaaagtcatgagcctagcatttttatttagaaattaagataacccagaaataatattcacactccatggaatttaaaatatattttttcttttcttaagagtgtgtgagaaagtcttacgagaaatggataagataacatgatttatcccatagcccaaattatatttggcacctaaaaaagcttttcaggtctatctacagataaatccaaagtgagctagtaatgtacagagttcaagagaggaccagatggtattcattatttttttccttcaggagaaatagttgtagttattattaaatataaactactttattactcctaattcagtctcacagaaaaatactccaaaaattccgacaatattttgttgcggcttaacctgaaaagctctgaaggttagtagtattattcaaatactgaagttacctgctgttcattcacttccatttgtttttagatatgttcttggataggtttaaactaaaagtataaatgctttttatgtttataatgcagtaataatggaagtatgcaatgtaaggagctctgtggacttgatgagactgattatttctttcttgctttccaggtcttgaccctgctgggccaaggttctccagaaaaccaccatatagcagattagattacacggatgcaaagtttgtggatgtcatccattctgactccaatggtaacaaatcaggatttattacctaattatttgaaaatgaaaaggaaaatgtagaccttgggcaagaggagggcataagaagaaaaaacatcatggataaaatgattttaaatctgtaattatagaatgataatatttcccaagcaatatttcttagggttagtgatttcctgcattgtcaaatggcactctttgacttcagtttgcctccttcgggtttcaagatgtgtcatgtcatcctaaaacactgaaatagataactaagagttcattctgttcatgctgttgacaattttattgatttgatcacattttcccccatgtttaatgttcctgatgtatttaggttaccattctccccgcttattttcttgctatgatatatatcgactagaactgaacacagcatttcagccacaaataaagaatagtcttccttaaatgtaaggaaataatctttctattgtttttaattatcttagctgaaaatctctaacagggtattggatttttggccagagtacaattgaacagacacttttaagaaacagactgtcctcgtgcctttcctgatttgaatttgttgatactaatatttactgagcacttcctatacattaggcagtgttttgagtgcttgtatgaattaattagtgaattctactaaatttccgttagatagataacaactgtcattccctttacagttgaggaaactagaataaaggttgtaaggtcagtaaatggcagagtcagaatttgaaatcatatgttttgattccagatgatgcacttaaccagtatattattcttataaaccgaatcaggagaggatatggtggtaagatagagacaagggcagtgacactaagattgctcctctgaatttatcttgtggtgatctatacttgggtttatgtgtctgtgtgtgagatacgtaaatgccatagatgcaatttttcaacccccatgactacatgtcaatagattgagactccactggtaacaattctgctcctttttggaatctaggttcacctacttctataagcagtcaaaaccaaagaagtcatagtttagtgttatccaaacctctcatgtcttattatctctaactctttatatcagcttggcacatccacataaaacacatctattggccaattaatgtgtagtcccttgtctgaattttttctgaaactctaacttattgggggaacccacccccgatatttcaatgtaggttctttctattttccataagtgtcggccagctgagaaataaagagagacagtacaaagagaggaattttacagctggtccaccaggggtgacatcacatatcagtaggaccacgatgcccgcttgagtctcagaccagcaagtttttattaagggttttaaaaagggaagggggtgtaagaacagggagtaggtacaaagatcacatgcttcaaagggcaaaaagcagaaatattgataaggttctatgttcagcagtgcatgtattgtcttgataaacatcttaaacaacaaaaaacagggttcaagagcagagaactggtccaaccacaagttaccagggcggagcttttccccaccctaggaagcctgagggtactgcaggagaccagggcatatctcagtctttatctcaaccacataagacagacattcccagagcggccgtttatagatctcctcccaggaatgcattcctttcccagggtattaatattaatattcctcgctaggaaaagaatttagcgatatctttcctgcttgcacgtccatttatacgctctctgcaagaagaaaaatatggctctttttgcccgaccccacaggcagtcagaccttatggttgtcttcccttgttccctaaaagccgctgttattctgttctttttcaaggtgcactgatttcatattgttcaaacgcatatgttttacaatcaatgtgtatggttaacacaattatcacagtggtcctgaggtgacatatatcctcagcttatgaagataacaggattaagggattaaagtaaagacaggcataagaagttataaaagtattatttgggaactgataaatgtccaggaaatcttcacaatttatgttcctctgctgcggctccagccggtccctctatttggggtccctgacttcctgcaacactaacttcaattctgcctatggccttttgacttagctcttcatactttttattatttttgtttgcatttttgacttatcctaatgaactgtcttggattgtcttatatttgcaacatcttttgatgatgcaacctatcagatctaatctgccactagaggccacatagttggaacattggattgatcttttcatgactatcacaaataagaaacacagattttttgatgctgcatatgtacctgtccgagaaatttctgaatgatatgcgtggactcagcacatacctggtgaactgccttttccttgaatactagataatgaccacatcttctacttgccagtaatcctcatttttattcagttgtgagtgttcagaaagccatgtggcctttcaaatttgtggattagataattagggcatacatttttgctgagatattggggaaaattatgagtccaatatccaaaagatagatgcttttgaaaccctcatattgggtttgcaaaacatctcatctgttattcttgtctggaactccaaaggacattatagaagcatgggtaaagctgaacaaatcagccttcttatggtctgcagaaagcttctcgttatctgagttgcctctgccaaaatcacgtttactgagttttttgtttaagtagattctgaattgttagaactcctagttatctgacagaagcaaacaatagccttctttgtaggaaattcacataattcaatctcaaattatttttacaaaaacatattaaaataaatgtttagcatccaagatagccaggcacacttggagcaagacagcgtgaatgagaaacagcagaaacaacagtcaatagacaacacccataggcctccagatattggaattattatacactggctataaaaaatgtgcttattattaagttggtgcaaaagtaattgtggtttttgctattaatattttcaaaaaggtagaagactgaaaaatttaacaaaaaattagtaagtataaatttatcaattatatttgacaaaaataatgaaagttcttaccctaaaaagtaaaataattgacatccattgaatgggtttaacagaaaattagaaataggtaaagagagagtgagcgagtgaactaaaaagtaggtgaaaagtaaatttctagactgaagcaaatgggtaccaaagaatagacaatatagaccaacagttaagagatgcataggataggcaatgacatggtaaattacattgtgttagaattctggaataaaaaggcagaaaaatggaacaaagactatatttaaagagatattatctcataattttcccaaactgagtaatataatcagtctacaagttcaaaatgcccaattaattccattcaataagaaaaataataaagattaatctccattgagatgtatgatagtgaattgcagaaaaggccatcatcaaaccgtacaagtttatttaaataaggtgaataaaattgaccagagttacaattgagttctcaacagaaacaatggaatataggaaacaacagaatgattgcttccatatggtgaaaggaaacaactgctaagatagtatctcaatctgtttcaagaataaatgtattttatttcagacaaatttaaactggagagaaactgtcatgagcagaaaggttacccttcagacattcatgagcagaaatgtattcttcaggcggaaggaaaattattcttagattgtggctattttggaaggaagaacaatgaactagttaaatctaagcatatgttgatggcataaaatactattaataatgttttatggacttgaaatatagaaaattaaaataagctaaaaatagcatatgattttgggtgataaatgaatttccagctttctgtgttcctttcattgtatagaaagaaggtgaaaatgaccttcagtaattgatattcataagtatagtattcatgttgaatctttagggtatctagcaagaaaagaagcaagaaaatgaaggacaaaaattgaatatactttttatgaagtctaaaagaaggcaagaaaagagagaaagaatgcatacaacagctaaagcaaatagaaggtagataataagatagtaaaatcaaacacaactatacaattaagataaatggacttatgctctaattaaaatattatggctgtcaaacttgattaaaaagaaaaaatccaactcttatttattaaagacatatataaaagcaaggaagcaaaatatttgaaagtagaagggtgataaaaaatatgcaaatattatcctccaaatggtggtaaatctatattagacaaaattgattttatataaactaataaaaatatggacagactttaaaataataaaactttgaactcacaaagaagatataacaattgtagtttgtatgtacctaataacacagcttcaaatacataatgcagtattaacaataacacattgcaaaaaaaggcaactacacaatcatagtgaataattttaattaacacaattgatctaatagacatttatagaacattacacctgagaactgcagaatttacagtcttctgaaacacaaatggatattttagctaagttaagcatatactgagccttaaaaatattctcaaacatttcgatatacctaatgtaaatgaggcgttaacgggtgcagcacactaacatggcacatgtatacatatgtaacaaacctgcacgtagtgcacatgtaccatagaacttaaagtataataataataataaaagaataaataaataaatataatcagagctatgagggcattattagcgaaatgtaaccaaaaaaaaaaaaagaattgaaagcaaataaaaatgtttgtatctgaaaaaaaaaacaatattctcaaacatttcaaagtgtagaaatcataatcttttctatctttaatgcacttaatccaaataaataacaaaaatataactaaaatccatacatttttgaaagtgaaaaatcacatttaaaaataattaatgaatacaataataaataatataatcaaatattttgaattgaatattcacattattgcatattaaaactttttggattcagcaaaggccatggctagaagttaatgtatagttttgagtacagctattttaaaaggctgaaaatcaataatctaagcatctattttgaaaaattaagaattaaacgatagaaacgcacagaaatggagaaagaagcaaatattaaacataccaaagaaattaatggaataaaaattatgaattgcagatgatttaaaaagccaaattttgcactttagaaaagataaaaattaattattattttaaaatttatttatatcacttttgccttctttttttttttttttgagacggagtctcactgtcgcccaggctggagtgcagtggcgcgatctcagctcactgcaagctccaactcccgggttcaccccattctcctgcctcagcctcccgagtagctgggaccacaggcgcccaccaccaggcccggctaattttttgtatttttagtagagacggggtttcaccgtgttagccaggacggtctggatctcctgaccttgtgatccgcccgcctcggcctcccaaagtgctgggattacagacttgagccaccgcgcccggcccacttgtgccttctttccatacaatgaaaggaacatagaatgcttgaacttcatacatctcttctaaaaataaattcttggagagaaaaaacagaacaaaaagagaagacacagctagtatcagtaattacctggttctgtttcagtcaactggattctgaagatgaaaaaaaccttgaactcatataaaacacaaaaattatttccttgtggtatgcatacatgtgaaaggaaaataaatggtttatgagctattatttttaaagccttcataacactgggataatgaataatattttcccaaagtacacaaaaatttctaacccaaatgaaaagattaaaatgtcagattatataaaaattgagactgttataaatactttaagaatgtgaagagcaagccataaaaaaaagcagtaaaagagataaagacctactatcagtcagtaataaagacaaagacaacctagttaagaaaaagtcaggacattatgaaggatacattctgaataggcaataaacatataaaaagtttttaaagttagtaagaaaaaaatataaattaaaacccaaacaagaagccacatgcttaaaattcaaaagcttgacaagaccatttattggcaaagatacgctacaactattcagcattatttattaaaatcaaagatactcataatctataacaattccactctatgtaaccaacagatgtaccttcacatatgcattaatatatgtgttcaaaatgttcatagtttgaacacattagcctcaaataggaaacaatacaaatgcaccacaataggagaatggaaaaataagttgtgatatgttcatacaatgaaatactatatgacaataaatgactgtttttacacctgacaatgtggattgatagcacaaacatactaataatctaaaaagccagaaacaaaagcctacataaaatatgagtaagttcatatattttttcacaaaggtgaaatctaaactatagggttttgggagtcatccttagaagataaagaatgaaaacaggccgggtgcggtggctcacgcctgtaatccaagcactttgggaggccgaggcgggggatcacgaggtcaggagttcgagaccagcctggctggcatggtgaaagcccatctctgctaaaaataccaaaaattagctgggcatggtggcatgcacctttagtcccagctacttgggaggctgaggcaggagaattgcttaaacccggtaggcagagatcacagtgagcggagatcatgccattgcactccagcctgggcgacagagccagactccatttctaaaaaataaaataaaataaaataaaataaaataaacaacagatgattttatttaaaaaaaaaatgatgggttagcgattaggggacagagagacacttgtggctgggtaagggcacactgggagctcccaggtgctatttctttacattagtgtggtagccccatggctgtttgctttataataattaattagcctataaatttatgtttaatgttctttttctgcatgtgtcttatattttacaataaaaggaaaattaaaaagtcatagctgctctccccacccttcttgaaaccaagagaatgaatgatctaagcagaccaagctgccccccacccaatctgataaaagggaaatgacatgcctgaatcaagggctgcttcaaagttaatgacaaatttcttttatccctcctgattcctaagcagtcctgttggtttgagtctccttcagtggcaggttggagaaaatgacagttccaaactggaaacccctagtcttggaactccatgtcgagttcatatatgaggaaatttcacaaatctctgacactgttaaatttttttcttgttttaaaaactttttggtcttatttaggaagcatgcccttccttgcgtgaatttcacaggctaagaagatgatgggattttaagacagactggctagcataccctcaccattgtcccaatcaagtcaccattgtcccaatcaagctttcctgaattctagggacctgtcatgaagtcatctacattgtcctttgtctttccttacccattaaatagtgctcttctcccctccctccagcctcagtgtacatgcccagtgttctcatgtgctactaacaactcattagaggttctgttacatcctagaactaagtcaggttgcagcagctaaacccttactgtcagaaccatctatttatctttgttttatgctaaatctattactgatgtctttcatgagttcactgtgttgtaggaaatcttttgtgccccagattaaagcattgttatcttatttagcaacacaattttgtatcaaatcacagtcctgagtattctgagcttgctagcccttttcactgttaaggcttctctgagttatatgccggtaatgggctcagaatctgtacattcaccagtggtccaatgatctacagggctacataaacccttgaatcaaagctatgtgtttcatgtcactctgactcaaactgctccagccaaggcaacttagttgttagatttttttccagttagtgaatccagcaccagcaggtcttagaaattatgaccaaaagtgaaagcaaatcatcacactgatcgaaaaggatctgtaggacttggcttcctttgctccgaagctccctcttacacattagacttcagccacgctggcttcttcgccgagcgtattcgcacaaatatccactggggtcaccgcctcacatccttcacatttgtgctccactccaacttcttcaagtggcaaattcctaaaccaaataacttaaacatgcaactaccaccctcactagacccttcctgtcctcttgttctacttaactgttctccatagcacttattattatttcacatactctgtatttacttgtttattatggtttccttccactataaagtattttcgactgcaaggaattttgctctattcttttttctttttattttattttattattattatactttaagttttagggtacatgtgcacaatgtgcaggttagttacatatgtatacatgtgccatgctggtgtgctgcacccattaactcgtcatttagcattaggtatatctcctagtgctatccctccccccttcccccaccccacaacagtccccagagtgtgatgttccccttcttgtgtccatgtgttctcattgttcaattcccacctatgagtgagaatatgcggtgtttggttttttgttcttgcgatagtttaccgagaatgatgatttccaatttcatccatgtccctacaaaggacatgaactcatcattttttatggctgcatagtattccatggtgtatatgtgccacattttcttaatccagtctatcattgttggacatttgggttggttccaagtctttgctattgtgaatagtgctgcaataaacatacgtgtgcatgtgtctttaagcagcatgatttatagtcctttgggtatatacccagtaatgggattgctgggtcaaatgctatttctagttctagatccctgaggaatcgccacactgacttccacaatggttgaactagtttacagttccaccaacagtgtaaaagtgttcctatttctccacatcctctccagcacctgttgtttcctgactttttaatgattgccattctaactggtgtgagatggtatctcattgtggttttgatttgcgtttctctgatggccagtgatggtgagcattttttcatgtgttttttggctgcataggtgtcttcttttgagaagtgttcgttcatgtccttcacccattttttgatggggttgtttgtttttttcttgtaaatttgtttgagttcattgtagattctggatattagccctttgtcagatgagtaggttgtgaaaattttctcccattttgtaggttgcctgttcactctgatggtagtttcttttgctgtgcagaagctctttagtttaattagatcccatttctcaattttggcttttgttgccattgcttttggtgttttagacatgaaatccttgcccatgcctatgtcctgaatggtattgcctaggttttcttctagggtttttatggttttaggtctaatgtttaagtctttaatccgtcttgaattaatttttgtataaggtgtaaggaagggatccagtttcagctttctacatatggctagccagttttcccagcaccatttattaaatagggaatcctttccccatttcttgtttttctcaggtttgtcaaagatcagatagttgtagatatgcggcattgtttctgagggctctgttctgttccattgatctatatctctgttttggtaccagtaccatgctgttttggttactgtagccttgtagtatagtttgaagtcaggtagtgtgatgcctccaactttgttcttttggcttaggattgacttggcgatgcgggctcttttttggttccatatgaactttaaagtagttttttccaattctgtgaagaaagtcattggtagcttgatggggatggcattgaatctataaattaccttgggcagtatggccattttcacgatattgattcttcctacccatgagcatggaatgttcttccatttgtttgtatcctcttttatttcattgagcagtggtttgtagttcttcttgaagaggtcattcacatcccttgtaagttggattcctaggtattttattctctttgaagcaattgtgaatgggagttcactcatgatttggctctctgtttgtctgttattggtgtataagaatgcttgtgatttttgcacattgattttgtatcctgagactttgctgaagttgcttatcagcttaaggagattttgggctgagaaaatggggttttctagatatacaatcatgtcatctgcaaacatggacaatttgactttctcttttcctaattgaataccctttatttccttctcctgcctaattgccctggccagaacttccaacactatgttgaataggagtggtgagagagggcacccctgtcttgtgccagttttcaaagggaatgcttccagtttttgcccattcagtatgatattggctgtgggtttgtcatagatagctcttattattttgagatacatcccatcaatacctaatttattgagagtttttagcatgaagggttgttgaattttgtcaaaaaacttttctgcatctgttgagataatcatgtggtttttgtctttggttctgtttctatgctggattacatttattgatttgcgtatattgaaccagccttgcatgccagggatgaagcccacttgatcatggtggataagcttcttgatgtgctgctggattcggtttgccagtattttattgaggatttttgcatcaatgttcatcaaggatattggtctaaaattctctttttttgttgtgtctctgccaggctttggtatcaggatgatgctggcctcataaaatgagttagggaggattccctctttttctattgattggaatagtttcagaaggaatggtaccggttcctccttgtacttctggtagaattcggctgtgaatccatctggtcctggactctttttggttggtaagctattgattattgccacaacttcagagcctgttactggtttattcagagattcaacttcttcctggtttagtcttcagagggtgtatgtgttgagggatttatccatttcttctagattttctagtttatttgcgtcgaggtgtttgtagtattctctgatggtagtttgtatttctgtgggatgggtggtgatatcccctttttcattttttattgcatctatttgattcttctctcttttcttctttattagtcttgctagcggtctatcaattttgttgatcctttcaaaaaaccagctcctggattcattaattttttgaagggttttttgtgtctctatttccttcagttctgctctgattttagttatttcttgccttctgctagcttatgaatgtgtttgctcttgcttttctagttcttttaattgtgatgttagggtgtcaattttggatctttcctgctttctcttgtgggcatttagtgctacaaatttccctctacacactgctttgaatgtgtcccagggattctggtatgttgtgtctttgttctcattggtttcaaacaacatctttatttctgccttcatttcgttatgtacccagtagtcattcaggagcagattgttcagtttccatgtagttgaacggttttgagtgagtttcttaatcctgagttctagtttgattgcactgtggtctgagagacagtttgttataatttctgttcttttacatttgctgaggagagctttacttccaactatgtggtcaattttggaataggtgtggtgtggtgctgaataaaatgtatattctgttgatttggggtggagagttctgtagatgtctattaggtccacttggtgcagagctgagttcaattcctgggtatccttgttaactttctgtctcgttgatctgtctaatgttgacagtggggtgttaaagtctcccattattaatgtgtgggagtctaagtctctttgtaggtcactcaggacttgctttatgaatctggatgctcctgtattgggtgcatatacatttaggatagttagctcttcttgttgaattgatccctttaccattatgtaatggccttctttgtctcttttgatctttgttggtttaaagtctatttcatcacagactaggattgcaacccctgcctttttttgttttccatttgcttggtagatcttcctccatccttttattttgagcctatgtgtgtctctgcacttgagatgggtttcctgaatacagcacactgatgggtcttgactctttatccaatttgccagtctgtgtcttttaattggagcatttagtccatttacatttaaagttaatattgttatgtgtgaatttgatcctgtcattatgttagctggttattttgcttgttagttgatgcagtttcttcctagcctcagtggtctttacaatttggcatgattttgcagtggctggtaccggtttttcctttccatgtttagtgcttccttcaggagctcttttagggcaggcctggtggtgacaaaaatctctcagcatttgcttgtctgtaaagtattttatttctccttcacttatgaagcttagtttggctggatatgaaattctgggttgacaattctttcctttcagaatgttgaatatcggcccccactctctcctggcttgtagagtttctgccgagagatccgctgttagtctgatgggcttccctttgtgggtaacccgacctttctctctggctgcccttaacattttttccttcatttcaactttggtgaatctgacaattgtgtgtcttggagttgctcttctcgaggagtatctttgtggagttctctgtatttcctgaatctgaatgttggccttcctcgctagattggggaagtcctcctggataatatcttgcagagtgttttccaacttggttccattctccctgtcactttcaggtacaccaatcagatgtagatttggtcttttcacatagtcccatatttcttggaggctttgttcatttctttttattcttttttctctaaacttcccttcttgcttcattcattcatttcatcttccatcactgataccctttcttccagttgatcgcatcggcccctgagtcttctgcattcttcacatagttctcgagccttggctttcagctccattagctcctttaagcacttccctgtatggcttattctagttatacattcgtctaaatttttttcaaagttttcaacttctttgcgtttggtttgaatgtcctcccgtagttcggagtaatttgatcatctgaagccttcttctctcagcttgtcaaagtcattctccagccagctttgttccattgttggtgaggaactgcattcctttggaggaggagaggcactctgctttttagagtttccagtttttctgctctgttttttccccatttttgtggtttcatctacttttggtctttgatgatggtgatgtacagatgggtttttggtgtggatgtcctttctgtttgttagttttccttctaacagacaggaccctcagctgcaggtctgttggagtttgctagaggtccactccagactctgtttgcctgggtatcagccgtggtggctgcagaacagtggattttcgtgaactgcgaatgctgctgtctgatcattcctctggaagttttgtctcagaggagtacccggctgtgtgaggtgtctgtctgcccctactggggggtgcctcccagttagtctgcttggaggtcgggggtcagggacccacttgaggagacagtctgcccgttctcagatctccagctgcgtgctgggagaaccacagctctcttcaaagctgtcagacagagacatttaagtctgcagaggttactgctgtctttttgtttgtctgtgccctgcccctagaggtggagcctacagaggcaggcaggcctccttgagctgtggtgggctccacccagttcaagcttcccagctgctttgtttacctaagcaagcctgggcaatggcaggcacccctcccccagccttgctgccgccttgcagtttgatctcagactgctgtgctagccatcagtgagactccgtgggcgtaggaccctccgagccatgtgtgggatataatctcctggtgggccgttttttaagcccatcgcagaagcgcagtattagggtgggagtgacccgattttccaggtgccatctgtcaccctttctttgac

SEQ ID NO: 10393 - DNA, 33965 bp, Homo sapiens
aactcccacttatgagtgagaacatgcagtgttcggttttctgttcctgtgttagtttcctgagaatgatggtttccagcttcatccatgtccctacaaaggacatgaactcatactttttatggctgcatagtattccatggtatatatgggccacactttctttatccagtctatcactgatgggcatttgggttggttccaagtctttgctattgtgaacagtgctgtaataaacatatatatgcatgtgtctttatagcagaataatttataatcctttgggtatatacccagtaatgggattgctgggtcaaatggtatttctggttttagatccttgaggaattgccacactgttttccacaatggttgaactactttacactcccaccaacagtgtaaaagcattcctatttctccacatcctctccagcatctgtttcctgactttttaatgatcgccactctaactggtgtgagacggtatctcattgtggttttgatttgcatttctctaatgaccagtgatgatgaggttttttttatatgtttgtcacataaatgtcttcttttgagaagtgtctgttcatatccttcacccaatttttgatagggttgtttgttttttttcttgtaaatttgtttaagttctttgtagattctggatattagactttgtcacatggatagattgcaaaaattttctcccattctgtaggttgtctgttcactctgataatagtttcttttgctgtgcagaagctctttagtttaattagatcccatttgtcagttttggcttttcttgcaattgcttttggtgttttagtcatgaagtctttaccatgcctatgtcttgaagggtattgcctaggttttcttctacggtttttatggctttaggtttgacatttaagtctttaatacatcttgagttattttttgtataaggcgtaaggtgtgaggaaggggtccagtttcagttttctgcatatggctagccagttttcccagcgccacttgttaaatagggaatcctttccccattgcttgttttggtcagatttgttggagatcagatggttgtatatgtgtagtgttatttctgaggcctctgttttgttccattggtctatatatctgttttggtaccagtaccatgctgttttggttactgtagccttgtagtatagtttgaagtcaggtagtgtgatgccaccagctttgatcttgatctttttgcttaggattgtcttggctatacagtctcttctttggttctatatgaaatttaaagtagttttttcttgttctgtgaagaaagtcaatggtagcttgatgggaatagcattgaatctatgaattactttgggcagtatggccattttcacaatgttgattcttcctatccatgagcatggaatgtttttccatttgtttatgtcctctcttatttccttgagcagtggtttatagttctccttgaagaggttgttcacatcccttgtaagctgtattcctaggtatttaatatactttgtagcaattgtgaatgggaattcactcatgatttggctctctgtttgtctgttattggtgtataggaatgcttgtgatttttgcacattgattttgtatcctgagactttgctgaagttactcatgagcttaaggagttttagggctgagacaatggggttttctaaatatacaatcatgtcacctgcaaacagagacaatttgacttcctcacttcctatttgtatatcctttgtttctttctcttgcctgattgccttggccagaacttccaatactatgttgaataggagtggtgagagagggcatctttgtcttgtgccagttttcaaagggagtgcttccagcttttgcacagtcagtatgatattggctataggtttgtcataaatagctcattattattattattttgtttattgttattatactttaagttttagggtacatgtgcacaatgtgcaggttagttacatatgtatacatgtgccatgctggtgcgctgcacccactaactcgtcatctagcattaggtatatctcccaacgctatctctccccactccccccaccccacaacagtccccagagtgtgatgttccccttactgtgtccatgtgttctcattgttcaattcccacctatgagtgagaatatgcggtgtttggttttttgttcttgcgatagtttactgagaatgatgatttccaatttcatccatgtccctacaaaggacatgaactcatcattttttatggctgcatagtattccatggtgtatatgtgccacattttcttaatccagtctattgttgttggacatttgggttggttccaagtctttgctattgtgaataatgccgcaataaacatacgtgtacatgtgtctttatagcagcatgatttatagtcctttgggtatatacccagtaatgggatggctgggtcaaatggtatttctagttctagatccctgaggaatcaccacactgacttccacaatggttgaactagtttacagtcccaccaacagtgtaaaagtgttcctatttctccacatcctctccagcacctgttgtttcctgactttttaatgatcgccattgtaactggtgtgagatggtatctcattgtggttttgatttgcatttctctgatggccagtgatgatgagcattttttcatgtgttttttggctgcataaatgccttcttttgagaagtgtctgttcatatccttcgcccactttttgacggggttgtttgtttttttcttgtaaatttgtttgagttcattgtggattctggatattagccctttgtcagatgagtaggttgcaaaaattttctcccattctgtaggttgcctgttcactctgatggtagtttcttttgctgtgcagaagctctttagtttaattagatcccatttgtcaattttggcttttgttgccattgcttttggtgttttagacatgaagtccttgcccatgcctatgtcctgaatggtaaagcctaggttttcttctagggtttttatggttttaggtctaatgtttaagtctttaatccatcttgaattgatttttgtataaggtgtaaggaagggatccagtttcagctttctacatatgtcttgccagttttcccagcaccatttattaaatagggaatcctttccccattgcttgtttttctcaggtttgtcaaagatcagatggttgtagataagcggcgttatttctgagggctctgttctgttccattgatctatatctctgttttggtaccggtaccatgctgttttggttactgtagccttgtagtatagtttgaagtcaggtagtgtgatgcctccagcttagttcttttggcttaggattgacttggcaatgcgggctcttttttggttccatatgacctttgaagtagttttttccaattctgtgaagaaagtcattggtagcttgatggggatggcattgaatctgtaaattaccttgggcagtatggccattttcacgatattgattcttcctacccatgagcatggaatgttcttccatttgtttgtgtcctcttttatttcattgagcagtggtttgtagttctccttgaagaggtccttcacatcccttgtaagtcggattcctaggtattttattctcttggaagcaattgtgaatgggagttcactcatgatttggctctctgtttgtctgttgttggtgtataagaatgcttgtgatttttgtacattgattttgtatcctgagactttgctgaagttgcttatcagcttaaggagattttgggctgagacaatggggttttctagatatacaatcatgtcgtctgcaaacagggacaatttgacttcctcttttcctaattgagtaccctttatttccttctcctgcctaattgccctggccagaacttccaacactatgttgaataggagtggtgagagagggcatccctgtcttgtgccagttttcaaagggaatgcttccagtttttgtccattcagtatgatattggctgtgggtttgtcatagatagctcttattattttgaaatacgtcccatcaatacgtaatttattgagagtttttagcatgaaggttgttgaattttgtcaaaggccttttctgcatctattgagataaccatgtggtttttgtctttggttctgtttatatgctggattacatttattgatttgcatatattgaaccagccttgcatcccagggatgaagcccacttgatcatggtggagaaggtttttgatgtgctgctggattcggtttgccagtattttattgaggatttttgcatcaaagttcatcgaggatattggtctaaaattctcttttttggttgtgtctctgcccggctttggtatcaggatgatgctggcctcataaaatgagttagggaggattccctctttttctgttgattggaatagtttcagaaggaatggtaccagttcctccttgtacctctggtagaattcagctgtgaatccatctggtcctggactctttttggttggtaagctattgattattgccacaatttcagagcctgctattggtctattcagagattcaacttcttcctggtttagtcttgggagagtgtatgtgttgaggaatttatccatttcttctagattttctagtttatttgcgtagaggtgtttgtagtattctctgatggtagtttgtgtttctgtggaatcagtggtgatatcccctttatcattttttattgcgtctatttgattcttctctctttttttattagtcttgatagcggtttatcaattttgttgatcctttcaaaaaaccagctcctggattcattaattttttgaagagttttttgtgtctctatttccttcagttccactctgattttagttatttcttgccttctgctagcttttgaatgtgtttgctcttgcttctctagttcttttaattgtgatgttagggtgtcaattttggatctttcctgctttctcttgtgggcatttagtgctataaatttccctctacacactgctttgaatgcgtcccagagattctggtatgttgtgtctttgttctcgttggtttcaaagaatatctttatttctgccttcatttcgttatgtacccagtagtcattcaggatcaggttgttcagtttccatgtatttgagcagttttgaatgagattcttaatcctgagttctagtttgattgcactgtggtctgagagatagtttgttataatttctgttcttttacatttgctgaggagagctttacttccaagtatgtggtcaattttggaataggtgtggtgtggtgctgaaaaaaatgtatattttgttgatttggggtggagtgttctgtagatgtctattaggtctgcttggtgcagagctgagttcaattcctgggtatccttgttgactttctgtctcattgaattgtctaatgttgacagtggggtgttaaaatctcccactattaatgtgttggagtctaagtctctttgtaggtcactcaggagttgctttatgaatctgggtgctcctgcatttggtgcatatatatttaggatagttagctcttcttgttgaattgatccctttaccattatataatggccttctttgtctcttttgatctttgttggtttaaagtctgttttatcagagactaggattgcaacccctgcctttttttgttttccgtttgcttggtagatcttcctccatccttttattttgagcctatgtgtgtctctgcacgtgagatgggtttcctgaatacagcacactgatgggtcttgactctttatccaatttgccagtctgtgtcttttaattggagaatttagtccattttcatttatagttaatattgttatgtgtgaatttgatcctgtcattatgatgttagctggttattttgctcgttagttcatgcagtttcttcctagtctcgatggtctttacattttggcatgagtttgcagtggctggtaccggttgttcctttccatgtctagtgcttccttcaggagctcttttagggcaggcctggtggtgacaaaattcgtcagcatttgcttgtctgtaaagtattttatttctccttcacttatgaagcttattttggctggatatgaaattctgggttgaaaattcttttctttaagaatgttgaatattggcccccactctcttctggcttgtagagtttttgctgagagatctgctgttagtctgatgggcttccctttgagggtaacccgacctttctctctggctgcccttaacattttttccttcatttcaactttggtgaatctgacaattatgtgtcttggagttgctcttctcgaggagtatctttgtggcgttctctgtatttcctgaatctgaatgttggcctgccttgctagattggggaagttctcctggataatatcctgcagagtgttttccaacttggttccattctccccgtcactttcaggtacaccaatcagatgtagatttggtcttttcacatagtcctatatttcttggaggctttgctcatttctttttattctttttttctttaaacttcccttctcgcttcatttcattcatttcatcttccattgctgacaccctttcttccagttgatcgcattggctcctgaggcttctgcattcttcacgtagttctcgagccttggttttcagctccatcagctcctttaagcacttctctgtgtgggttattctagttatacattcttctaaacttttttcaaagttttcaacttctctgccttcggtttgaatgtcctccggtagctcagagtaatgtgatcgtctgaagccttcttctctcagctcgtcaaagtcattctctgtccagctttgttccattgctggtgaggaactgcgttcctttggaggaggagaggtgctctgctttttagagtttccagtttttctgctctgttttttccctatctttgtggttttatctacttttggtctttgatgatggtgatgtacagatgggtttttggtgtggatgtcctttctgtttgttagttttccttctaacagacaggacccttagctgcaggtctgttggagtacccggccatgtgaggtgtcagtctgcccctgctggggggtgcctcccagttaggctgctcgggggtcaggggtcagggacccagttgaggaggcagtctgccagttctcagatctccagctgcatgctgggagaaccactgctctcttcaaagctgtcagacagggacatttaagtctgcagaggttactgctgtctttttgtttgtctgtgccctgcccccagaggtagagcctacagaggcaggcaggcctcctagagctgtggtgggctccacccagttggagcttcctggctgctttgtttacctaagcaagcctgggcaatggcgggcgccccttccccagcgttgctgccaccttgcagtttgatctcagtctgctgtgctagcaatcagcgagactccatgggcataggaccctccgagccatgcgcgggatataatctcctggtgcgctgttttttaagcctgttggaaaagcacagtatttgggtgggagtgacctgattttccaggtgccgtctgtcacccctttctttgactaggaaagggaactccctgaccccttgcacttcctgagtgaggcaatgcctcgccctgctttggctcacgcatggtgcatgcacccactgacctgcacccactgtctggcactccctagtgagatgaacccggtacctcagatggaaatgcagaaatcacccatcttctgcgtcgctcacactgggagctgtagaccagagctgttcctattcagccatcttggctcctccccacctttcctgactttttaatgtttgccattctaactggcgtgagatggtatctcattgtggttttgatttgcatttctctaatgaccagtgatgatgagcttttttgcatatgtttgcgactgcataaatgtctttttttgaaaagtgtctgttcatatactttgcccactttttgatggggttgtttgtttttttcttgtaaatttatctaagttctttgtagattctggatattagccctttgtcagatggatagattgcaaaatttttctcccattctgtaggttgtctgttcactctgaaaatagtttcttttgctatgcagacactgtttagtttaattagatcccatttgtcaattttagcttttgttgccattgcttttggtgttttagtcatgaagtctttgcccatgcctatgtcctgaatgatattgcctaggttttattctagggtttttatggttttaggtcttaggtttaagtctttaatccatcttgagttaatttttgtataaggtgtaaggaagtggtccaatttcagttttctgcatatggctagtcagttttcccatcaccatttattaaatagggaatcctttccccatttcttgtttttgtcagggttgtcaaagatcagatagttgtagatgtgtggtgttatttctgaggcctctgttctgttccactggtctatttatctgttttggtacgagtaccatgctgttttggttactgtagccttgtagtatagtttgaagtcgggtagcatgatgcctccagtttgttctttttgcttagtgtgaaaatggccatactgcccaaagtaatttatagattcaatgctatccatatctatttgttgtctttatagtaatttgacgtgtaaagttaggttgcttatttgagattgctcttcttttttttctagttttattttgggttaagggggtatatgtacaggtttgttacatgagtacagtgtgtgtcactgaggcttggtgtatgaatgatctcatcatcaaggtagtgagcgcagtacccgataggtagccttccaacctctcccccttcccaccctccccactcaagtaatccccagtgtctattgttcccatttttgtgtccatgtgtattcaatgtttagctcccattataagtgagaacacatggtatttggttttctgttcctgtgttagtttgcttaagataatggtcttcagatgcttccacattgctataaatttcgttcttggaactccttttgctgtatcctgtaacttttgataaattatattttcatttttacttctctcaagatagttttaaaatttctctgatttcttcttttacccagtgattattcaagagtgtgttagttttcatgtattcatgaaatttcccatttttattgcttttattgatttctagcttcattctattgtggttggatagtatatctggaatgatttcaatcttcttaaatttgttaagatttgctttgtgacctgaaatgtgatctattctggagaatgttccatgtatgaatgagaagaatatatattcttctcctgttggataaaaagttctgtataaatctattaggtccatttgccctatagtgtagttcagttccattgtctctttgttgattttatgtctgatgtcctattcactattgaaagtaggatattgaagtcttctactattattgtattgctgtcaacctctccttttcaatctgtcaatatttgctttatatacttagatgctctgatgtcggacacatttatatttagtattgttatatgtttctgttaaattgactcttttaccattatgtaatgatcttttttgtatctaaaaacagtttttttttttaactgaaactctgctttatcttatataagcagagccattcctgctctcctttggttactgtttatatgaaatatcctttctcatccctttcctttcagcctctgtgtgtccttaaatctaaagtgagtttcttgttgacagcagatagtttgatcttgattttttttatccatttagtgactctatatcattttattgggaagtttagttcatttgtttaaaataattattgataaggagggatttattattaccatttgattaactgttttctctttgtcttacagcccttttgtccctatttttatctcttgctctgtttcatttttaattaattggttttgatttctttatgtttttcttttgtgtaacttctataggtgttttctttgtggctaccaaggagcttacataaaatgtcttatagttgtaacagtctattttgagctgataataacttcatttgcatacaataactgctttgatccctcttccctccaaattatattctgttgatgtaacaatgtacatctatttgtattatgtgtctattaatatcatttatagacattttaatgttttttccttttagcttttatagtagaattaaaagtgatttaccacctccattatagtaatacaatattctatttttgtctatatttacctttaccagtgagcttcattccttcttatgcacgtgtgttgctgtttagtactcttttaattaaacttgaagagctctctttagcatttcttgtaaggtaggtctagcagtaataaactccccgagcttttgtttttctgagaaagtcttaatctctttttcatttttttaaggttagatttgcttgacacagtattcttgattggcagttccccactcccagcactctgagtatatcattccatgcacttcttacctgcaaggttactgctgaaaaatctactaatagtcttatgaagattcccttgtatgtagtaggttgcttttctctttctgatttcaaaattctctgtctttaacttctgacaatttaattataatgggtctttttggattcactttatttagtatcctttgggcttcctggatctggatttctatttactcccccaggcttgggatgtttttagctattatctcttggaatatattaggttggtgcaagagtaattgcgtttttttgcagatgtattgcaaaaactgcaattactcttttaccaacttaatactttctttcactttcttttttctcttcttttgggtctctaataatgtatacattggtcggctttatgtgtcccataagtcccttaaggtatcttcactctttcattcttatttctttttgctcctctgattggatgatttccaatggcctgtcttcaagttcactgatgctttcttctgcttggtttagtctgctgctgaacttctctgttgaatttttcagttcaggcattgtattcttcggctgtatcacttctgtttggtatgtttaaacattttctatctgtgtgttgaaagtctcactttgttcatgcctttctctcctgacctcagtgaatatttttaagaccattattttgaattccctgctgggtaaatgacttgtcactattttattaagttgacttctggagttttatctttttttgttttgttttgttttttgttttgttgttgttgttgttgtttgaaacgtattttcctgtttcttcattttccttgattctgtgttggtttctgtgcattagataaaacagctacctctccagtcttgtgtaggaataaaccacacaaatcagtatggccagtgattctgggtgcctcccaaatctttgtgcttgtccaaaccattgcctatgttcttcatgggccccagaagattaatgtgttccatatcccattagtgccctgagacaattcaaaaagaagtgaatactttgagaagaagctggaaaatttatggtgctagatgtgtggtccagttttttttttctctcttcagggagaagcttggaactgaagtgtatttgcccttgttctggaataaggcatggagactatctgtgtcagattcctgcactctcgttcagactgtacactctttcaaccctttggtctgctctttgtttccctcaggggcctaatgaatattgattcccattggctgtcagagacaggtgagtcagatggaggcttggtactatctctagagcaagctgagaagaggatttgtgggaagtgcctatagttcccttcaggctcccagagaagtacttattgcctgccccatcagctcccagatgcaggctaattaaaggcttgatcctgggaagcagcagtgaaagttaagatgttaggtttgcagttgaaccccttccagggagaaactggaaactgggtgttttgccttcttgttctgtgccgagccaggggaagtagccactacaggtgctcctattcccatttaaaatcaaatcaattctttgttctctgtggtctggggggacttgtaaatgctaagtcatgtcagttcccagagataagtgatttaggagctagtctctcaagtgggagctgtacaagttggggtgctcaatgtgtagacaagccccttccaggcagaagctggaggcttggttttactgctggagtaatatggtgggggggggggggaagattgctaattagctgcatttaaaatagattattttggattgtctgggtacccccagtgtaatcacaatggcccttaaaagtggagagagatgcggaaaagaagttcatagtgatttgatgtgagaaggactcaatccattgtcattggctttgaaggtggaactgggccataagccaaggaatgcaggtgatctctagaagctgcaaaaggcaaggaaattgattctccagtacagcctccagaaaagaactcatcctcaccaacaacttgagactcatgttgaacctctaagttccaaaactgtaagataataaatttttgttgttttaagctactaaatttatggtaacagcagcaacaggaaactaagcatattggacttgaaaatgtgtattctgctgttattaagtggaatgttctataaatgtcaattaggtcaaattggttgacaatgttggcacactgaataatgcccccaaagatatccatgtcttattgcccaggacatacctgtggatgttactttatatgtcaaaaagggacattgcagatgtaattgagttaaggatcttgagataaagagattatttttgattgtccagatggactctaaatataaattttaagagaagcagagggaaggcacagaaaaagagggcaatgtgaggactgaagcaagatgctgtgctgctggctttgaagatgaaggaaggggccatgagcagctctaaaagctgcaaaaggcaaaaaaatatttcccttagagattttggagaagtagggcactaccatcaccttgatttcagccccatgaaactgattttggactgttgatttccagaactgtgagagaataaatggcttgtattaagacacgaagcttgtaggaatttcttgcagcagccataggaaactaatacaatggtgttcaaatcttctctatctttactgatttttttgtctacttgtactattattattatttttccatacctatcttctatactattaattattgagaggggcattaaaatctctggccatatttgtgagtttttctttttattattgcaattctgtcaatttttgcttcatgtgttttggaattctgttattacacacataaaagttttagattgttatgtcctcttgatgaattgatggctttatcattgtagaatgtccttcttcattcctgataatattttttcctttgaagtctactttgtctgatattaatattgtcattccaagtatcttttgattagtgtcattatagaatatcttttttcatccttttctgcttaagccagctgtctttatatttagtgcaagattcatgtaggcaaaatatagataagctttgctttttaaatccactctgacaatcactgccttttaactgaggatattcagaccatgtactctaatatttagattattgacttctttagatttaaatctatcatcttactatttttcaaatttgtcgcatttgttctttgtttccctttttactgccttcatttatattaattgaacttttaaaaaattccatttttcctctctctgttggcttattatctataactctttgttattttattggttgacttagagtttatagtatagagcttttgcttgcctcagttcaccttgaagtgatatcatatcactttacatagagcataaacattttataatagtatctttccatttttcctctcctgattttttgtcctattgttctcacaggttttacttttgcatatattgcaaaactcaatctatattgttattatttttgtttaagcagtcaattatattttaaaggtatttaattaataagaaaaataccctatatatttactcatgtggttaccatttttgatgatcttaattcctttgaaaagatcagtatttttctctgatatcattctccttttttaacttttttttttttttttgtagttcaggtctgctggcaacaaactgagctactgaatgtctggaaaagcttttattttgccttcatttttgaaaggtaattttgaaaaataattttaatttgacagtttttcttctaatacagtcatgtgtcacataatgatgttttggtcaacaacagaccacatatgcgatgttggtcccataagagtatagcaccctatttttactgtattttttttctgtgtttagtatgtttagatacacaaatacttaccagtgtgttacagttgcctacagtattcactacagtagcatgctctacaggtttgtagtctaggagcaataggccatatcatacagcctaggtgtgtagtaggctgtaccatttaggtttgtgtaagtacactctacaatgttcacagaatgatgaagtagcttaatggtgcacttctcagaatatatccccattgttaagtgacacatgattgtactttgtaaatgttgtttcactgtcttctctgtcacattaattcttcagaaaaatctgttgtcatccttacctttgtttctctggacataacatatgttttttttcctctggctgctttaagaattgtccttttatcattcattttgatcaacctgattatcatgtttcttcttgtggatgtcttatttgcttggggttcactgaacttcttgggttcttgtgcttacagttttcataaaatttggaaaatttttggccattattgattccaatattttttctgtcctgacccccttttatttttagtgaatccagttacatatacattccacttgaggttgtcccagagctcactgaagctctgttctttgaaagtgactattctttttttcttttgtgttttctatgttgggacatttctattgctgtgtcttcaagttcattaatcttctctcttttctaaatttttaggttcaggggtaaatatgcaggtttgttatataggtaaacttgtgtcacaagggtttgttgtacagattgttttgtcactcagatactaagcctagtacccaatagttgttttttctgttccttttcctccttccatcctgcaccctcaaataggccccagtgtctgttgttctcctctttgtgtccatatgttcttatcatttagctcccacatgagaacatgtactatttggttttctgttcctgcattagtttgttaaggataatggcctccggttccattaatgttcctgcaaaggacatgatctcattcttttttatggctgtgtagtattccatagtgtatatgtacattttctttatccagtctagcattgatgggcatttaggttgattccatgtttttgctattgtgaatagtgctgcaatgaacatacatatgcatgtgtgtctttatgatagaataatttatattcctttgaggatatacccagtaatgggattgctgggttgaatggtagttctggttttagatctttgaggaattgccacactgctttccacaatggttgaactaatttacactctcaccaacagtgtatcagtgttcccttttctcagcaaccttgccagcatttgttattttttgactttttagtaatagccatttggactgatgtgcgatagtatctcattgtagtttattttgtatttctctaattatcagtgatattgagcttttttaaaatatgcttgctggccacatgtatgtcttgttttgaaaagtggctattcatgtcctttgcccactttttaatggggttgcttttttttcttataaatttgcttgagtttcttacagatgctggatattaaacctttgtcaggtgcataatttgtaaaaattttctcccattctgtaggttgtctgtttactctgttgatagtttcttttgctgtgcagaagctctttaattggattctatttgtcagtttttgcttttgctgcaattgcctttggcatcttcatcatgaaatttttgccagttcgtatgcccagaataatattgtctaggttgttttccagggtttatatagtttttgggttttacatttaagtctttaattcatcttgagttgatttttgtatatggtataaggaaggggttcagcttcaatcttctgcatatggctagcctggttagccagttatcccagcaccatttattgaatagggagtcctttccccattgtttatttttggcagatggttgtagttggtgtggccttatttttggcctctctattctgttccattggttatatgtctgtttttgtaccagtaccatgctattttgcttactgtagctctgtagtatagtttgaagttacgtagcatgatgcctccagctttgttctttttgcttaggatcaccttggctattaaggctgttttgattccatatgaattttaaaatagttttctttctagttctgtgaagaatgtcattggtagtttgatacgaataagattgaatttataaattacattgggcagtatggtcattttaacaatattgattcttcttattcatgagcatagaatgttatttcatttgtttgtgtcatctctgacttctttaagcagtgttttgtagttctcattatagagatctttcgcctccctagttagctgtgttcctaaatatttattctttttgaggcagttgtgaatgagattgcattcctgatttagctttcggcttgactgttgttgttatataggaatgctagtgacttttgtacattgattttgtatcctgaggctttgctgaagttctttatcagccgaaggagcttttgggctgagactatgggattttttagatataggctcatgttgtctgcaaacaaggatagtgtaaatttctctcttcccatttggaagagagaaacaaactctcttttgttactctcttttatttctctctcttatctgattgctctggccaggactttcaatactatgttgaatggaagtggtgaaagaggacatccttgtcttgtgtcagttttcaaggggaatactttcaggttttgtccattcagtataatgttggctgtgggtttgtcatagatagctcttattattttgaaggtatgtttcttcaatacctggtttattgagagtttttaacatgaagggatttttgaatttgattgaaagccttttctgcatctatttagatgatcataagttcactaatcttttctttttcagcctaatattttgctaaccctattcaatgtacttcttatatcttttatggtagtttttatctctagaggttaaatttggatctttttaatgtcttccaccttactacttaaactgttttaacatatagcacacagttgtaataactgtgttaatgtttttggctgataattctaacacttttgtcagtctgggctggtatttattcattgatttatctcttcatattttcttgctaattttcatgtttggtaattttttactggatgccagacatctggttttgaccttcttatgtgctgaatattttcttacttctgtaaatattcttgagctttcttctgggatgcatttaagttacttggaaacagtttgatccttcaggtcttgcttttaatatttggtaggcatacttgataagttgtcagtctagaaccaattatttcccactagtgaggcaaggctcttctgggaaatctacccaatgccccacaaatcacaggcttttttagtttttatggtccgtggtgagtgcaggacactgtttcctctaatcttgttgactggttctttttgtcacctcagggggtttcaccacatgcatgtggtgatcagtattcaattgaagactcaagggggactctctgcaggtgtctagttttctctccatatagctctctcctctctcagactctgttatgtgaactcttagccacctttgtatctccagaatcccaactctatcttctcaaatcagggagtctgccaggctccacctggtttccataaatgttagttttttaatgctgcataacaaattaccgcgaacttagcaacttaaaacagcatagatttattatctcaagattagtgtgggcagggagtgtagacatagcttaactgtatgttctctgctttagggtttcaccagcctgtaatgctagcttaagtctaatcagaggcttgatgggaaagatctgaaccctcaggatgttgacacaatttgtttctttgtggctgtgaccaaggattttgactttttcctgtatgttggctagaggccacctgcagttctctgccatgttagccctgttcataggcaattcacaaaatggaaatttgctccttgaaggccaggaggaaaggaaaagcaagtctttgtgcagctatataaatcactggagtgacattctgtcacctatgccatgttctattggttagaaataggtctcagatcccacctacaatcaaggggaggagttctacaaaggtgtgaacaccaggggccaggaatcatttgaagtcaacatagggtctgtctgttataccctctctgtgttgtgacctgaaaactctctcaagacaggaggctgggaaaattgaaactcttgtcttgttttccaattctcagtgattactctcttttgttacctgattttcagtgtcttcagcactgtcattttatatcatttgtccattttttgattgtttcacatggggcaggaaggggatatctggtccttgttatgctattttgatctgacaaggaagtctgaactctgttttttaaattcagtttttctgtctgttgtcaggatatggaagtgttgtagcttttaaaaagttgatattatattgagattcattgctctacttttattacctttaattatctatctaaaattattatttttctttctcatcagtactcataccttttatttttatttctttttttgaagttattagatagataagacctgtggtaaaatgctaaatagaagcagtgatagtctgcatcttttgttgctccaaattttaatacaaatccctgcaatgtttgagagaaactctcttttttcatctgtccacttttagatgttttccagtatctttacatagatttaaaatttttaaaagtttttataactgctacccatggaggagtttatgtaatgaatacacttctccaacactaataggagtattcatcattaactttaaaaaaatcaattataatttgatttattaaaatttcatgagttttttcaaatacagctcatcatctttggtagttttttgttcctttttaatttgggctgtatgtgtgtgatattctaagaaatattttatagctacttagtacactgtaactagtactgtgatattaaagtttctgagtctacttctgttgggttttttaatctttttgatcttgttcatagggacatgatttgggttcactttactgaattaattccatctgaatactcaagtaaattggagatgttttcctctagagaagatttgtgtttgcttctactggctgtcaataattcaactaattttggataactttagtctcctggaaggtcctaaattaatacagaacactccaaatcagctctccaattttactgacagcccaagattgatttcttcatcttaggattggtaccggcatttgtctatcggtcacctctgccttccttgttcatgtattcctcatgggcctcaactccagtttgtgctcctcatttaaaaaaaaatattgtttgctctacctttggaattttctttatttttctggtgaactcatcaattataaaaattctgtttcttttaataaatgtagcctctatttgcatctagcaagatgatgcttcagaatatccagtccaatttgctatcttttctgacatttgtctttacttatgtttcagtgataaatctgtaggacgtcagggctaaaatctggctaacatgagtcatgtccacttaccattttctaaggagaaaactatagaagagaattaacaacatatgatcaaaggaactttacagtttatgtaatattattttattgccattttcattatattcagtagaaatagtagtactagaaagaagaaaatgagattttaggaacataaaactggctttagatatttgaaaatgagaggaattttatgtttacagatttcaaaaggctttgatattatatttcaatgcaaacagtaacttatcgtatgatttggttcattaataattggagtgatgttcagatttaaacatttcatagaatctcaaatatgacttcaggtaccacattttacagggaaattactgtgattcacccactaaatgatagtgagtaaataataactgggatctgtaactataacctaggagtcttgcgttctagtctaataactgttctcaaaaatatcattaactttttgggtataataaacagcaaactgcagaataaattgcacatactaaagagtaagcaacaaaacaaattgcacatgctgtgcagtatgcaaagccacagaattatcaatctgagaaacaactgaatacaaaataaaacacacagttgtgttttgattaaggctccttttaggcagtttgcttcagccaaggctgtgtaacttctttgagtttccatgtactttataaggctctgtttgaattcctttactctttcatctgatcccacaggtccacatttagacctctgtattaggctgtacaacccattggtatagtgatcaccatttttctccatcaacagatcctcaatacagtccattagttccttcacttggtcatcctgattgctcccttcagcacggttattaaaggcacagattcgcccaccacatgctgccaccagcttgcttagggctttgttatctgagtcgtgcatgtaatccatcagggagccaccattgaggtcttccttgtgggtaaagaggacaattgtgtgtcccatggcatcctctccaaagatctccttcaccctctgtgcagcctgctggtcctgtgaggtatagcggcccagctgagtcaccaggagcagcacatggggtcctggtgcagacagcaagtagcacctctgcacctctttgtacagagcttcacagtggtccttccaagaaaacatatctggtgtgtcaataatgacaatctctctatttccccagcttccctgacttttgctgcaagtcttagtcaaggtctgggaacccagcttcgattcaaatgcttgcttcctgaggatgctgttccctgcagcacttttgccagttcctgttttgcccaccaggatgattctcagctcagatctgctggcacattggccctttgcatgtggtcctgtgaggagcaagtttactgtgttatcgctacactgatcacggcagtggaatatttttttttcctttcatttctttttcttttttttttgagacggagtctcgctctgtcgcccaggctggagtgcaatggcgtgatctcgggtcactgcaagctccacctcccgggttcacgccattctcctgcctcagcctcccagtagctgggactacagatgcccgccaccgcatcccgctaattttttttttttttggtagttttagtagagacagggtttcaccgtggtatcgatctcctgacatcgtgatccgcccgcctcggcctcccaaagtgctgggattactggcgtgagccaccgggcccagccggtagtggaatatttttaatgataaggaggtattccccgttatgtaaaaagatactcgcacatctatttcacgtgaaatgaaagctaacttgattgctgtaggactgcagggtattgccatgttggagcctaggaaaacatacttggggatgagatggatttagagacatttctcatcatgtaatggttgcctgaatcactcagtcctggatctctagaagaaaagttttctggagatcagagatgcgtaggcaaggccatgggttccatctcaatgtgggccaagtgacctggctctgtttcaaggccagaggttgctactttgaccttggctgggcagagtggggtcatgactaccagggaagtggctggaccagcaaaatattagaatgagcagtgtaaaattatttttattagtgaagaaacaactgatatcttataaaggatatcataattttgcttagaaagcatggcataattttggtataaaatagtcacagaatatggtaaactttcctctctccttccccatttcccttcaacgtgggtaaggttctggggagaggagtgaatggggacagaggtatgaaggagcttgaggctttagggaaaaaatgtgtttcagacacataaaaggggaaggcataggagccatggtgccatttcgctggtccacatggcagtgataagaatgacttgtctagggcaggttcatggaagaaccaagatgcagctttgtagtggagagaggagtgatttaacttgcaaggcaagggtgactctggctcttgagggttaaccccttgattcctttactgtaagggaggaacatttgacctatatgagtgaaacggaataccatgataacaggagaatctttctggagggaatatccaaacaaactaagactctcctgctaagctcattgccttttgcggtttagctgttccttactctcatgttgcagagagaaagttggagaaggaaagtctacattgaccacagaatatcagagcttagaaggaacttagactgtacaaagaaaatgagctttctgagaggcagcatgcagtggtgaagaaaaaaagaatctggagctggattgcttagtttagattgtctttccattgctagtcatatgatcttggacaactgattaatttctcttcatctggagaagatgatggtttactccatgtggtggtgttctaatgactaaataagttaatatatgtaaagaacttaaaagagtgctggtgcacttaagcacttggtgaaaattaggctaggattgtttatagcaacctccttatagatgaagtaacttgcatgcaggggttaagtaacttggacaaagtcacctaaatagttagtgaaatctaccctttattgagcacttttaatgtgccaggatctgttccaagtggtttacctgcattacctaatttactcctcctagcaatgatatgatttagggttaggtgctgcaatgcccaccagtggtcttgttcttagctggttcaaatgacctctcgggctcacaggactgccatgggcctcactgggacactagtctactcagaagaatggaaaacttcgcttgccagagggacaatgttgggccttccacctagtggaagtctatgcagcaattcatggaacactgcaaactgtcacctagggaggtcccagggcaaggagatggcatcttgagcagttatagaagccacctggactcacaggagccaatgtctcttgtagcaactctggggtttagcttccagattccctgcaaggaacatgagagttacaagagtcactgtgctcagggaagttcaaaacatagcttcctagcatgtatttatagttcttccagtatagatataattcacccatcaagagaagttttcaaccataagcaaagttcctaataatgttagagacattttactcttattaaattattagagaatctcagctaaaacatttaaccaaagattaaattctcagaaagggaaagggtttgtcaacctttttacccatgggttccttttattcaccttattttacacataaatctgcaacttgcccaataacttagagcccattaaaagtaaccagttttgtaaatgaaaaagctggcatttgaacctgcccgttttctatgcctgaagtattagtgctttgccatgctgctacgccaacacttgttgcacatatttaagtattttctcttccagacaaattggccaaaatttatggacatttaatcttattttctgtaggccagtgaaattatggcctcacagtagacatgcaatggacacttgtacttaaaaggaagcaggcattacattacacatttctatattctgaaaacagcagccaagcagctcctgatacaccgcgctggagcttgcttagaggcagccaaattgcacgtttaaccttcctctcgcctatgaaaacagaaatgaagggagtcattgaagagaagcggtgggagtcctgagttgctggcctcctagggagtgctacctcattctctcccatggggagggtatagggaagagaattctctgcatccaaagccaagtgagagggtctctaaatcatccactcataaatattgggcatgtcaccaaagttgagagataggtaggtcatttcccagatgggtgtctgctgaatgacagaaactggtaagcctatccaagtgcagcaaagtgaagagaattcttgagcaaatttttgagaggagttagatgtaacctgaagtttggagacatgtataaacatggaaattggtgtctatttcctttctggagaattctaaattttgaaggctgactagagccacctaggagaccaggataaggagtaagcagcaatggcttagggggtttcccatggacagaagggatcttacagaaaataactaggcacagctgccttgatgaggccctgtccaaaggcctgccttgtatggcaagcggagtgcaattacaagaggaagccaggggtgccatgagggtgggagcagaggtctagttggagaattctgccagagagggcgcagcctctggcgggaagcctgcaacttagccctgtggcgactccacagtgttctcgcacagtggagggtgtctgctgtaatggggcatgggatggcggtgaggactagccaggagacaactgcaaggacaatgggactcaagcactccaccttctttctccagtcacccatcctcctgcctgatggggaaggagggactagcatgagggttgagggggcagagctggaagggagaggaggacttttggaaggtaccagagttcaggctgaggctgaggtagaggaaggagaaactcaaattgaatgtaagtttgatgttagacggcaccgaacagtacaacacctgatacatgtgtcatagtgactttaatagactattcttctagtctctattaatcagaaaggcaactgcctgagatggcatcaataaatcaagattgtggccgggcgtggtggctcacgcctgtaatcccagcactttgggaggctgaggtgggcagatcacttgaggtcaggaatttgagatcagcctggccaacatggtgaaaccctgtctctactaaaaatataaaaattagccaggcatgatgacacatgcctgtaatcccagctactcaggaggctgaggcaggagaatcacttgaacctgagaggcagaggttgcagtgagctgagattgcaccaatgcactccagcctgggccacagagccagactccattccctccaccccgcaaccaaaacaaaaggaaatcaagattgcataataagagtcagtggctgggaggaaaaaaaaagttgtttctcatttggatctcagagttcagcttgatcaataaacaagttccatacacaatgaagccagagacctcctatttctcacaggtgagggttgagtgtgaaggcaacttggtaaggaggaagatctgggctcttcttgatgtaagagactgaagacagggctgtcgaggggcagagagtgaggaggagggagtgggaaaggggaggtcaagatacagagagagagacgcccataccatacagatagcagaaacaggtgcaagaagaggagagagagagaaaggacaagggaagagaagggaatgatagagacagacagaaagacagagagagagacacacacacacacacacaaagaacctatggaaatgtgagagaaggaagagaagactgaatggtaggagaaggagtatttcaaagagatctgaaagatttgtgcataagggaaaagcctggatgcatattttggatcctggtgagtattttaacaattttcgagccagacttggtggttcatgcctgtaattccagcactttgggaggctgaggcgggtggatcacaaggtcaggagtttgagaccagcctgaccaatatggtgaaaccccgtctctactaaaaatacaaaaaaaaattagctgggcgtggtggtgtgtgcctttagtcccagctacttgggaggctgaggcaggagaatcacttgaacctgggaggtggaggttgcagtgagccgagattgcgccactgcactccggcctgggtgacagagagagacactgtctcaaaacaaacaaacaaacaaacaaacaaagaaaacaaaaccccacaattttcagctgctggtggtggtagctgtgggagttagaataagatccttcacccttgtttattttgccccaacatcatcagaagagccaaacacacacacacacacacacacacacacacacacacacacacacacacacgtgaagtcaccttcttaccccagtgactgtgttcattttggtccattggtgttcctgagaaacagagagacaagaaacttatttttcagttctaaatcatgaaaaattcttatatttcttttcttttctttttctttctttcttttttttttttttttttttgagacacagtttcactctgtcacccaggctggagtgcagtggtgcgatctcggctcactgcaacctccacatcctgggttcaagtgattctcctgcctcagcctcccgagtagctgggattatgggtgtgcaccaccatgcccatctaatttttgtagttttagtagagacagggtttcaccatgttggccaggctggtctcaaactcctgacctcaaatgatccaccagcctcggcctcccaaagttctggaattaaaagcgtgagccatcacactaggccaagatccttatatttctaaacaaccatgtttcatttgtctactcataagggacaaggtgggtgggaaaggaatgacttcctactttacagagaactggaatcacttgctgaggggctgagaagtgggtttcatttgtaagcctcatgcccagctctctctcgctttcttcctcccgtcctctcacagatcagcccggctcccttctgtttttgttttgcctgcacactcttcgcttctgtcagctttctctgtaggtgtgccttcccttacaccttaggctcagtcctccctttccctctctttcttttcccaccttgcctccttccctcctctactctctccaaacctcctccctcatgttgagtctttgctgagagactcagtgaatgaagattatgactctgggaaaccgtgcagtcctttaagctggaaatacacttcacttgatccattaatggcttgaatttttctcattccccaacagcccctggttatgaagcccttgcaatgtaggaactactatggagtgagaaatatcggtacgttttcatcagctagtttctcttgcttaaatctggcaggcatagaccaagcgtacaagcacagaaaactgaaagccaccgattaatgcccaaattcttcccagttagcactttttattgactttatactatggaaattctttctttgccagtaatgtgtaaagtaaattacatcggtttcctgtaaactggctccacttaaggaaaaggcagtcactctaaattgcttctcttaaaataggacaaatttgttctaagaaaaatgaaaatgtttgtgcatggcttgggacctagaaatcaacactgcagaacttttcgtaaatctgggcttacctgatttactgttcaaagaaacagttggctccctgttcagtcctgttgtcttatagctcagctccaagagaaaaagaaagtaaaaccgagactccagtcggtcttcttcctctcttgaatcttcctgagcttcctgactgctaatgaacgccaccacgtgcctgtgtttgaaattctctttcatgccattatgcaaaataaacagtttaaatggaaagttaatcagtagttatttgctgtcatgtgggccaactgtctcttcttctcaaaagtgaaaaaagagtgttttaatgatttcatctggactggaaagaaaggcatgaatgccaaggaagttggtggatttcagtccttcccagctgggatatgtcccaacagttagaagtttgtctagatgcaaatggccccctgagaagggcttaaacctcattgacaccagcagcagggattgttctaaagcagatgccactgggagagaagaggagcctctgataggcactgcccaggggaagaagggcacagaaaggggaacctgagaggggacatttttgtctgagtctgattgtaaggatcattaaccatcaaaacatttttacataactcattcatggcttctaggattctgggcctttcttccctgtccagctctgtaatttcagagaacctccctgtggggagaaattgtctaggaaatgtctatagtaatactctggagtgttggctgggtcaaatggtatttctagttcaagatgcctgaggaatcgccacactgacttccacaatggttgaactagtttacggtcccaccaacagtgtaaaagtgttcttatttctccacatcctagcatttaaaacatttccttttgattgtcttggagtttccaggtttatcatagactcagttgcaaatagtgataattttccctccttgtttccaaaaatatcttatgttgctttctcttgtataattacaattgcttgctaccttttcaaaagtgagttaatgtgcttttattatttatttacctgtagggcacctaatatcttatcattaatattgatgttggttattggaaattaattagtttattttaaaatcagtgtggctatactttgcttagtcctatttcattaaagtcttttatctgtggtataaatttagaaaattttattttgacgttgactgatataattccatgtctttttccttttgacctactaatattgcaaattacatcactgcgtttcctaacataagtgatatgtacatgtacatgtgcaaaggtttgggttcctaggaatacagactgttgagatgaagataaaatggatgaaggaagtttattagggaatcttctcaggaaatgtgctagagggagaagggaagaacccaggattaggcagggagaagtgagactgagatgtagtcacaacaaatatagactctacagggagttctaaagtttggttggactttcagaatgaaggagagtgagcagaactttataatccccatcggatgcaaacttcctctggaaaagacacttgacttacatagggcatctctcttcagcataagctaatttctggacaggtctgacggctcaacagctgagagctaacaactggtctcactcccagcaactggagataggtccttctgtttttgcactgttcctctaggtttggagatgcaaatattgcttctcctgcttcatcttttagatcatctgtagagacttccaagcacagttttaaatatctccctcatgaaatttcttgttcaagccttctcactcctgtcccttctgaacatgagcatacatggaacatttcccctatgtcccatggttctagtaagtgatgtgactacagccttaaaggaggagtaagatagatgttgggaggaggtgaggaaggagagggcaggggctgagtagaggtgcatgttttagagtactatgacattttaaaattcattttattcccatggttcaaggcaattttggaaaatgggtcaagccgaaagaatagaccacagatttcctgcagtcatattgagatgtatttgacaattgttctgtggtttcttgtaaagtgtttatttataaagcagtactgttcaatagagaattctgtgatggacatgtttactgtctgccctgtccaatatggcagccactagcacatgtggctgttgagcactagcaaggtggccaatgtgatggagaaactgaattttacattttaattttaaatcatataattaaacggccacatgtggctagtggttaccgttttgaacagtgcaattatagagtatatcattctcaataagatgatacaaaacattgtgtatgtaaaaggagggggtgcacaggtaaagatatgatgagaaattgcaaaacaaaaggaacaagtggatttaacatcccaaaattccaaaacatggggaggggaggcttgttactgtgaatttaaaaattgcggtgactttccccattgcttgtttttgtcaggtttgtcaaagatcagatagttgtatatacgtggaattatttctgagggctctgttctgttccattggtctatatctctgttttggtaccagtaccatgctgttttggttactgcagccttgtagtatagtttgaagtcaggtagcgtggtgcctccagctttgttcttttggcttaggattgacttggcgatgcaggctcttttttggttccatatgaactttaaagtagttttttccaattctgtgaagaaagtcatggtggggatggcattgaatctataaattaccttgggcagtatggacattttcatgatattgattcttcctacccatgaacatggattgttcttccatttgtttgtatcctcttttatttcattgagcagtggtttgtagttctccttgaagaggtccttcacatcccttgtaagttggattcctaggtattttattctctttgaagcaattgtgaatgggagttcactcatgattttgctctctgtttgtctgttattggtgtataacaatgcttgtgatttttgctcattgattttgtatgctgagagtgctgaagttgcctatcagcttaaggagattttgggctgagaagacggggttttctaagtatacaatcatgtcatctgcaaacagggacaatttgacttcctcttttcctaattgaataccctttatttccttctcctgcctgattgccctgaccagaacttctaacaccatgttgaataggagtggtgagagagggcattcctctcttgtgccagttttcaaagggaatgcttccagtttttgcccattcagtatgatattggctgtgggtttgtcataggtagctcttattattttgagatacgtcccatcaatacataaattattgagagtttttagtatgaagggctgttgaattttgtcaaaggccttttctgcatctattgagataatcatgtggtttttgtctttggttctgtttatatgctggattatgtttattgattttcatatgttgaaccagccttgcaccccggggatgaagcccacttgatcatggtggataagctttttgatgtgctgctggattcggtttgccagtattttattgaggatttttgcatcaatgttcaaggatattggtctaaaattccctttttttgttgtgtctctgccaggctttggcatcaggatgatgctggcctcaaaaaatgagttagggaggattccttctttttctattgattgaaatagtttcagaaggaatggtaccagctcctccttgtacctctggtagaattcggctgtgaatccatctggtcctggacttttttttggttggtaagctattaattattgcctcaatttcagagcctgttattggtctattcagagattcaacttcttcctggtttagtcttgggagagtgtatgtgtcgaggaatttatccatttcttctagattttctagtttatttgcgtagaggtgtttgtagtattctctgatggtagtttgtgtttctgtgagatcggtggtgatatcccctttatcattttttattgcatctatttgattcttctcttttttcttctttattagtcttgctagtggtctatcattttcttgatcttttcaaaaaaccagctcctggattcattgatttttttgaagggttttttgtgtctctatttccttcagttctgctatgatcttagttatttcttgtcttctgctagcttttgaatgtgtttgctcttgcttctctagttcttttaattgtgatgttagggtgtcaattttagatctttcctcctttctcttgtgggcatttagtgctataaatttccctctacacagtgctttgaatgtgtcccagagattctggtatgttgtgtctttgttctcattggtttcaaagaacatctttatttctgccttcattttgttatgtacccagtagtcattcaggagcaggttgttcagtttccatgtatttgagcagttttgagtgagtttcttaatcctgagttctagtttgattgcactgtggtctgagagacagtttgttataatttctgttcttttacatttgctgaggagggctttacttccaactctgtggtcaattttgggataggtgtggtgtggtgctgaaaaaaatgtatattctgttgatttggggtggaaagttctgtatatgtctattaggtccacttggcgcagagctgagttcaattcctggatatccttgttaactttctgtttcattgttctgtctaatgttgacagtggggtgttaaagtttcccattattattgtgtgggagtctaagtctctttgtaggtcactgaggacttgctttatgaatctgggtgctcctgtattgggtgcatatatatttaggatagttagctcttcttgttgaattgatccctttaccattatgtaatagccttctttgtctcttttgatctttgttggcttaaagtctgttttatcagatactaggattgcaacccctgcctttttttgttttccatttgcttggtagatcttcctccatccctttatttggagcctatgtgtgtctctgcacgtgagatgggtttcctgaatacagcacactgatgagtcttgactctatatccaaattgccagtctgtgtcttttaattggagcatttagcccatttacatttaaggttaatattgttatgtgtgaatttgatcctgtcattatgatgttagctggttattttgctcgttagttgatgcagtttcttcctagccttgatggtctttacaatttggcatgtttttgcagtggttggtactggttgttcctttccatgtttcaggcttccttcaggagttcttttagggcaggcctggtggtgacaaaatctcagcatttgcttgtctgtaaagtattttatttctccttcacttatgaagcttattttggctggatatgaacttctgggttgaaaattcttttctttaa

SEQ ID NO: 10394 - DNA, 6176 bp, Homo sapiens
ttttattttatttttttattttattattattatactttaagttttagggtaatgtgcacaatgtgcaggtttgttacatgtctatacctgtgccatgttggtgtgctgcacccattaactcgtcatttagcattaggtatatctcctaatgctatccctcccccctcccccctccccacaccccacaacagtccctggagtgtgatgttccccttcctgcgtccatgtgttctcattgttcaattcccacctgtgagtgagaacatgcggtgtttggttttttctccttgcgatagtttgctgagaatgatggtttccaatttcatccatgtccctacaaaggacatgaactcttcattttttatggctgcatagtattccatggtgtatatgtgccacatttgcttaatccagtctatcattgctggacatttgggttggttccaagtctttgctattgtgaatagtgccccaataaacatacgtgtgcatgtgtctttatagcagcatgatttataatcctttgggtatatacccagtaatgggatggctgggtcaaatggtatttctagttctagatccctgagtaatggccacactgacttccacaatggttgaactagtttacagtcccaccaacagtgtaaaagtgttcctatttgtccacatcctctccagcacctggtggtttcctgactttttaatgattgccattctaactgatgtgagatggtatctcattgtggtattgatgtgcatttctctgatggccagtgatgatgagcattttttcatgtgttttttggctgcataaatgtcttcttttgagaagtgtctgttcatatcctttgcccacttattgatggggttgtttgtttttttcttgtaaatttgtttgagttcattgtagattctggatattagccctttgtcagatgagtaggttgcgaaaattttctcccattctgtagcttgcgtgttaatgctgatggtagtttcttttgctgtgcagaagctctttagtttaattagatcccatttgtcaatattgtcttttgttgccactgcttttggtgttttagacatgaagtccttgcccatgcctatgtcctgaatggtattgcctaggttttcttctagggtttttatggttttaggtctaacatgtacgtctttaatccatcttgaattaatttttgtataaggtgtaaggaagggatccagtttcagctttctacatatggctagccagttttcctagcaccatttattaaatagggaatcctttccccattgcttgtttttctcaggtttgtcaaagatcaaatggttgtagatatgtggcattatttctgagggctctgttctgttccattgatctatatctctgttttggtactagtaccatgctgttttggttactgtagccttgcagtatagtttgaagtcaggtagcctgatgcctccagctttgttcttttggcttaggattgacttggcgatgcaggctcttttttggttccatatgaaatttaaagtagttttttccaattctgtgaagaaagtcattggtagcttgatggggatggcattgaatctataaattaccttgggcagtatggccattttcacgatattgattcttcctacccatgagcatggaatgttcttccatttgtttgtatcctcttttatttcattgagcagtggtttctggttctccttgaagaggtccttcacatcccttataagttggattcctagatattttattctctttgtagcaattgtgaatgggagttcactcatgatttggctctctgtttgtctgttattggtgtataagaatgcttgtgatttttgtacattgattttgtatcctgagactttgctgaagttgcttatcagcttaaggagattttaggctgagacaatggggttttctagatatacaatcatgtcatctgcaaacagggacaatttgacttcctcttttcctaattgaatgccctttatttccttctcctgcctaattgccctggccagaacttccaatactatgttgaataggagtggtgagagagggcatccctgtcttgtgccagttttcaaagggaatgcttccagtttttgcccattcagtatgatattggctgtgggtttgtcatagatagctcttattattttgagatacatcccatcaatacctaagttattgagagtttttagcatgaagggttgttgaattttgtcaaaggccttttctgcatctattgagataatcatgtggtttttgtctttggttctgtttatatgctggactacatttattgatttgcgtatattgaaccagccttgcatcccagggatgaagcccacttgatcatggtggataagctttttgatgtgctgctggattcggtttgccagtattttattggggatttttgcatcaatgttcatcaaggatattggtctaaaattctcttttttggttttgtctctgccaggctttggtatcgggatgatgctggcctcataaaatgagttagggaggattccctctttttctattgattggactagtttcagaaggaatggtaccagctcctttttgtacctctggtagaattcggctgtgaatccatctggtcctggactttttttggctggtaagctattgattattgccataatttcagagcctgttataggtccattcagagattcaacttcttcctggtttagtcttgggagggtgtatgtgtccaggaatttatccatttcttctagattttctagtttatttgcgtagaggtgtttgtagtattctctgatggtagtttgtgtttctgtgggatcggtggtgatatccccattatcattttttattgcgtctatttgattcttctctcttttcttctttattagtcttgctagcagtctatcgattttcttgatcttttcaaaaaaccagctcctggattcattaattttttgaagggctttttgtgtctctatctccttcagttctgctctgattttagttatttcttgccttctgctagcttttgaatgtgtttgttcttgcttttctagttcttttaattgtgacgttagggtgtcaattttggatctttcctgcttcctcttgtgggcatttagtgctataaatttccctctacacactgctttgaatgtgtcccagagattctggtatgttgtgtctttgttctggttggtttcaaagaacatctttatttctgccttcatttcattatgtacccagtagtcactcaggagcaggttgttcagtttccatgttgttgagcggttttgagtgagtttcttagtcctgagttctagtttgattgcactgtggtctgagagacagtttgttataatttctgttcttttacatttgctcaggagtgctttacttccaactgtgtggtcaattttggaataggtgtggtgtggtgctgaaaaaaatgtatattctgttgatttggggtggagagttctgtagatgtctattaggtccgcttggtgcagaggtgagttcaattcccgggtatccttgttaactttctgtctcgttgatctgtctaatgttgacagtggggtgttaaaatctcccattattattgtgtgggagtctaagtctctttgtaggtcactaaggacttgctttatgaatctgggtgctcctgtattgggtgcatatatatttaggatagttagctcttcttgttgaattgatccctttaccattatgtaatggccttctttgtctcttttgatctttgttggtttaaagtctgttttatctgagactaggattgcaacccctgcctttttttgttttccatttgcttggtagatcttcctccatccctttattttgagcctatgtgtgtctctgcacatgagatgggtttcctgaatacagcacactgatgggtcttgactctttatccaatttgccagtctgtgtcttttaattggagcatttagcccatttacattcaaagttaatattgttatgtgtgtatttggtcctgtctttatgatgttagctggttattttgctcgttagttgatgcagtttcttcctagccttgatggtctttacattttggcatgtttttgcagtggctggtaccggttgttcctttccatgtttagtgctcccttcaggagctcttttagggcaggcctggtggtgacaaaatctctcagcgtttgcttgtctgtaaagtattttatttctccttcacttatgaagcttagtttggctggatatgaaattctgggttgaaaattcttttctttaagaatgttgaatattggccctcactctcttctggcttgtagagtttctgctgagagatctgctgttagtctgatgggcttccctttgtgggtaacccgacctttctctctggctgcccttaacattttttccttcatttcaactttggtgaatctgacaattatgtgtcttggagttgctcttgttgaggagtatctttgtggcgttctctgtatttcctgaatctgaatgttggcctgccttgctagattggggaagttctcctggataatatcctgcagagtgttttccagcttgtttccattctccccatcgttttcaggtacaccaatcagacgtagatttggtctttccacatagtcccatatttcttggaggctttgttcatttctttttattctttttttctctaaacttcccttctgacttcatttcattcattttgtcttccatcactgataccctttcttccagttgatcacatcagctcctgaggcttctgcattcttcacgtagttctcgagccttgacttttggctccatcagctcctttaaggacttctctgcgttagttattttagttatccattcgtctaattttttttcaaagtttaaaacttctttgccattggtttgaatttcctcctgtagctcggagtactttgattgtctgaagccttcttctctcagctcctcaaagtcattttccgtccagctttgttctgttgctggtgaggagctacgttcctttggaggaggagaggcgttctgctttttagagtttccagtttttctgctctgctttttccccatctttgtggttttatctacttttggtctttgatgatggtgacgtacagaagggtttttggtgtggatgtcctttctctttgttagttttccttctaacagacaggacccttagctgcaggtctgttggagtttgctagaggtccactccagaccctgtttgcctgggtatcagcagcggtgtctgtagaacagtggatcttggtgaaccacaaatgctgctgcctgatcgttcctctggaagttttgtctcagaggagtacccagccgtgcgaggtgtcagtctgcccctactgggggatgcctcccagttaggctgcttaggtgtcaaggatccacttgaggaggcagtctgcccattctcagatctccagctgcgtgctgggagaaccactgctctcttcaaggctgtgagacagggacatttaagtctgcagaggttactgctgtctttttgtttgtctgtgccctgcccctagaggtggagcctacagaggcaggcaggcctccttgagctgtggtgggctccactcagttcgagcttcccagctgctttgtttacctaatcaagcctgggcaatggcaggcgcccctcctccagcctcgctgccaccttgcagtgtgatctcagactgctgtgctagcaatcagcgagattccgcgagcataggaccctccgagccaggtgcgggatataatctcctggcatgctgtttttttaagcccgttggaaaagcacagtattagggtgggagtgacccgattttccaggtgccatctgtcacccctttctttgactaggaaagggaactccctgacgccttgtgcttcccgagtgaggcaatgcctcgccctgcttcggctcgcgcacgttgcgctgcacccactgtcctgcacccactgtctggcactccctagtgagataaacccggtacctcagatggaaatgcagaaatcacctgtcttctgtgactctcacgctgggagctgtagaccagagctgttcctattcggccatcttggctccacc

SEQ ID NO: 10395 - DNA, 6082 bp, Homo sapiens
ttttttttgtctttttcttttttttttaatgggttttcttttttatttatttatttatttattttttatactttaagttttagggtacatgtgcacaatgtgcaggttagttacatatgtatatatgtgccatgctggtgcgctgcacccactaactcgtcatctagcattaggtatatctcccaatgctatccctcccccctccccccaccccaccacaggccccagagtgtgtgatattctccttcctgtgtccatgtgacctcattgttcaattctcacctatgagtgagaatatgcggtgtttggttttttgttcttgcgatagtttactgagaatgatgatttccaatttcatccatgtccctacaaaggacatgaactcatcattttttatggctgcatagtattccatggtgtatacgtgccacattttcttaatccagtctatcattggtggacatttgggttggttccaagtctttgctattgtgaataatgccgcaataaacatacgtgtgcatgtgtctttatagcagcatgatttatagtcctttgggtatacacccagtaatgggatggctgggtcaaatggtatttctagttctagatccctgaggaatctccacactgacttccacaatggttgaactagtttacagtcccaccaacagtgtcaaagtgttcctatttctccacatcctctccagcacctgttgtttcctgactttttaatgatcgccattctaactggtgtgagatggtatctcattgtggttttgatttgcatttctctgatggccagtgatgatgagcattttttcatgtgtttggctgcataaatgtcttcttttgagaagtgtctgttcatgtccttgcccactttttgatggggttgtttgtttttttcttgtaaatttgtttgagttcattgtagattctggatattagccctttgtcagatgagtaggttgcgaaaattttctcccattttgtaggttgcctgttcactctgatggtagtttcttttgctgtgcagaagctctttagtttaattagatcccatttgtgaattttgtcttttgttgccattgcttttggtgttttggacatgaagtccttgcccatgcctatgtcctgaatggtaatgcctaggttttcttctagggtttttatggttttaggtctaatgtttaagtctttaatccatcttgaattgatttttgtataaggtgtaaggaagggatccagtttcagctttctacatatggctagccagttttcccagcaccatttattaaatagggaatcctttcccaattgcttgtttttctcaggtatttcaaagatcagatagttgtagatatgcggcattatttctgagggctctgttctgttccattgatctatatctctgttttggtaccagtaccatgctgttttggttaccgtagccttgtagtatagtttgaagtcacgtagtgtgatgcctccagctttgttcttttggcttaggattgccttggcgatgcgggctcttttttggttccatatgaactttaaagtagttttttccaattctgtgaagaaagtcattggtagcttgatggggatggcattgaatctgtaaattaccttgggcagtatggccattttcatgatattgattcttcctacccatgagcgtggaatgttcttccatttgtttgtatcctcttttatttccttgagcagtggtttgtagttctccttgaagaggtccttcacatcccttgtaagttggattcctaggtattttattctctttgaagcaattgtgaatgggagttcactcatgatttggctctctgtttgtctgttgttggtgtataagaatgcttgtgatttttgtacattgattttgtatcctgagactttgctgaagttgcttatcagcttaaggagattttgggctgagacaatggggttttctagatatacaatcatgtcatctgcaaacagggacaatttgacttcctcttttcctaattgaataccctttatttccttctcctgcctaattgccctggccagaacttccaacactatgttgaataggagtggtgagagaggacatccctgtcttgtgccagttttcaaagagaatgcttccagtttttgcccattcagtatgatattggctgtgggtttgtcatagacagttcttattattttgaaatacgtcccatcaatacctaatttattgagagtttttagcatgaagtgctgttgaattttgtcaaaggctttttctgcatctattgagataatcatgtggtttttgtctttggctctgtttatatgctggattacatttattgatttgcgtatattgaaccagccttgcatcccagggatgaagcccacttgatcatggtggataagctttttgatgtgctgctggatttgttttgccagtattttattgaggatttttgcatcaatgttcatcaaggatattggtctaaaattctcttttctggttgtgtctctgcccggctttggtatcagaatgatgctggcctcataaaatgagttagggaggattccctcattttctattgattggaatagtttcagaaggaatggtaccagttcctccttgtacctctggtagaattcggctgtgaatccatctggtcctggactctttttggttggtaaactattgattattgccacaatttcagctcctattattggtctattcagagattcaacttcttcctggtttagtcttgggagagtgtatgtgtcgaggaatttatccatttcttctagattttctagtttatttgtgtagaggtgtttgtagtattctctgatggtagtttgtatttctgtgggatcggtggtgatatcccctttatcatttttttattgtgtctatttgattcttctctctttttttctttattagtcttgctagtggtctatcaattttgttgatcctttcaaaaaacagctcctggattcattaattttttgaagggttttttgtgtctctatttccttcagttctgctctgattttagttatttcttgccttctgctagcttttgaatgtgtttgctcttgcttttctagttcttttaattgtgatgttagggtgtcaattttggatctttcctgctttctcttgtgggcatttagtgctataaatttccctctacacactgctttgaatacgtcccagagattctggtatgttgtgtctttgttctcgttggtttcaaagaacatctttatttctgctttcattgcgttatgtaaccagtagtcattcaggagcaggttgttcagtttccatgtagttgagcagttttgagtgagattcttaatcctgagttctagtttgattgcactgtggtctgagagatagtttgttataatctctgttcttttacatttgctgaggagagctttacttcccagtatgtggtcaattttggaataggtgtggtgtggtgctgaaaaaaatgtatattctgttgatttggggtggagagttctgtagatgtctattaggtccgcttggtgcagagctgagttcaattcctaggtatccttgttgactttctgtctcgttgatctgtctaatgttgacagtggggtgttaaagtctcccattattaatgtgtgggagtctaagtctctttgtaggtcactcaggacttgctttatgaatctgggtgctcctgtattcagtgcatatatatttaggatagttagctcttcttgttgaattgatccctttaccattatgtaatggccttctttgtctcttttgatctttgttggtttaaagtctgttttatcagagactaggattgcaacccctgcctttttttgttttccatttgcttggtagatcttcctccatccttttattttgagcatatgtgtgtctctgtacgtgagatgggtttcctgaatacagcacactgatgggtcttgactctttatccaatttgccagtctgtgtcttttaattggagcatttagtccatttacatttaaagttaatattgttatgtgtgaatttgatcctgtcattatgatgttagctggtgattttgctcgttggttgatgcagtttcttcctagtctcgatggtctttacattttggcatgattttgcagcggctggtaacggttgttcctttccatgtttagcgcttccttcaggagctcttttagggcaggcctggtggtgacaaaatctctcagcatttgcttgtctgtaaagtattttatttctccttcacttatgaagcttagtttggctggatatgaaattctgggttgaaaattcttttctttaagaatgttgaatattggcccccactctcttctggcttgtagggtttctgccgagagatctgctgttagtatgatgggcttccttttgagggtaacccgacctttctctctggctgcccttaacattttttccttcatttcaactttggtgaatctgacaattatgtgtcttggagttgctcttctcgaggagtatctttgtggcattctctgtatttcctgaatctgaacgttggcctgccttgctagattagggaagttctcctggataatatcctgcagagtgttttccaacttgtttccattctccccatcactttcaggtacaccaatcagacgtagatttggtcttttcacatagtcccatatttcttggaggctttgctcatttctttttattcttttttctctaaacttcctttctcgcttcatttcattcatttcatcttccatcgctgataccctttcttccagttgatcacatcggctcctgtggcttctgcattcttcacgtagttctcgagccttggttttcagctccatcagttcctttaagcacttctctgtattggttattctagttatacattcttctaaatttttttcaaagttttcaacttctttgcctttggtttgaatgtcctcccatagttcagagtaatttgatcgtctgaagccttcttctctcagctcgtcaaagtcattctccatccagctttgttccgttgctggtgaggaactgcgttcctttggaggaggagaggcgctctgcgttttagagtttccagtttttctgttctgttttttccccatctttgtggttttatctacttttggtctttgatgatggtgatgtacagatgggtttttggtgtggatgtcctttctgtttgttagttttccttctaacagacaggaccctcagctgcaggtctgttggaataccctgccgtgtgaggtgtcagtgtgcccctgctggggagtgcctcccagttaggctgctcgggggtcaggggtcagggacccacttgaggaggcagtctgcccgttctcagatctccagctgcgtgctgggagaaccactgctctcttccaagctgtcagacagtgacatttaagtctgcagaggttactgctgtctttttgtttgtctgtgcccttcccccagaggtggagcctacagaggcaggcaggcctccttgagctgtggtgggctccacccagttggagcttccgggctgctttgtttacctaagcaagcctgggcaatggcgggcgcccctcccccagcctcgctgccgccttgcagtttgatctcagactgctgtgctagcaatcagcgagactccatgggtgtaggaccctccgagccaggtgcgggatataatctcgtggtgcgccgttttttaagcaggtccaaaaagcgcaatattcgggtgggagtgacctgattttccaggtgcgtccgtcacccctttctttgactcagaaagggaactccctgaccccttgcgcttcccaagtgaggcaatgcctcgccctgcttcggctcgcgcacggtgcgcgcacccactgacctgcgcccactgtctggcactccctagtgagatgaacccggtacctcagatggaaatgcagaaatcacccgtcttctgcgtcgctcacgctgggagctgtgtaccggagctgttcctattcggccatcttggctcctccccca

SEQ ID NO: 10396 - DNA, 6062 bp, Homo sapiens
tttcttttttttttaattttattttattattattttttcttttattattatactttaagttttagggtacatgtgcacattgtgcaggttagttacatatgtatacatgtgccatgctggtgcgctgcacccactaactcgtcatctagcattaggtatatctcccagtgctatccctcccccctccccccaccccacaacagtccccagagtgtgatgttccccttcctgtgtccatgtgatctcattgttcaattcccacctatgagtgagaatatgcattgtttggttttttgttcttgcgatagtttactgagaatgatgatttccaatttaatccatgtccctacaaaggacatgaactcatcattttttagggctgcatagtattccatggtgtatatgtgccacattttctgaatccagtctatcattgttggacatttgggttggttccaagtctttgctattgtgaatagtgccgcaataaacatacgtgtgcatgtgtctttatagcagcatgatttctagtcctttgggtatatacccagtaatgggatggctgggtcaaatggtaattctagttctagatccctgaggaatcgccacactgacttccacaatggttgaactagtttacagtcccaccaacagtgtaaaagtgttcctatttctacacatcctctccagcacctgttgtttcctgactttttaatgattgccattctaactggtgtgagatggtatctcattgtggttttgatttgcatttctctgatggccagtgatgatgagcattttttcatgtgttttttggctgcataaatgtcttcttttgagaagtgtctgttcatgtcctttgcccactttttgatggggttgtttgtttttttcttgtaaatttgtttgagttcattgtagattcttgatattagccctttgtcagatgagtaggttgcgaaaattttctcccattttgtaggttgcctgttcactctgatggtagtttcttttgctgtacagaagctctttagtttaattagatcccatttgtcaattttggcttttgttgccattgcttttggtgttttagacatgaagtccttgcccatgcctatgtcctgaatggtaaagcctaggttttcttctagggtttttatggttttaggtctaacgtttaagtctttaatccatcttgaattgatttttgtataaggtgtaaggaagggatccagtttcagctttctacatatggctagccagttttcccagcaccatttattaaatagggaatcctttccccattgcttgtttttctcaggtttgtcaaagatcagatagttgtagatatgcggcgttatttctgagggctctgttctgttccattgatctatatctctgttttggtaccagtaccatgctgttttggttactgtagccgtgtagtatagtttgaagtcaggtagtgtgatgcctccagctttgttcttttggctcaggattgacttggcgatgcgggctcttttttggttccatatgaactttaaagtagttttttccaattctgtgaagaaaggcattggtagcttgatggggatggcattgaatctgtaaattaccttgggcagtatggccattttcacgatattgattcttcctacccatgagcatggaatgttcttacatttgtttgtatcctcttttatttccttgagcagtggtttgtagttctccttgaagaggtccttcacatcccttgtaagttggattcctaggtattttattctctttgaagcaattgtgaatgggagttcactcatgatttggctctctgtttgtctgttgttggtgtataagaatgcttggatttttgtacattgattttgtatcctgagactttgctgaagttgcttatcagcttaaggagattttgtgctgagacaatggggttttctagatatacaatcatgtcgtctgcaaagagggacaatttgacttcctcttttcctaactgaataccctttatttccttctcctgcctaattgccctggccagaacttccaacactatgttgaataggagtggtgagagagggcatccctgtcttgtgccagttttcaaagggaatgcttccagtttttgcccattcagtatgatattggctgtgggtttgtcatagatagctcttattattttgaaatatgtcccatcaatacctaatttattgagagtttttagcatgaagggttgttgaattttgtcaaaggccttttctgcatctattgagaaaatcatgtggtttttgtctttggctctgtctatatgctggattacatttattgatttgcatatattgaaccagccttgcatcccagggatgaagcccacttgatcatggtggataagctttttgatgtgctgctggattcgtttggccagtattttattgaggatttttgcatcaatgttcatcaaggatgttggtctaaaattctcttttttggttgtgtccctgccaggctttggtatcagaatgatgctggcctcataaaatgagttagggaggattccctctttttctattgattggaatagtttcagaaggaatggtaccagttcctccttgtacctctgatagaattcagctgtgaatccatctggtcctggactctttttggttggtaagctattgattattgccacaatttcagatcctgttattggtctattcagagattcaacttcttcctggtttagtcttgggagagtgtatgtgtcgatgaatttatccatttcttctagattttctagtttatttgggtagaggtgtttgtagtattctctgattgtagtttgtatttctgtgggatcggtggtgatatcccctttatcattttttattgcatctatttgattcttctccctttttttctttattagtcttgctagcagtctatcaattttgttgatcctttcaaaaaaacagctcctggattcattaattttttgaagggttttttgtgtctctatttccttcagttctgctctgattttagttatttcttgccttctgctagcttttgaatgtgtttgctcttgcttctctagttcttttaattgtgatgttagggtgtcaattttggatctttcctgctttctctggtgggcatttagtgctataaatttccctctacacactgctttgaatgcgtcccagagattctggtatgttgtgtctttgttcttgttggtttcaaagaacatctttatttctgccttcatttcgttatgtacccagtagtcattcaggagcaggttgttcagtttccatgtagttgagcggttttgagtgagattcttaatcctgagttctagtttgattgcactgtggtctgagagatagtttgttataatttgtgttcttttacatttgctgaggagagctttacttccaagtatgtggtcaattttggaataggtgtggtgtggtgcagaaaaaaatgtatattctgtggatttggggtggagagttctgtagatgtctattaggtccgcttggtgcagaggtgagttcaattcctgggtatccttgttgactttctgtctcgttgatctgtctaatgttgacagtgtggtgttaaagtctcccattattaatgtgtgggagtctaagtctctttgtaggtcactaaggacttgctttatgaatctgggtgctcctgtattgggtgcatatatatttaggatacttagctcttcttgttgaattgatccctttaccattatgtaatggccttctttgtctcttttgatctttgttggtttaaagtctgttttatcagaaactaggattgcaacccctgcctttttttgttttccatttgcttggtagatcttcctccatccttttattttgagcctatgtgtatctctgcacatgagatgggtttcctgaatacagcacactgatgggtcttgactctttatccaatttgccagtctgtgtcttttaattggagcatttagtccatttacatttaaagttaatattgttatgtgtgaatttgatcctgtcattatgatgttagctggtgattttgcttgttagttgatgcagtttcttcctagtctcgatggtctttacattttggcatgattttgcagcagctgacaccggttgtccctttccatgtttagcacttccttcaggagctcttttagggcaggcctggtggtgacaaaatctctcagcatttgcttgtctgtaaagtattttatttctccttcacttatgaagcttagtttggctggatgtgaaattctgggttgaaaattctttcctttaagaatgttgaatattggcccccactctcttctggcttgtagggtttctgctgagagatccgctgttagtctgatgggcttccctttgagggtaacccgacctttctctctggctgcccttaacattttttccttcatttcaactttggtgaatctgataattatgtgtcttggagttgctcttctcgaggagtatctttgtggtgttctctgtatttcctgaatctgaacgttggcctgccttgttagattggggaagttctccgggataatatcctgcagagtgttttccaacttggttccattctccccgtcactttcaggtacaccaatcagacgtagatttggtcttttcacatagtcccatatttcttggaggctttgctcatttctttttattcttttttctctaaacttcccttctcacttcatttcattcatttcatcttccattgctgataccctttcttccagttgatcgcatcggctcctgaggcttctgcattcttcatgtagttctcgagccttggttttcagctccatcagctcctttaagcacttctctgtattggttattctagttatacattcttctcaatttttttcaaagttttcaacttctttgcctttggtttgaatgtcctcccatagctcagagtaatttgatcgtctgaagccttcttctctcagcttgtcaaagtcgttctccgtccagctttgttctgttgctggtgaggaactgtgttcctttggaggaggagaggcgctctgctttttagagtttccagtttttctgttctgttttttccccatctttgtggttttatctacttttggtctttgatgatggtgatgtacagatgggtttttggtgtggatgtcctttctgtttgttagttttccttctaacagacaggaccctcaggtgcaggtctgttggagtaccctgccgtgcgaggtgtcagtgtgcccctgctgtggggtgcctcccagttaggctgctcgggggtcaggggtcaggtacccacttgaggaggcagtctgcccgttctcagatctccagctgcgtactgggacaaccactgctctcttcaaagctgtcagacagggacatttaagtctgcagaggttactgctgtctttttgtttgtctgtgccctgcccccagaggtggagcctacagaggcaggcaggcctccttgagctgtggtgggctccacccagttcgagcttcccggctgctttgtttacctaagcaagcctgggcaatggcgggcgcccctcccccagcctggctgctgccttgcagtctgatctcagactgctgtgctagcaatcagtgagactctgtgggcgtaggaccctccctgccaggtgtgggatataaactcgcgctgcgccgttttttaagcccgtcggaaaagcgcagtattcgggtgggagtgacccgattttccaggtgagtccgtcacccctttctttgactcggaaagggaactccctgaccccttgcgcttccggagtgaggcaatgcctcgccctgcttcggctcgcgcacggtgggcgcacccactgacctgtgcccactgtctggcactccctactgagatgaacctggtacctcagatggaaatgcagaaatcacccgtcttctgcgtcgctcacgctgggagctgtagaccggagctgttcctattcggccatcttggctcctccc

SEQ ID NO: 10397 - DNA, 5807 bp, Homo sapiens
tttaccatctttttattattattattaaagttctagggtacatgtgcacaacgtgcaggtttgttacatatgtatacatgtaccatgttggtgtgctgcacccattaactcgtcatttagcatttggtatatcacctaatgctatccctcccccctcccccctccccccaccccacagcagtgcccggtgtgtgatgttccccccttcctgtgtccatgtgttctcattgttcagttcccacctatgagtgaaaacgtggtgtttggttttttgtccatgcgatagtttgctgagaatgatggtttccagcttcatccatgtccctacaaaggacatgaactcatcattttttatggctgcatagtattccatggtgtatatgtgccccattttcttaatccagtctatcattgttggacatttgggttggctccaagtctttgctattgtgaatagtgccacagtaaacatatgtgtgcatgtgtctttatagcagcatgatttataatcctttgggtatatacccagtaatgggatggctgggtcaaatggtatttctagttctagatccctgagaaatcgccacaccgacttccacaatggttgaactagtttacagtcccaccaacagtgttaagtgttcctatttttccacatcctctccagcacctgttgtttcctgactttttaatgatcgccattctaactggtgtgagatggtatctcattgtggttttgatttgcaattctctgatggccagtgatgatgagcattttttcatgtgttttttggctgcataaatgtcttcttttgagaagtgtctgttcatgtccttcgcccactttttgatggggttgtttgtttttttcttgtaaatttgtttgagttctttgtagattctggatattagccctttgtcagatgagtaggttgcaaaaattttctcccattctgtaggttgcctgttcactctgatggtggcttcttttgctgtgcagaagctctttagtttaattagatcccattggtcaattttggcttttgttgccattgcttttggtgttttagacatgaagtccttgcccatgcctatgtcctgaatggtattgcctaggttttcttctagggtttttatggttttaggtctaacacgtaagtctttaatccatcctgaattaattttttgtataaggtgtaaggaagggatccagtttcagctttctacatatggctagtcagttttcccagcaccatttattaaataggcaatcctttccccatttcttgtttttgtcaggtttatcaaagatcagatagttgtagatatgaggcattatttctgagggctctgttctgttccattggtctatatctctgttttggtaccagtaccatgctgttttggttactgtagccttgtagtatagtttgaagtcaggtagtgtgatgcctccagctttgttcttttggcttaggattgacttggcaatgtgggctcttttttgattccatatgaactttaaagtagtttttttccaattctgtgaagaaagtcattggtagcttgatggggatggcattgaatctataaattaccttgggcagtaaggccattttcatgatattgattcttcctacccatgagcatggaatgttcttccatttgtttgtatcctcttttatttcattgagcagtggtttgtagttctccttgaagaggtccttcacatcccttgtaagttggattcctagctattttattctctttgaagcaattgtgactgggagttcactcatgatttggctctctgtttgttattggtgtataagaatgcttgtgatttttgcacattgattttgtatcctgagactttgctgaagttgcctatcagcttaaggagattttgggctgagacgatggggttttctagatatacaatcacatcatctgcaaacagggacaatttgacttcctcttttcctaactgaatgccctttatttccttctcctgcctgattgccctggcccgaacttctgacactgtgttgagtaggagtggtgagagagggcatcctgtcttgtgccagttttcaaagggaatgcttccagtttttgtccattcggtatgatattggctgtaggtttgtcatagatagctcttattattttgagatacgtcccatcaatacctaacttattgagagtttttagcatgaagggttgttgaattttgtcaaaggccttttctgcatctattgagataatcatgtggtttttgtctttggttctgtttatgtgctggattacgtttattgattacgtttattgcatcccagggatgaagcccacttgatcatggtggataagctttttgatgtgttgctggattcgatttgccagtattttattgaggatttttgcatcaatattcatcagggatattggtctaaaattctctttttttgttgtgtctctgccaggctttggtatcaggatgatgctggcctcataaaatgcgttagggaggattccctctttttctattgattggaatagtttcagaaggaatggtaccagctcctccttgtacctctggtagaattcggctgtgcatccatctggtcctggactttttttggttggtaagctattaattattgcctcaatttcagagcctgttattggtctattcagagattcaacttcttccttgtttagtcttgggagagtgtatgtgttgaggaatttatccatttcttctagattttctagtttatttgcgtagaggtgtttatagtattctctaatggtagtttgtatttctgtgagatcggtggtgatatcccctttgtcattttttattgcgtctatttgattcttctctcttttcttctttgttagtcttgctagcggtctaacaattttgttgatcttttcaaaaaaccagctcctggattcattaattttttgaagggtctttttgtgtctctatttccttcagttctgctctgatcttcgttatttcttgccttctgctagcttttgaatgtgtttgctcttgcttctctagttcttttaattgtgatgttagggtgtcaattttagatctttcctgctttctcttgtgggcatttagtgctataaatttccctctacacactgctttgaatgtgtcccagagattctggtatgttgtgtctttggtctcattggtttcaaagaacatctttatttctgccttcatttcgttatgtacccagtagtcattcaggagcaggttattcagtttccatgtagttgagcggttttgagtgagtttcttaatcctgagttctagtttgactgcaccatggtctgagagacagtttgttataatttctgttcttttacatttgctgagaagtgctttacttccaactatgtggtcaattttggaataggtgtggtgtggtgctgaaaagaatgtatattctgttgatttggggtggagagttctgtagatgtctattaggtctgcttggtgcagagctgagttcaattcctggatatccttgttaagtttctgtctcattgatctgtctaatgttgacagtggggtgttaaagtctcccattattattgtttgggagtctaagtctctttgtaggtcactaaggacttgctttatgaatctggatgctcctgtattgggtgcatatatatttaggatagttagttcttcttgttgaattgatccctttaccattatgtaatggccttctttgtctcttttgatctttgttggtttaaagtctgttttatccgagactaggattgcaacccctgcctttttttgttttccatttgcttggtagatcttcttccatccatttgttttgagcctatgtgtgtctctgcatgtaagatgggtttcctgaatacagcacactgatgggtcttgactctttacccaatttgccagtctgtgccttttaattggagcatttagcccatttacatttaaggttagtattgttatgtgtgaatttgatcctgtcattatgatgttagctggttattttgcttgttagttgatgcagtttcttcctagccttgatggtctttacaatttggcatgtttttgcagtggctggtaccggttgttcctttccatgtttagtgctcccttcaggagctcttttagggcaggcctggtggtgacaaaatctctcagcatttgcttgtctgtaaagtattttatttctccttcacttatgaagcttagtttggctggatatgaaattctgggttgaaaattcttttctttaagaatgttgaatattggcccccactctcttctggcttgtagagtttctgctgagagatcagctgttagtctgatgggcttccctttgtgggtaacccgacctttctctctggctgcccttaacattattcccttcatttcaactttggtgaatctgacaattatgtgtcttggagttgctcttcttgaggagtatctttgtggcattctctgtatttcctgaatttgaatgttggcctgccctgctagattggggaagttctcctggataatatcctgaagagtgttttccaacttgtttccattctccccgtcactttcaggtacaccaattagatgtagattttgtcttttcacatagtcccatatttcttggaggctttgttcgtttctttttattcttttttctctaaacttctcttcatacttcatttcattcattttgtcttccatcgctgataccctttcttccagttgatcgcatcggctactgaggcttgtggattcgtcacagagttctcgtgccatggttttcagctccatcaggtcctttaaggacttctctgcattggttattctagttatccattcgtcttaattttttttcaaagtttttaacttctttgccattggttctaacttcctcctttaattcagagtagtttgatcttctgaagccttcctctctcaactcgtgaaatcattctccatccagctttgttctgttgctggtgaggagctgcgttcctttggaggaggagaggcactctgatttttagagtttccggtttttctgctctgttttttgcccatctttgtggttttatctacctttggtctttgatgatggtgacgtacagatgggtttttggtgtggatgtcctttctgtttgttagttttccttctaacaatcaggaccctcagctgcaggtctgttggagtttactggaggtccactccagaccctgtttgcctgggtatcagcagtggtggctgcagaacagcggatattggtgaactgcaaatgctgctgcctgatcgttcttctggaatttttgtctcagaggagtacccggccgtgtgaggtgtcagtccgcccctacttgggggtgcctcctagttaggctactcgggagtcagggacccacttgaggaggcggactgcctgttctcagatctcaagctgcatgctgggagaaccactactctcttcaaagctgtcagacagggacatttaagtctgcagaggttattgctgtcttttgtttgtctgtgccctgcccccagaggtggagcctacagaggcaggcaggcctccttgagctgtggtgggctccacccagttcgagcttcccagccactttgtttaactattcaaggctgagcaatggcgggcgcccctcccccagccttgctgccgccttgcagtttgatctcagactgctgtgctagcaatgagcaaggctccatgggcgtaggaccctctcagccaggtgc

SEQ ID NO: 10398 - DNA, 5870 bp, Homo sapiens
tttgtttattctttattttgtagacgtaatttttttttcatttattttctttcttttttttattattattatgctttaagttttagggtacatgtgcacaatgtgcaggttagttacatatgtatacatgtgccatgctggtgtgctgcatccattaactcgtcatttagcattaggtatatctcctaatgctatccctccccactccccccaccccacaacagtccccagagtgtgatgttccccttcctgtgtccatgtgttctcattgttcaattcccatctatgagtgagaacatgaagtgtttggttttttgtccttgcgatagtttgctgagaatgatgatttccaatttcatccatgtccctacaaaggacatgaactcatcattttttatggctgcataatattccatggtgtatatgtgccacattttcttaatccagtctatcattgttggacatttgggttggttccaagtctttgctattgtaaatagtgccacaataaacatacatgtgcatgtgtctttacagcagcatgatttatagtcctttgggtatatacccagtaatgggatggctgggtcaaatggtatttccagttctagatccctgaggaatcgccacactgacttccacaatggttgaactagtttacagtcccaccaacagtgtaaaagtgttcctatttctccacatcttctccagcacctgttgtttcctgactttttaatgattgccattctaactggtaagagatggtatctcattgtggttttgatttgcatttctctgatggccagtgatggtgaacatttttccatgtgtcttttggctgcataaatgtcttcttttgagaagtgtctgttcatatcctttgaccactttttgatggggttgtttgtttttttcttgtaaatttgtttgagttcattgtagattctggatattagccctttgtcagataactaggttgtgaaaattttctcccattttgtaggttgcctgttaactctgatggtagtttattttgctgtgcagaagctctttagtttaattagatcccatttgtcaattttggcttttgttgccattgcttttgctgttttagatatgaagtccttgcctatgcttatgtcctgaatggtaatgcctaggttttcttctatggtttttatgtttttaggtctaacatttaagtctttaatccatctttaattaatttttgtataagctgtaaagaagggatccagtttcagctttatacatatggctagctagtttgcccagcaccatttattgaacagggaatcctttccccattgcttgtttttctcaggtttgtcaaagatcagatggttgtagatatgtggcattatttctgagggctctgttctgctccattgatctatatctctgttttgataccagtaccatgctgttttggttactgtagccttgtagtatagtttgaagtcaggtaatgtgatgcctccagctttgcacttttggcttaggattgattttgtgatgcagggtcttttttggttccatatgaactttaaagtagttttttccaattctgtgaagaaaatcattggtagcttgatggggatggcattgaatctataaattactgtgggcaatatggccattttcacgatattgattcttcctacccatgagcatgtaatattcttccatttgtttgtatcctcttttatttcattgaggtttgtagttctccttgaagaggtccttcacgtcccttgtaagttggattcctagatattttactctttttgaagcaattgtgaatggaattcactcatgatttggctctctgtttgtctgttattagtgtataagaatgcttgtgatttttgtacattgattttgtatcctgagactttgctgaagttgcttatcagcttaaggagattttgggctgagacaatggggttttctagatatacaatcatgtcgtctgaaaacagggataatttgactttctcttttcctaattgaatacccttgatttccttctcctgcctgattgccctggccagaacttccaacactatgttgaataggagtggtgagagagtgcatccatgtcttgtgccagttttcaaagggaatgcttccagtttttgcccattcagtatgatattggctgtgggtttgtcatagatagctcttagtattttgagatacgtcccatcagtacctaatttattgagagtttttagcatgaagagttgttgaattttgtcaaaggccttttctgcatctgttgagataatcatgtggtttttgtctttgattctgtttatatgctggattacatttattgatttgcttatattgaacgagccttgcatcccagggatgaagcccacttgatcatggtggataaggttttggatgtgctgctagattcggtttgccagtattttattgaggatttttgcatcaatgttcatcaaggatattggtctaaaattctctttttttgttgtgtctctgcctggctttggtatcagaatgatgctggcctcataaaatgagttagggaggattccctctttttctattgattggaatagtttcagaaggaatggtaccagttcctccttgtacctctgatagaattcggctgtgaatccatctggtcctggactcttttttgttggtaagctattgattattgccacaatttcagatcctgttattggtctcttcagagattcagcttcttcctggtttagtcttgggagagtgtatgtgtcgaggaatttatccatttcttctagattttctagtttatttgcatagaggtgtttgtagtattctctgatggtagtttgtatttctgtgggattggtggtgatatcccctttatcattttttattgtgtctattttactgttctctctttttttctttattagtcttgctagcggtctatcagttttgttgatcctttcaaaaaaccagctcctggattcattaactttttgaagggttttttgtgtctctatttcctgcagttctgctctgattttagttatttcttgccttctgctagcttttgaatgtttgcacttgcttttctagttctttttattgtgatgttagggtgtcaattttggatgttttctgctttctcttgtgggcatttagtgctataaatttctctctacacactgctttgaatgtgtgccagagattctggtatgttgtgtctttgttctccttggtttcaaagaacacctttatttctgccttcatttcgttatgtacccagtagtcattcaggagcaggttgttcagtttccatgtagttgagctgttttgagtgagtttcttaatcttgagttctagtttgatttcactgtggtctgagagacagtttgttatgaatttctggtcttttacatttgttgaagagagctttacttccaactatgtgtgttcaattttggaataggtgtggtgtggtgtagtactgaaaaaaatgtatattctgttgatttggggtggagagttctgtagatgtctattaggtccgcttggtgcagagctgagttcgattcctgggcatccttgttaactttctttctgattgatctgtctaatgttgacagtggggtgttaaagtctcccattattattgtgtgggagtctaagtctctttgtaggtcactcaggacttgctttataaatctgggtgctcctgtattgggtgcatatatatttaggatagttagctcttcttgttgaattgatacctttaccattctgtaatggccttctttgtctcttttgatctttgttggtttaaagtctgttttatcagagactaggattgcaacctctgcctttttttgttttcaatctgcttggtagatcttcctccatccttttatttggagcctatgtgtttctctgcatgggagatgggtttcctgaatacagcacactgatggatgttgactctttaaccaatttgccagtctgtgtcttttaattggagcatttagtccatttatatttaaagttaatattgttatgtgtgaatttgatcctatcattatgatgttagctggttattttactcattagttgatgcagtttcttcctagtctcgatggcctttacattttggcttgattttgtagtggctggtaccggttcctttccatgtttagtgcttctttcaggagctcttttagggcaggcctggtggtgacaaaatctctcagcatttgcttgtctgtaaagtattttatttctcctttacttatgaagcttagtttgcctggatatgaaattctgggatgacaattcttttctttaggaatgtcgaatattggcccccactctcttctggcttgtagagtttctgctgagagatccgctgttggtctgatgggcttccctttgtgggtaacccgacctttctctctggctgcccttaacattttttccttcatttcaactttggtgaatctgacaattatgtgtcttggagttgctcttctcgaggagtatctttgtggcattctctgtatttcctgaatctgagtgttggcctgccttgctagattggggaagttctcctggataatgccctgcagagtgttttccacctcggttccattctccctgtcactttcaggtacaccaagcagacatagatttggtcttttcacatagtcccatatttcttggaggctttgttcatttctttttattcttttttctctaaacttcccttcttgcttcatttcattcatttcatcttccatcactgataccctttcttccagttgattgcatcagctcctgaggcttctgcattcttcacgtagttctcgagtcttggctttcagctccatcagctcctttaagcacttctctctattgattattctagttatacattcatctagatttttttcaaaattttcaacttctttgcctttggtttgaatttcctcctgtggattgtagtagattgatcgtctgaagccttcttctctcaacttatcaaagtcattctccatccagctttgttccgttgctggtgaggaactgtgttcctttggaggaggagaggcactctgctttttagagcttccagtttttctgctctgttttttccccatctttgtggttttatcttcttttggtctttgatgctggtgatgtgcagatgggtttttggtgtggatgtcctttctgtttgttagttttccttctaacagacaggaccctcagctgcaggtctgtttgagtttgctagaggtccactccagaccctgtttgcctgggtatcagcagcggtgtctgcagaacagagaattttcatgaaccgtgaatgctgttgtctgatcgtttctccggaagttttgtcccagaggagtacccggctgtgtgaggtgtcagtctgtccctattagggggtgccttccagttaggctgctcgggggtcaggggtcagggacccacttgaggaggcagtctgcccattctcagatctccagccgcgtgctgggagaaccactgctttcttcaaagctgtcaggcaggtacatttaagtctgcagaggttactgctgtctttttgtttgtctgtgccctgcccccagaggtggaacctacagaggcaggcaggcctccttgagctgtggtgggctccacccagttcgagtttcccagctgctttgtttacctaagcaagcccgggcaatggcgggcccccctcccccagccgcactgctgccatgcagtttgagctcagactgctgtgctagcatcagcaagactctgtgggcgtaggaccctctgagccaggtgtg

SEQ ID NO: 10399 - DNA, 5729 bp, Homo sapiens
ttcttttttatttatttatttatttatttatttatttatttatttatttatttttatcattatactttaagttttagggtacatgtgcacattgtgcaggttagttacatatgcatacatgtgccatgctggtgcgctgcacccactaactcgtcatctagcattaggtatatctcccaatgctatccctccccgctgcccccacccctccaccgttcccagactgtgatattccccttcctgtgtccatgtgatctcattgttcaattcccacctatgagtgagaatatgcggtgtttggttttttgttcttgcgatagtttactgagaatgatgctttccaatttcatccatgtccctacaaaggacatgaactcatcattttttatgcttgcatagtattccatggtgtatatgtgtcacattttcttaatccagtctatcattgttggacatttgggttggttccaagtctttgctatcgtgaataatgctgcaataaacatacgtgtgcatgtgtctttatagcagcatgatttatagtcctttgggtatatacccagtaatgggatggctgggtcaaatggtatttctagttctagatccctgaggaatcgccacactgacttccacagtggttgaaccagtttacagtcccaccaacagtgtaaaagtgttcctatttctccacatcctctccagcacctgttgtttcctgactttttcatgattgccattctaactggtgtgagatgctatctcattgtggttttgatttgcatttctctgatggccagtgatgagcgttttttcatgtgttttttggctgcataaatgtcttcttttgagaagtgtctgttcatgtccttcgcccactttttgatggggttgtttgattttttcttgtaaatttgtttgagttcattgtagattctggatattaaccctttgtcagatgagtaagttgcgaaaattttctcccattttgtaggttgcctgttcactctgatggtagtttcttttgctgtgcagaagctctttagtttaattagatcccatttgtcaattttgtcttttgttgccattgcttttggtgttttggacatgatgtccttgcccgtgcctatgtcctgaatggtaatgcctaggttttcttctagggtttttatggttttaggtctaacgtttaagtctttaatccaccttgaacatcttgaattgatttttgtataaggtgtaaggaagggatccagtttcagctttctacatatggctagccagttttcccagcaccatttattagatagggaatcctttccccattgcttgtttttgtcaggtttgtcaaagatcagatagttgtagatatgcagcgttatttctgagtgccctgttctgttccattgatctatatctctgttttggtaccagtaccatgctgttttggttactgtagccttttagtatagtttgaagtcaggtagtgtgatgcctccagctttgttcttttgcttaagattgacttggcgatgcaggctcttttttggttccatatgaactttaaagtagttttttccaattctgtgaagcaagtcattggtaccttgatggggatggcattgaatctataaattaccttgggcagtatggccattttcatgatattcattcttcctaaccatgagcatggaatgttcttccatttgtttgtatcctcttttatttccttgagcagtggtttgtagttctcattgaagaggtccttcacatccctggtaagttggattcctatgtattttattctctttgaagcaattgtgaatgggagttcactcatgatttggctctctgtctgtctgttggtggtgtataagaatgcttgtgattttttacattgattttgtatcctgagactttgctgaagttgcttatcagcttaaggagatgttggactgagacaatggggttttctaggtatacaatcatgtcatctgcaaacagggaaaatttgacttcctcttttcctaattgaataccctttatttccttctcctgcctaattgccctggccagaacttccaacactatgttgaataggagtggtgagaaagggcatccctgtcttgtgccagttttcaaagggaatgcttccagtttttgcccattcagtatattggctgtgggtttgtcatagatagtgcttattattttgaaatacgtcccatcaatacctaatttattgagagtttttagcatgaagggttgttgaattttgtcaaaggctttttctgcatctattgagataatcaggtggtttttgtctttggctctgtttatatgctggattacatttattgatctgcatatattgaaccagccttgcatcccaggaatgaagcccacttgatcatggtggataagatttttgatgtgctgctggattcgttttgccatattttattgaggatttttgcatcaatgttcatcaaggatattggtctaaaattctcttttttggttttgtctctgcccggctttggtatcagaatgatgctggcctcataaaatgagttacggaggattccctctttttcattgattggaatagtttcagaaggaatggtaccagttcctccttgtacctctggtagaattcggctgtgaatccatctggtcctggactctttttggttggtaaagtattgattattgccacaatttcagctcctgttattggtctattcagacattcaacttcttcctggtttagtcttgggagagtgtaagtgtcgaggaatttatccatttcttctagattttctagtttatttgcgtagaggtgtttatagtattctctgatggtagtttgtatttctgtgggatcggtggtgatatcccctttataattttttattgtgtctatttgattcttctctctttttttctttattagtcttgctagcggtctatcaattttgttgatcccttcaaaaaaccagctactggattcattaattttttgacgggttttttgtgtctctatttccttcagttctgctctgattttagttatttcttgccttctgctagcttttgaatgtgtttgctcttgcttttctagttcttttaattgtgatgttagggtgtcaattttggatctttcttgctttctcttgtgggcattcagtgctataaatttccctctacacactgctttgaatgcgtcccagagattctggtatattgtgtctttgttctcattggtttcaaagaacatctttatttctgccttcatttcattatgtacccagtagtcattcaggagcagcttgttcagtttccatgtagttgatcggttttgagtgagattcttaatcctgagttctagtttgattgcactgtggtctgagagatagtttgttataatctctgttcttttacatttgctgaggagagctttacttccaagtatgtggtcaattttggaataggtgtggtgtggtgctgaaaaaaatgtatattctgttgatttggggtggagagttctgtagatgtctattaggtccacttggtgcagagctgagttcaattcctgggtatccttgttgaatttctgtctcattgatctgtctgatgttgacattgggtgttaaagtctcccattattaatgtgtgggagtctaagtctctttgtaggtcactcaggacttgctttatgaatctgggtgctcctgtattgggtgcatatatatttaggatagttaactcttcttgttgaattgatccctttaccattatgtaatggccttctttgtctcttttgatctttgttcatttaaagtctgttttatcagagactaggattgcaacctctgcctttttttgttttccatttgcttggtagatcttcctccatccttttattttgagcctatgtgtgtctctgcttgtgagatgggtttcctgaatacagcacactgatggatcttgactctttatccaatttgccagtctgtatcttttaattggagcatttagtccatttacatttaaagttaatattgttatgtgtgaatttgatcctgtcattatgatgttagctggtgattttgctcgttagttgatgcagtttcttcctagtctcgatggtctttatatttgggcatgattttgcagcggctggtactggttctgcctttccatgtttagcgcttccttcgggagctcttttagggcaggcctggtggtgacaaaatctctcagcatttgcttgtctgtaaagtattttatttctccttcacttatgaagcttagtttggctggatatgaaattctgggttgaaaattctttctttaagaatgttgaatattggcccccactctcttctggcttgtaaggtttctgctgagagatctgctgttagtctgatgggcttccctttgagggtaacctgacctttctctctggctgcccttaacattttttccttcatttcaactttggtgaatctgacaattatgtgtcttggagttgctcttctcaaggagtgtctttgtggtgttctctgtatttcctgaatctgaacgttggcctgccttgctagattggggaagttctcctggataatatcctgcagagtgttttccaacttggttccattctccccatcactttcaggtacaccaatcagatgtagatttgatcttttcacatagttccatatttcttggaggctttgctcatttctttttattcttttttctctaaacttcccttctcacttcatttcattcatttcatcttccattgctgataccctttcttccagttgatcgcatcagctcctgaggcttctgcattcttcacgtagttctggagccttggttttcagcttcatccgctcctttaagcacttctctgtattggttattccagttatacattcttctaaatttttttcaaagttttcaacttctttgcctttggtttgaatgtcctcccatagctcagagtaatttgattgtctgaagccttcttctctcagctcgtcaaagtcattctccatccagctttattctgttgctggtgaggaactgtgttcctttggaggaggagaggcactctgcgttttagagtttccagtttttctgttctgctttttcccaatctttgtggttttatctactttggtctttgatgatagtgatgtacagatgtgtttttggtgtggatgtccttcctgtttgttagttttccttctaacagacaggaccctcagctgcaggtctgttggaataccctgccgtgtgaggtgtcagtgtgcccctgctggggggtgcctcccagttaggctgctcgggggtcaggggtcagggacccacttgaggaggcagtctgcccattctcagatctccagctgcgtgctgggagaaccactgctctcttcaaagctgtcagacagggacgtttaagtctgcagaggttactgctgtctttttgtttgtctgtgccctgcccccagaggtggagcctacagaggcaggcaggccttcttgagctgtggtggactccacccagttggagcttcctggatgctttgtttacctaagcaagcctggacaatggtgggcgtccctcccccagcctcgctgccaacttgccgtttgatctcaaactgctgtgctagcaatcagtgagacttcatgggcataggaccctcccagccagg

SEQ ID NO: 10400 - DNA, 5000 bp, Homo sapiens
tatatctcaattatctggaatacatagagtccatttccattttgttgattttcttggtgttttcttattttctagtatgcatcactattttaattttaatgccagacattgtttatgaaaaatggtgaagtaatttgaggcctataatgattttatattcttttgttttattatactttaagttctagggtacaggtgcacaacatgcaggtttgatacataggtatatgtaggccatgttggtttgctgcacccatcaactcgtcatttacattagctttttctcctaatgctattcctcccccacccctccaaccctaacaggccccggtgtgtgatgttccccgccctgtgtccaagtgatctcattgttcaattcccacctatgagtgagaacatgcagtgtttggttttctgtccttgtgatagtttgctgagaatgatggtttccagtttcatccatgtccgtgcaaaggacattaactcatcctttttttatggctgcatagtattccatggtgtatgtgtgccacattttcttaatccagtctatcattgatggacatttgggttggttccaagtctttgctattgtgaatagtgctgcaataaacatatgtgggcatgtgtctttatagtagcatgatttataatcctttgggtatatacccagtaaagggattgctgggtcaattgcaatttctagttctagatccttcagggatcgccacagtgtcttccgcaatggttgaattagtttacactcccaccaacagtgtaaaagcattcctacttctcaacatcctctccagcatctgttgtttcctgactttttaatgattgccattctcactggcgtgagatggtatctcattgtggttttgatttgcatttctctgatgaccagtgatgatgagcattttttcatgtgtcttttggctgcatagatgtcttcttttgagaagtgtctgttcatatcctttgcccactttttgatagggttgtttgtttttttcttgtaaatttgttggagttctttgtagattctggatattagctgtttgtcagatgggtagattgcaaaaatcttctcccattctgtaggttgcctgttcactctgatggtagtttcttttgccgtgaagaagctccttagtttaattagatcccatttgtcaattttggcttttgttgccattgcttttggtgttttagtcatgaagtccttgcccatacctatgtcctgaatggtattgcctaggttttcgtctagggtttttatggttttaggtctaacatgtaagtctttatccatttttgtaattatccaatttttgtataagatgtaaggaagggatccagtttcagctttctacatatggctagccagttttcccagcaccatttattaaatagggaatcctttccccatttcttgtttttgtcaggtttgtcaaagatcagatggttgtagatgtgtggtattatttctgagggctctgttctggtccattggtctatatctctcttttggtaccagtaccatgctgttttggttactgtagccttgtagtatagtttgaagtcaggtagcatgatgcctccagctttgttcttttggcttaggattgtcttggcaatgcaggctcttttttggttccatatgaagtttaaagtagtttttttccaattctgtgaagaaagtcattggtagcttgatggggatggcactgaatgtataaattaccttgggcagtatggccattttcataatattgattcttcctatccatgagcatggaatgttcttccatttgtttgtgtcctcttttatttcattgagcagtggtttgtagttctccttgaagaggtccttcacatcccttgtaagttggattcctaggtattttattctctttgtagcaattgtgaatgggaattcactcatgatttggctctctgtttgtctgttaatggtgtataagaatgcttgtgatttttgcacattgattttgtatcctgagatttgctgaagttgcttatcagcttaaggagattttgggctgagatgatggggttttctaaatatacaatcatgtcatctgcaaacagagacaatttgacttcctcttttgctaattgaataccctttatttctgtctcttgcctgattgccctggccagaactttcaacactatgttgaataggagtggtgagagagggcatccttgtcttgtgccagttttgaaagggaatgcttccagtttttgcccattcagtatgacattggctgtgggtctgtcataaatagctcttattattttgagataagttccatcaatacctagtttattgagagtttttagcatgaagggctgttgaattttgttgaaggccttttctgcatctattgagataatcatgtggtttttgtcgttggttctctttatgtgatggattatgtttattgatttgtgtatattgaaccagccttgcatcccagggatgaagccaacttgatcattgtggataagctttttgatgtgctgctggattcggtttgccagtattttattgaggatttttgcatcgatgttcatcagggatattggtctaaaattctcttttttgttgttgtgtctctgccaggctttggtatcaggatattgttggcctcataaaatgagttaaggaagattccctctttttctattgattggaatagtttcagaaggaatgataccaactgctctttgtacctctggtagaattcagctgtgaatccatctggtcctggactttttttggttggtaggcttttaagtattgcctcaatttcaaagcctattattggtctattcagagattcaacttcttcctggtttagtcttgggagggtgtacatgtccaggaatttatccatttcttctagattttctagttcatttgtgtagaggtgtttatagtattctctgatggtggcttgtatttctgtgggatccatggtgatattccctttatcattttttattgcatctatttgattcttctctcttttcttctttattagtcttgctagtagtgtatcaattttgttgatcttttcaaaaaaccagctcctggattcattgatttttttgaagggttttttgtatctctacctctttcagttctgctctaatcttagttatttcttgccttctgctagcttttgaatttgtttgcgcttgcttctctagttcttttaattgtgatgttgggatgtcaattttaggtctttcctgctttctcttgttgtcatttagtgctatgagtttccctctatacactgctttaaatgtgtcccagagattctggtacattgtgtctttgttctcattgctttcaaagaacatctttatttctgccttcctttcgttttttacccagtagtcattcaggagtaagttattcaatttccatggaattgtgcagttttgagtgagtttcttaatcctgagttctaatttgattgcactgtggtctgagagacagtttgttgtgatttctattcttttacatttgctgaggagtgctttacttccaattatgtggtcaattttagaataagtgtgatgtggtgctgagaagaatgtatattctgttgatttttggtggagagttctgtagatgtctattaggtctgcttggtgcagagctgagttcaactcctggatatccttcttaaccttctatctcgttgatctgtctaatattgacagtggggtgttaaagtctcctattattattgtgtgggagtctaagtctctttgtaggtctctaaggacttgctttatgaatctgggtgctcctgtattgggtgcatatatatttaggatagttagctcttcttgtttaattgatccctttaccattatgtaatggtcttctttgtctcttttgatctttgttgatttaaagtctgttttatcagacactaggattgcaacccctgattttttgttgttttccatttgcttggtagatcttcctccatccctttattttgagccaatgtgcgtctttgcacgtgagatgggtctcctgaataccacacactgatgggtctttactctttatccaatttgccagtctgtgtcttttaattggggcatttagcccatttacatttaaggttaatattgttatatgtgaatttgatcctgtcattatgatgttagctggttattttacctgtcagttgatgcagtttcttcatagcatcgatggtctttacaatttggcatgtttttgcagtggctgatactggttgtttcttgccatgtttagtgctctcttcaggagctcttttagggcagacctggtggtgacaaaatctctcagcatttgcttgcctgtaaaggattttatttcttcttcacttatgaagctcagtttggctggatatgaaattctgggttgaaaagttttttctttaaaaatgttgaatattggcctccactctcttctggcttgtagggtttctgttgagagatccactgttagtttgatgggctttcatttgtaggtaacttgatctttctctctggctgcccttaacattttttccttcatttcaaccttggtgagtctgacaattatgtgtcttggggttgcttttcttgaggagtatatttgtggtgttctctgcatttcctgaatttgaatgttggcctgccttgctaggttggggaaattcttctggataatatcctggagaatgttttccaacttggtttcattctccccatcactttcaggtgcaccaataaaaggtagatttggtcgtttcacatagtcccctacttcttggaggcattgttcatttctttttactctttttttaatctaaccttgtcttctcactttatttcattaatttgaccttcaatcactgatatcttttcttccacttgattgaattggccgttgaagcttatgcatgcatcacgaagttctc

SEQ ID NO: 10401 - DNA, 6039 bp, Homo sapiens
ttttcttttttttttttttttaattatactttaagttttagggtacatgtgcacactgtgcaggttagttacatatgtatacatgtgccatgctggtgcactgcacccactaactcgtcatctagcattaggtatatctcctaatgctatccctcccctctccccccaccccaccacagtccccagagtgtgatattccccttcctgtgtccatgtgatctcactgttcaattcccacctatgagtgagaatatgcggggtttggttttttgttcttgcgatagtttactgagaatgatgatttccaatttcatccatgtccctacaaaggacatgaactcatcattttttatggctgcatagtattccatggtgtatatgtgccacattttcttaatccagtctatcattgttggacatttgggttggttccaagtctttgctattgtgaataatgccacaataaacatatgtgtgcatgtgtctttatagcagcatgatttatagttctttgggtatatacccagtaatgggttggctgggtcaaatggtatctctagttctagatccctgaggaattgccacactgacttccacaatggttgaactagtttacagtcccaccaacagtggaaaagtgttcctatttctccacatcctctccagcacctgttgtttcctgactttttaatgattgccattctaactggtgtgagatggtatctcatagtggttttgatttgcatttctctgatggccagtgatgatgagcatgttttcatgtgttttttggctgcataaatgtcttcttttgagaagtgtctgttcatgtccttcgcccactttttgatggggttgtttgtttttttcttgtaaatttgtttgagttcattgtagattctggatattagccctttgtcagatgagtaggttgcgaaaatgttctcccattttgtaggttgcctgttcactctgatggtagtttcttttgctgtgcagaagctcttcagtttaattagatcccatttgtcaattttgtcttttgttgccattgcttttggtgttttggacatgaagtccttgcccatgcctatgtcctgaatggtaatgcctaggttttcttctagggtttttatggttttaggtctaacgtttaaatctttaatccatcttgaattgatttttgtataagatgtaaggaagggatccagtttcagcttcctacatatggctagccagttttcccagcaccatttattaaatagggaatcctttccccattgcttgtttttctcaggtttgtcaaagttcagatagttgtaggtatgcggcgttttttctgagggctctattctgttccattgatctatatctctgttttggtaccagtaccatgctgttttggttactgtagccttgtagtatagtttgtagtcaggtagtgtgatgcctccagctttgttcttttggcttaggattgccttggtgatgcgggctcttttttggttccatatgaactttaaagtagttttttccaattctgtgaagaaagtcattggtagcttgatggggatggcattgaatctgtaaatgaccttgggcagtatggccattttcacgatattgattcttcctacccatgaacatggaatgttcttccatttgtttgtatcctcttttatttccttgagcagtggtttgtcgttctccttgtagaggtccttcacatcccttgtaagttggattcctaggtattttattctctttgaagcaattgtgaatgggagttcactcctgatttggctctctgtttgtctgttgttggtgtataagaatgcttgtgatttttgtacattgattttatatcctgagactttgctgaagttgcttatcagcttaaggagattttgggctgagacaatggggttttctagatatacaatcacgtcatctgcaaacagggacaatttgacttcctcttttcctgactgaataccctttatttccttctcctgcctaattgccctggccagaacttccaacactatgttgaataggagtggtgagagagggcatccctgtcttgtgccagttttcaaagggaatgcttccagtttttgcccattcagtatgatattggctgtgggtttgtgatagataggtcttattattttgaaatatgtcccatcaatacctaatttatggagagtttttagcatgaagggttgttgaattttgtcaaaggctttttctgcatctattgagataatcatgtggtttttgtctttggctctgtttatatgctggattacatttattgatttgcgtatattgaaccagccttgcatcccagggatgaagcccacttgatcatggtggataagctttttgatgtgctgctggattcagtttgccagtattttattgaggatttttgcatcaatgttcatcaaggatattggtctaaaattctcttttttggttgtgtctctgtccggctttggtatcagaatgatgctggcctcataaaatgcgttagggagaattccctctttttctattgattggaatagtttcagaaggaatggtaccagttcctccttgtacctctggtagaattcggctgtgaatccatctggtcctggaccctttttggttggtaagctattgattattgccacaatttcagctcctgttattggtctattcagagattcaacttcttcctggtttagtcttgggagagtgtatgtgtccaggaatttatccatttcttctagattttctagtttatttgcgtagaggtgtttgtagtattctctgatggtagtttgtatttctgtgggatcggtggtgatatcccctttatcattttttattgtgtctatttgattcttctctctttttttctttattagtcttgctagcggtctatcagttttgttgatcctttcaaaaaaccagctcctggattcattgattttttgaagggttttttgtgtctctatttccttcagttctgctctgattttagttatttcttgccttctgctagcttttgaatgtgtttgctcttgcttttctagttcttttaattgtgatgttagggtgtcaattttggatctttcctgctttctcttgtgggcatttagtggtataaatttccctctacacactgctttgaatgcatcccagagattctggtatgttgtgtctttgttctcgttggtttcaaagaacatctttatttctgccttcattttattatgtacccagtagtcattcaggagcaggttgttcagtttccatgtagtggagcggctttgagtgggattcttaatcctgagttctagtttgattgcactgtggtctgagagatagtttgttataatttctgttcttttccatttgctgaggagagctttacttccaactatgtggtcaattttggaataggtgtggtgtggtgctgaaaaaaatgtatattctgttgatttggggtggagagttctgtagatgtctgttaggtccgcttggtgcagagctgagttcaattcctgggtatccttgttgactttctgtctcgttgatctgtctaatgttgacagtggggtgttaaagtctcccattattaatgtgtgggagtctaagtctctttgcaggtcactcaggacttgctttatgaatctgggtgctcctgtattgggtgcatatatatttaggatagttagctcttcttgttgaattgatccctttaccattatgtaatggccttctttgtctcttttgatctttgttggtttaaagtctgttttatcagagactaggattgcaacccctgcctttttttgttttccatttgcttggtagatcttcctccatccttttattttgagcctatatgtgtctctgcacatgagatgggtttcctgaatacagcacactgatggatcttgactctttatccaattttccagtctgtgtcttttaattggagaatttagtccatttacatttaaagttaatattgttatgtgtgaatttgatcctgtcattatgatgttagctggtgattttgctcgttagttgatgcagtttcttcctagtctcgatggtctttacattttggcatgattttgcagcggctcgtaccggttgttccttttcatgtttagcgcttccttcaggagctcttttagggcaggcctggtggtgacaaaatctctcagcatttgcttgtctgtaaaggattttatttctccttcgcttatgaagcttagtttggctggatatgaaattctgggttgaaaattcttttctttaagaatgttgaatattggcccccactctcttctggcttgtagggtttctgccgagagatccgctgttagtctgatgggcttccctttgagggtaacccgacctttctctctggctgcccttaacattttttccttcttttcaactttggtgaatctgacgattatgtgtcttggagttgctcttctcgaggagtatctttgtggtgttatctgtatttcctgaatctgaacgttggcctgccttgctagattggggaagttctcctggataatatcctgcagagtgttttccaacttggttccattctccccatcactttcaggtacaccaatcagacgtagatttggtcttttcacatagtcccatatttcttggaggctttgctcatttctttttattcttttttctctaaacttcccttctcgcttcatttcattcatttcatcttccatcgctgataccctttcttccagttgatctcatcggctcctgaggcttctgcattcttcacgtagttctcgagccttggttttcagctccatcagctcctttaagcacttctctgtattggttattctagttatacattcttctaaatttttttcaaagttttcaacttctttgcctttggtttgaatgtcctcccgtagctcagagtaatttgatcgtctgaagccttcttctctcagctcgtcaaagtcattctccatccagctttgttccgttgctggtgaggaactgcgttcctttggaggaggagagacgctctgcgttttagagcttccagtttttctgttctgttttttccccatctttgtggttttatctacttttggtctttgatgatggtgatgtccagatgggtttttggtgtggatgtcctttctgtgtgttagttttccttctaacagacaggaccctcagctgcaggtctgttggaataccctgccgtgtgaggtgtcagtgtgcccctgctggggggtgcctcccagttaggctgctcgggggtcaggggtcagggacccacttgaggaggcagtatgcccgttctcagatctccagctgcgtgctgggagaaccactgctctcttcaaagctgtcagacagggacatttaagtctgcagaggttactgctgtctttttgtttgtctgtgccctgtccccggaggtggagcctacaagaggcatgcaggcctccttgagctgtggtgggctccacccagttcgagcttccaggctgctttgtttacctaagcaagcctgggcaatggcgggcgaccctcccccagcctcgctgctgcctggcagtttgatctcagactgctgtgctagcaatcagcgagactccgtgggcgttggaccctccgagccaggtgtgggatatagtctcgtggtgcgccgttttttaagccggcctgaaaagcgcaatatttgggtgggagtgacccgatttccaggtgcgtccgtcacccctttctttgactcggaaagggaactccctgaccccttgtgcttcccaggtgaggcaatgccttgccctgcttcggctcgcgcacggtgcgcgcacccactggcctgcgcccactgtctggcactccctagtgagatgaacccggtacctcagatggaaatgcagaaatcacccgtcttctgcgtcgctcacgctgggagctgtagaccagagctgttcctattcggccatctttgctcctccc

SEQ ID NO: 10402 - DNA, 6052 bp, Homo sapiens
cctgatcttttttttttttttaatttttattttttattatactttaagttttagggtacatgtgcacattgtgcaggttagttacatatgtatacatgtgccatgctggtgcactgcacacactaactcgtcatctagcattaggtatatctcccaatgctatccctcccccctccccccaccccaccacagtccccagagtgtgatattccccttcctgtgtccatgtgatctcattgttcaattcccacctatgagtgagaatatgcggtgtttggttttttgttcttgcgatagtttactgagaatgatggtttccaatttcatccatgtccctacaaaggacatgaactcatcattttttatggctgcatagtattccatggtgtatatgtgccacattttcttaatccagtctatcattgttggacatctgggttggttccaagtctttgctattgtgaataatgccgcaataaacatacgtgtgcatgtgtctttatagcagcatgatttatagtcctttgggtatatacccagtaatgggatggctgggtcaaatggtatttctagttctagatccctgaggaatcgccacactgacttccacaatggttgaactagtttacagtcccaccaacagtgtaaaagtgttcctatttctccacatcctctccagcacctgttgtttcctgactttttaatgattgccattctaactggtgtgagatgatatctcatagtggttttgatttgcatttctctgatggccagtgatgatgagcattttttcatgtgttttttggctgcataaatgtcttcttttcagaagtgtctgttcatgtccttcgcccactttttgatggggttgtttgtttttttcttgtaaatttgtttgagttcattgtagattctggatattagccctttgtcagatgagtaggttgcgaaaattttctcccatgttgtaggttgcctgttcactctgatggtagtttcttttgctgtgcagaagctctttagtttaattagatcccatttgtcaattttggcttttgttgccattgcttttggtgttttggacatgaagtccttgcccacgcgtatgtcctgaatggtaatgcctaggttttcttctagggtttttatggttttaggtctaacgtttaagtctttaatccatcttgaattgatttttgtataaggtgtaaggaagggatccagtttcagctttctacatatggctagccagttttcccagcaccatttattaaatagggaatcctttccccattgcttgtttttctcaggtttgtcaaagatcagatagttgtaggtatgcggcgttatttctgagggctctgttctgttccattgatctatatctctgttttggtaccagtaccatgctgttttggttactgtagccttgtagtatagtttgaagtcaggtagtgtgatgcctccagctttgttcttttggcttaggattgacttggcaatgcgggctcttttttggttccatatgaactttaaagtagttttttccaattctgtgaagaaagtcattggtagcttgatggggatggcattgaatctataaattaccttgggcagtatggccattttcacgatattgattcttcctacccatgagcatggaatgttcttccatttgtttgtatcctcttttatttccttgagcagtggtttgtagttctccttgaagaggtccttcacatcccttgtaagttggattcctaggtattttattctctttgaagcaattgtgaatgggagttcactcatgatttggctctctgtttgtctgttgttggtgtataagaatgcttgtgatttttgcacattgattttgtatcctgagactttgctgaagttgcttatcagcttaaggagattttgggctgagacgatggggttttctagataaacaatcatgtcgtctgcaaacagggacaatttgacttcctcttttcctaattgaataccctttatttccttctcctgcctgattgccctggccagaacttccaacactatgttgaataggagcggtgagagagggcatccctgtcttgtgccagttttcaaagggaatgcttccagtttttgcccattcagtatgatattggctgtgggtttgtcatagatagctcttattattttgaaatacgtcccatcaatacctaatttattgagagtttttagcatgaagggtttttgaattttgtcaaaagctttttctgcatgtattgagataatcatgtggtttttgtctttggctctgtttatatgctggattacatttattgatttgcgtatattgaaccagccttgtatcccagggatgaagcccacttgatcatggtggataagctttttgatgtgctgctggattcggtttgccagtattttgttgaggatttttgcatcaatgttcatcaaggatattggtctaaaattctcttttttggttgtgtctctgcccggctttggtatcagaatgatgctggcctcataaaatgagttagggaggattccctctttttctattgattggaatagtttcagaaggaatggtaccagttcctccttgtacctctggtagaattcggctgtgaatccatctggtcctggactctttttggttggtaaactattgattattgccacaatttcagatcctgttattggtctattcagagattcaacttcttcctggtttagttttgggagagtgtatgtgtcgaggaatgtatccatttcttctagattttctagtttatttgcatagaggtgtttgtagtattctctgatggtagtttgtatttctgtgggatcggtggtgatatcccctttatcattttttattgtgtctatttgattcttctctctttttttctttattagtcttgctagcagtctatcaattttgttgatcctttcaaaaaaccaactcctggattcattgattttttgaagggttttttgtgtctctatttccttcagttctgctctgattttagttatttcttgccttctgctagcttttgaatgtgtttgctcttgcttttctagttcttttaattgtgatgttagggtgtcaattttggatctttcctgctttctcttgtgggcatttagtgctataaatttccctctacacagtgctttgaatgtgtcccagagattctggtatgttgtgtctttgttctcgttggtttcaaagaacatctttatttctgccttcatttcgttatgtacccagtagtcattcaggagcaggttgttcagtttccatgtagttgagcggctttgagtgagattcttaatcctgagttctagtttgattgcactgtggtctgagagatagtttgttataatttctgttcttttacatttgctgaggagagctttacttccaactatgtggtcaattttggaataggtgtggtgtggtgctgaaaaaaatgtatattctgttgatttggggtggagagttctgtagatgtctattaggtccgcttggtgcagagctgagttcaattcctgggtatccttgttgactttctgtctcgttgatctgtctaatgttgacagtggggtgttaaagtctcccattattaatgtgtgggagtctaagtctctttgtaggtcactcaggacttgctttatgaatctgggtgctcctgtattgggtgcatatatatttagtatagttagctcctcttgttgaattgatccctttaccattatgtaatggccgcctttgtctcttttgatctttgttggtttaaagtctgttttatcagagactaggattgcaacccctgcctttttttgttttccatttgcttggtagatcttcctccatccttttattttgagcctatgtatgtctctgcacgtgagatgggtttcctgaatacagcacactgatgggtcttgactctttatccaacttgccagtctgtgtcttttaattggagaatttagtccatttacatttaaagttaatattgttatgtgtgaatttgatcctgtcattatgatgttagctggttattttgctcgttagttgatgcagtttcttcctagtctcgattgtctttacattttggcatgattttgcagcagctggtaccggttgttcctttccatgtttggcgcttccttcaggagctcttttagggcaggcctggtggtgacaaaatctctcagcatttgcttgtctgtaaagtattttatttctccttcacttatgaagcttagtttggctggatatgaaattctgggttgaaaattcttttctttaagaatgttgaatattggcccccactctcttctggcttgtagggtttctgccgagagatctgctgttagtctgatgggcttctctttgagggtaacccgacctttctctctggctgcccttaacattttttccttcatttcaactttggtgaatctgacaattatgtgtcttggagttgctcttctcgaggagtatctttgtggcgttctctgtatttcctgaatctgaacgttggcctgccttgctaggttggggaagttctcctggataatatcctgcagagtgttttccaacttggttccattctccgcatcactttcaggtacaccaatcagacgtaaatttggtcttttcacgtagtcccatatatcttggaggctttgctcatttctttttattcttttttctctaaacttcccttctcgcttcatttcattcatttcatcttccattgctgataccctttcttccagttgatcgcatcggctcctgaggcttctgcattcttcacgtagttctcgagccttggttttcagctccatcagctcctttaagcacttctctgtattggttattctagttatacattcttctaaatttttttcaaagttttcaacttctttgcctttggtttgaatgtcctcccgtagctcagagtaatttgatcgtctgaagcctttttctctcagctcgtcaaaatcattctccatccagctttgttccgttgctggtgaggagctgtgttcctttggaggaggagaggcgctctgcgttttacagtttccagtttttctgttctgttttttccccatctttgtggttttatctacttttggtctttgatgatggtgatgtacagatgggttttcggtgtggatgtcctttctgtttgttatttttccttctaacagacaggaccctcagctgcaggtctgttggaataccctgccgtgtgaggtgtcagtgtgcccctgctggggggtgcctcccagttaggctgctcgggggtcaggggtcagggacccacttgaggaggcagtctgcccgttctcagatctccagctgcatgctgggagaaccactgctctcttcaaagctgtcagacagggacatttaggtctgcagaggttactgctatctttttgtttgtctgtgccctgcccccagaggtggagcctacagaggcaggcaggcctccttgagctgtggtgggctccacccagttcgagcttcctggctgctttgtttacctaagcaagcctgggcaatggggggcgcccctcccccagcctcgctgctgccttgcagtttgatctcagactgctgtgctagcaatcagcgagattccgtgggcgtaggaccctctgagccaggtgtgggatatagtctcgtggtgcgccgttttttaagccggtctgaaaagcgcaatattcgggtgggagtgacccgattttccaggtgcgtccgtcacccctttctttgactcggaaagggaactccctgaccccttgcgcttcccaggtgaggcaatgcctcgccctgcttcggctcgcgcacggtgcgcgcacccactggcctgcgcccactgtctggcactccctagtgagatgaacccggtacctcagatggaaatgcagaaatcacccgtcttctgtgtcgctcacgctgggagctgtagaccggagctgttcctattcggccatcttggctcctccc

SEQ ID NO: 10403 - DNA, 5728 bp, Homo sapiens
tttctttctttttattttttattatactttaagttttagggtacatgtgcacactgcacaggtttgttatatacgtatacatgtgccatgttggtgtgccgcacccattaactcatcatttagcattaggtatatctcctaatgctatccctcccccctccccccaccccacaacaggccccagtgtgtgatgttccctaccctgtgtccaagtgttctcattgttaaattcccacctgtgagtgagaacatgcggtgtttggttttctatccttgcgatagtttgctcagaatgatggtttccagcttcatccatattcctacaaaggacatgaactcatcattttttacggctacatagtattccatggtgtatatatgccacattttcttaatccaatctgtcattgttggacatttgggtaggttccaagtctttgctattgtgaatagtgccacagtaaacatacgtgtgtgtgtgtctttatagcagcatgatttataatcctttgggtatatacccagtaatgggatggctgggtcaaatggtatttctagttctagatccctgaggaatcgccacactgacttccacaatggttgaactagtttacagtcccaccaacagtgtaaaagtgttcctatttctccacatcctctccagcacctgttgtttcctgactttttaatgattgccattctaactggtgtgagacggtatctcattgtggttttgatttgcatttctctgatggccagtgatgatgaacattttttcatgtgtcttttggctgcataaatgtcttcttttgagaagtgtctgttcataccctttgcccactttttgatggggttgtttgtttttttcttgtaaatttgtttgagttcattgtagattctggatattagccctttgtcagatgagtaggttgcaaaaattttctcccattctataggttgcctgttcgctctgatggtagtttattttgctgtgcagaagctctttagtttcattagatcccatttgtcaattttggcttttgttgccattgctttcggtgttttagacatgaagtccttgcccatgcctatgtcctgaatggtattgcctaggttttcttctagggtttttatggttttaggtctaacatttaagtctttaatccatcttgaattaatttttgtataaggtgtaaggaagggatccagtttcagatttctacatatggctagccagttttcccagcaccatttattaaatagggaatcctttccccatttcttgtttttgtcaggtttgtcaaggatcagatagttgtagatatgcggcattatttctgagggctctgttctgttccattggtctatatctctgttttggtaccattaccatgctgttttggttactgtagccttgtagtatagtttgaagtcaggtagtgtgatacctccagctttgttcttttggcttaggattgacttggcaatgtgggctcttttttggttccatatgaactttaaagtagttttttccaattctgtgaagaaagtcattggtagcttgatggggatggcattgaatctgtaaatttccttgggcagtatggccattttcacaatattgattcttcctacccatgagcatggaatgttcttccatttgtttgtatcctcttttatttcatagagcagtggtttgttgttctccttgaagaggtccttcacgtcccttgtaagttggattcctaggtattttattttctttgaagcaattgtgaatgggagttcactcatcatttagctctctgtttgtctgttattagtgtataagaatgcttgtgacttttgcacattgattttgtatcctgagactttgctgaagttgcttatcagcttaaggagattttgggctgagacaatggggttttctagatatacaatcatgtcatctgcaaacagggacaatttgacttcctcttttcctaattgaataccctttattttcttctcctgcctgattgccctggccagaacttccaacactatgttgaataggagtggtgagagagggcatccctgtcttgtgccagttttcaaagggaatgcttccagtttttgcccattcagtatgatattggctgtgggtgtgtcatagatagctcttattattttgagatacgtcccatcaatacctaatttattgagagtttttagcatgaagggctgttgaattttttcaaaggccttttctgcatctattgagataatcatgtggtttttgtctttggttctgtttatatgctggattatgttttttgatttgcatatgttgaaccagccttgcatcccagggatgaagcccacttggtcatggtggataagctttttgatgtgctgctggattcggtttgccagcattttattgaggagttttacatcaatgttcatcacggatattggtctaaaattctctttttttgttgtgtctctgccaggctttggtatcaggatgatgctggcctcataaaatgagttagggaggattccctcttttctgttgattggaatagtttcagaaggaatggtaccagctcctccttgtacctctggtagaattcggctgtgaatccatctggtcctggactttttttggttggtaagctattaattattgcctcgatttcagagcctgttattggtctattcagagattcaacttcttcctggtttagtcttgggagggtgtatgtgtccaggaatttatccatttcttctagattttctagtttatttgcgtagaggtgtttatagtattctctgatggtagtttgtatttctgtgggattggtggtgatatcccctttatcattttttattgcatctatttgattcttctctcttttcttctttattagtcttgctagcagtctatcaattttgttgatcttttcaaaaaaccagcccctggattcattgattttttgaaggtttttttgtgtctctatttccttcagttctgctctgatcttagttatttcttgccttctgctagcttttgaatgtgtttgctcttgcttttctagttcttttaattgtgatgttagggtgtcaattttagatcttccctgctttctcttgtgggcatttagtgctataaatttccctctacacactgctttgaatgtgtcccagagattctggtatgttgtgtctttgttctcattggtttcaaagaacatctttatttctgccttcattttgttatgtacccagtagtcattcaggagcaggttgttcagtttccatgtagttgagcggttttgagtgagtttcttaatcctgagttctagtttgattgcactgtggtctgagagacagtttgttataatttctgttcttttacatttgctgaggagggctttacttccaactatgtggtcagttttggaataggtgtggtgtggtgctgaaaagaatgtatattctgttgatttggggtggagagttctgtagatgtctattaggtccgcttggtgcagagctgagttgaattcctggatatccttgttaactttctgtctcgttgatctgtctaatgttgacagtggggtgttaaagtctcccattattattgtgtgggagtctaagtctctttgtaggtctctaaggacttgctttatgaatctgggtgctcctgtattgggtgcatatatatttaggatagttagctcttcttgttgaattgatccctttaccattatgtagtggccttctttgtctcttttgatctttgttggtttaaagtctgttttatcagagactaggattgcaacccctgcctttttttgttttccatttgcttggtagatcttcctccatccatttattttgagcctatgtgtgtccctgaacgtgaaatgggtttcctgaatacagcacattgacgggtcttgactctttatccaatttacccgtctgcatcttttaattggagcatttagcccatttacatttaaggttaatattgttatgtgtgaatttgatcctgtcattatgatgttagctgatgatttggctcgttagttgatgcagtttcttcctagccttgatggtcgttaccatttggcatgtttttgcagtggctggtaccagttgttcctttccatgtttagtgcttccttcaggagctcttttagggcaggcctagtggtgacaaaatctctcagcatttgcttgtctgcaaagtattgtatttctccttcacttatgaagcttagtttggctggatatgcaattctgggttgaaaattcttttctttaagaatgttgaatattggcccccactctcttctggcttgtagagtttctgccaagagatcagctgttagtctgatgggcttccctttgtgggtaacccgacctttctctctggctgcccttaacattttttccttcatttcaactttggtgaatctgacaattatgtatcttggagttgctcttctcgaggagtatctttgtggcattctctgtatttcctgaatttgaatgttgtcctgccttgctagattggggaagttctcctggataatatcctgcagagtgttttccaacttggttccactctccccatcactttcaggtacaccaatcagacgtagatttggtcttttcagatagtcccatatttcttggaggctttgttcatttctttttattcttttttctctaaacttctcttctcgcttcgtttcattcatttgatcttccatcactgataccctttcttcccgttgatcgaatcggctactgaggcttgtgcattcgtcacgtagttctcgtgctgtggttttcagctccatcaggtcctttaaggacttctctgcattgattattctagttagccattcgtctaatcttttttcaaggtttttaacttctttgccatgggttcgaacttcctcctttagctcggagtagtttgatcttctgaagccttcttctctcaactcgtcaaagtcattctccgtccagctttgttccattgctggtgaggagctgcgttcctttggaggaggagaggtgctctgatttttggagtttccagtttttctgctctgttttttccccatctttctggttttatgtacctttggtctttgatgatggtgatgtacagatggggttttggtgtggatgtcctttctgtttgttaggtttccttctaacggtcaggaccctcagctgcaggtctgttggagtttgctggaggtccactccagaccctgtttgcctgggtatcagcagcagaggttgcagaacagtggatattggtgaacagcaaatgttgctgcctgatagttcctctggaagttttgtctcagaggggtacccagctgtgtgaggtgtcagtctgcccctactgggggtgcctccctgttaggctattcgggggtcagggactcacttgaggcagtctgtccgttctcagatctcaagctgcgtgctgggagaaccactactctcttcaaagttgtcagacagggacatttaagtctgcagaggtttctgctgccttttatttggctatgccctgcccccagaggtggagtctacagaggcaggcaggcctcctggagctgtagtgggcttcacccagtttgagcttccctgctgctttgtttacctactcaagcctcggcaatggcaggcgcccttcccccagcct

SEQ ID NO: 10404 - DNA, 20507 bp, Homo sapiens
agattctttttttttttttattatactttaagttttaggggacatgtgcacattgtgcaggttagttacatatgtatacatgtgccatgctggcgcactgcacccactaactcgtcatctagcattaggtatatctcccaatgctatccctcccctctccccccaccccacaacagtccccagagtgtgatattccccttcttgtgtccatgtgatctcactgttcaattcccacctatgagtgagaatatgcagtgtttggttttttgttcttgcgatagtttactgagaatgatgttttccaatttcatccatgtccctacaaaggacatgaactcatcattttttatggctgcatagtatgccatggtgtatatgtgccacattttcttaatccagtctgtcattgttggacatttgggttggttccaagtctttgctattgtgaataatgccgcaataaacatacgtgtgcatgtgtctttatagcagcatgatttatagtcctttgggtatatacccagtaatgggatggctgggtcaaatggtattcccagttctagatccctgaggaatcgccacactgacttccacatggttgaactagtttacagtcccaccaacagtgtaaaagtgttcctatttctccacatcctttccagcacctgttgtttcctgactttttaatgattgctattctaactggtgtgagatggtatctcattgtggttttgatttgcatttctctgatggccagtgatgatgagcattttttcatgtgttttttggctacataaatgtcttcttttgagaagtgtctgttcatgtccttcacctgctttttgatggggttgtttgtttttctcttctaaatttgtttgagttcattgtagattctggatattagccctttgtcagatgagtaggttgcgaaaattttctcccattttgtaggttgcctgttcactctgatggtagtttcttttgctgtacagaagctctttagtttaattagatcccatttgtcaattttgtcttttgttgccattgcttttggtgttttagacatgaagtccttgcccatgcctatgtcctgaatggtaatgcctaggttttcttctagggtttttatggttttaggtctaacgtttaagtctttaatccatcttgaattgatttttgtataaggtgtaaggaagggatccagtttcagctttctacatatggctagccagttttcccagcaccatttattaaatagggaatcctttctccattgcttgtttttctcaggtttttcaaagatcagatagttgtagatatgcggcgttatttctgagggctctgttctgttccattgatctatatctctgttttggtaccagtaccatgctgttttggttactgtagccatgtagtatagtttgaagtcaggtagtgtgatgcctccagctttgttcttttggctcaggattgccttggcgatgcgggctcttttttggttccatatgaactttaaagtagttttttccaattctgtgaagaaaggcattggtagcttgatggggatggcattgaatctgtaaattaccttgggcagtatggccattttcacgatattgattcttcctacccatgagcatggaatgttcttccatttgtttgtatcctcttttatttccttgagcagtggtttgtaggtctccttgaagaggtccttcacatcccttgtaagttggattcctaggtattttattctctttgaagcaattgtgaatgggagttcactcatgatttggctctctgtttgtctgttgttggtgtataagaatgcttggatttttgtacattgattttgtatcctgagactttgctgaagttgcttatcagcttaaggagattttgggctgggacaatggggttttctagatatacaatcatgtcgtctgcaaagagggacaatttgacttcctcttttcctaattgaataccctttatttccttctcctgcctaatagccctggccagaacttccaacactatgttgaataggagtggtgagagagggcatccctgtgttgtgccagctttcaaagggaatgcttccagtttttgcccattcagtatgatattggctgtgggtttgtcatagataactcttattattttgaaatacgtcccatcaatacctaatttattgagagtttttagcatgaaggttgttgaattttgtcaaaggctttttctgcatctattgagataatcatgtggtttttgtctttggctctgtttatatgctggattacatttattgatttgcgtatattgaaccagccttgcatcccagggatgaagcccacttgatcatggtggataagctttttgatgtgctgctggattcgttttgccagtattttcttgaggatttttgcatcaatgttcatcaaggatattggtctaaaattctcttttttggttgtgtctctgcctggctttggtatcagaatgatgctggcctcataaaatgagttagggaggattccctctttttctattgattggaatagtttcagaaggaatgccaccagttcctccttgtacctctggtagaattcagctgtgaatccatctagtcccagactctttttggttggtaagctattgattattgccgcaatttcagagcctgttattggtctattcagagattcaacttcttcctggtttagtcttgggagagtgtttgtgttgaggaatttatccatttcttctagattttctagtttatttgggtagaggtgtttgtagtattctctgatggtagtttgtatttctgtgggatcggtggtgatatcccctttatcattttttattgcatctattagattcgtctctctttttttctttattagacttgctagcggtctatcaattttgttgatcctttcaaaaaaccagctcctggattcattaattttttgaagggttttttgtgtctctatttccttcagttctgctctgatcttagttatttcttgccttctgctagcttttgaatgtgtttgctcttgcttttctagttcttttatttgtgttgttagggtgtcaattttggatctttcctgctttctcttgtgggcatttagtgctataaatttccctctacacactgctttgaatgcgtcccagagattctggtatgttttgtctttgttctcgttggtttcaaagaacatctttatttctgccttcatttcgttatgtacccagtagtcattcaggagcaggttgttcagtttccatgtagttgagcggttttgagtgagattcttaatcctgagttctagtttgattgcactgtggtctgagagatagtttgttataatttgtgttcttttacatttgctgaggagagctttacttcccagtatgtggtcagttttggaataggtgtggtgtggtgctgaaaaaaatgtatatcctctttatttggggtggagagttctgtacatgtctattaggtccgcttggtgcagagctgagttcaattcctgggtatccttgttgactttctgtctcgttgatctgtctaatgttgacagtggggtgttaaagtctcccattattaatgtgtgggagtctaagtctctttgtaggtcactcaggacttgctttatgaatcttggtgctcctgtattgggtgcatgtatatttaggatagttagctcttcttgttgaattgatccctttaccattatgtaatggccttctttgtctcttttgatctttgttggtttaaagtgtgttttatcagatactaggattgcaacccctgcctttttgtgttgtccatttgcttggtagatcttcctccatccttttattttgagcctatgtgtgtctctgcacgtgagatgggtttcctgaatacagcacactgatgggtcttgactctttatccaatttgccagtctgtgtcttttaattggagcatttagtccatttacatttaaagttaatattgttatgtgtgaatttgatcctgtcattatgatgttagctggttattttgcttgttagttgatgcagtttcttcctagtctcgatggtctttacattttggcatgattttgcagcggctggtaccggttgttcctttccatgtttagcgcttccttcaggagctcttttagggcaggcctggtggtgacaaaatctctcagcatttgcttgtctgtaaagtattttatttctccttcacttatgaagcttagtttcgctggatatgaaattctgggttgaaaattcttttcattaagaatgttgaatattggcccccactctcttctggcttgtagggtttctgccgagagatccgctgttagtctgatgggcttccctttgagggtaacccaacctttctctctggctgccgttaacattttttccttcatttcaactttggtgaatctgacaattatgtgtctcggagttgctcttctcaaggagtatctttgtggcgttctctgtatttcctgaatctgaacgttggcctgccttgttagattggggaagttctcctggataatatcctgcagagtgttttccaacttggttccattctccccatcactttcaggtacaccaatcagacgtagatttggtcttttcacatagtcccatatttcttggaggcttggctcatttctttttattcttctttctctaaacttcccttctcgcttcatttcattcatttcatcttccatcgctgataccctttcttccagttgatcacattggctcctgaggcttctgcattcttcacgtagttctcgagccttggttttcagctccatcaagtcctttaagcacttctctgtattgttattctagttatacattcttctaaatttttttcaaagttttcaacttctttgcctttggtttgaatgtcctcccatagctcagagtaatttgatcatctgaagccttcttctctcagctcgtcaaagtcattctccatccagctttgttctgttgctggtgcggaactgcattcctttggaggaggagaggcactctgctttttagagtttccagattttctgttcagttttttccccatctttgtggttttatctacttttggtctttgatgatggtgacgtacagatgggtttttggtgtggatgtcctttctgtttgttagttttccttctaacagacaggaccctcagctgcaggtctgttggtataccctgctgtttgaggtgtcagtgttgccctgctgaggggtgcctcccagttaggctgctcaggggtcaggggtcaggggtcagggacccacttgaggaggcagtctgcccgttctcagatctccagctgagtgctgggcgaaacattgctctcttcaaagctgtcagacagtgacatttaagtctgcagaggttactgctgtctttttgtttgtctgtgccctgcccccagaggtggagcctacagaggcaggcaggcctccttgagctgtggtgggctccacccagttggagcttcctggctgctttgtttacctaagcaagcctgggcaatggcggacacccctcccccagcctcactgccgccttgcagtttgatctcagactgctgtgctagcaatcagcgagactccgtgggcatagtaccctcccagccacgtgcgggatataaactccgccgttttttaagcctgtcggaaaagcgcagtatttggatgggagtgacccgattttccaggtgctgtcagtcacccctttctttgacttggaaagggaactccctgaccccttgcgcttcccgagtgaggcaatgcctcgccctgctttggctcgcgcacggtgcgcgcacccactgacctgcgcccactgtctggcactccctagagagatgaacccggtacctcagatggaaatgcagaaatcaccgtcttctgcgtcgctcatgctgggagctgtagaccggagctgttcctattcggccatcttggctcctcccagcaggtttgaagattcttttacatttatttttgctgttctaatgggctttaatatgagacaattttttgaaaaatgctgatatattaataaaagggaaattcattatatccatacccaatattctgttctgagcaacactgaaacaaagctttggagaaagagaggctttctgtttatcatctcttatgttataaaagtgttcttaaaatacctttattttctatgtcaattaaaattgctttgtagtagtgttgtatatcatctggattactcagctcacagatatttttgcagtactcaattatgttatggagactggcttatgcacgaatctttctaatggttatatataaagcacttgaagtctctattattttataataggcaatacctagataaataatgaatttaactcatctttcttatgtgactctaaaggtcaaatcataccacctgaatatttttatcctctctgaatatttccattaaagagtttatttaaaagaatttttaaatcttctcattatgtcttaacagcatgatatcatactctactttttgacttctccatttgatatggaataaaattgcatcatatggccaaggcatatacacttaaagtcttcaatttagaagctttccagagtcaaactgagtcaatctctactttagaagtctcccacaaaaaggatcctacataaattattgtgtgtttaaaggtttctgattttaatctaataactgaaatatcaaaactatattttaattcaggcatttgggcatcactaccaggtgttctcatcagatttaggaaccctgcagcaagatttatcagtgtcaaaatgctaaaatcctaaatttagtgccagaatccctctcaaatggcatttatattttgatagcttaacctactttgaatcccctgagcatcttgtctgtttttattagtagattttgctgatcttttttaacttttcaaaggctctttaaattatcctaaagtcatatatttaccatgagaaagcaggtgtctttttagagtgtagatgcttaagtcgctcataaaattaatttcctcgggttaggagaacattttgaaactctaatttgaaaaactctaatctggcttctaaaaacactgtatcagtattcagaaataataaaaacggaaacataacaacataataaatttaatttaacctagcatagcaaaagagtagggcatttttgcataatcagctagatatttttcagaggcaaataaagagcagtggagactttgtttggagacagccattgtttcaagaaatgggtgttgccttgatgaagctacccttgcttgtctctgcagatccgtctcctgctatcaccagctctgtgttaacattgcctatgctgtggacacacagagatacttgacagtcagtggatgaactcaataaatgttattatttttaaatacacagcttactaaacagataaataatcttaaaattgagaccgttccagaaaccagaatgcattttcttcatactcatagcttttgtggtttacatacatttatataattagaatgcaataaaatacattaaacagtaaaataatactctatataatttaatctctggggatccagaaggcactttaagctattacagtttctcagagtcaatgttatgtactttataattttttattctactggtaaaacatggtgatattgattaacagagattttagtagatataatattttataaactgattttattatgtcttgttaatattgggataatcagaatatagagagacttctatacatacacatatattctatatcttcatagctagacttgaagtatctcactttgatgtttctaaaaataaagtgagcactttgttctttttaatattttatttatttacgtatttatttatttatttttgagatgcagtcttgctctgtcaaccaggctggaatgcagtggtacaatattggctcactgcaaactctgccttcctggttcaagcgattctcctgcctcagcctcctgagtagctgggattacaggctactgccaccacacctggttaattttattttgtgtgtgtatttttagtagagacagggttttaccatgttgcccagtctggtctcgaactcctgacctcaggtgatctgcccaccttggcctcccaaagtgctgggattacaggcatgagccactatgcccagcccactttgtccttcaatttcttccttcttcttcattttgacccccagtttacatcattaagtacatagtctcgaaacctcaaagtatcagtgtcatccttatttgttttttttcctccttctctgaatttgcctgatagtcaaaacctgtgcctactaccacttaaaggttttttttttcatctgtctgactagattgtccactatctcaccaaatcttgctttgactagtaataatggcagttgagagtactgcctatcacttgaccagactttagctaaatgctgaacattcattataatatttaaatctttaaaccaaccttgatttttattttgatttatgagatgactctaccaaaggttagattctgattttggagagctagatcataatagagtcagaattaaaatctgttcttaacttctacactgtactccaacaacagtcaaactgttactttctcattcagggtaaaatcctgaccaaacccattactgaaaaccttccttttttatctcagctcccagtctccaccccatgtatctgatacacctgtgacaatgatcttttctccatatctagaaaatatcaccaacttacagtgccgtgttatggtataggctcttatttccacttcctttcatcacagttctatttatttctcaatacactgttgaagatcagttgaaatatcaatttcagcataacttcccatactttaggggcataatttaatagcttaccagacagtagcatataatgtagtgacttgggagccagacttcctgggtttgaatacaggatgaaaattcaccagtcttttgaccttgggaaagttactaaaccttcctatacaccagtttcctcatctgtgaaatgaggcaaattatagcacctacctcttagggttgttataaaccttaaatcagttagtacaagtaaaggccttagaacagcacctggcacattgtaagaaatgtctaaaggttcattgctatcatttattcatttccacatctcattcctaaaattaaaggtgttataaaattgccagtataattagaaaaaaaatgggaaaatgtgttaaagaaaaattataaacaaatttgaagaaaatgtagaataatacatatatatcttaggaggaaatctcttaagcatatagaaaattaagaaactatgaaacaagattaacatagttgactatacacaaactttaattgctaatacaggcatactttgttttatgctttgctttattgcacttcacagaatttttttagaaattgaagttttgtggcaagcttgcatccagcaagtccatcagcaccattttcccaaaagcctgtgctcactttctgtctctgtgtcacatttggtaattctcacagtatttcaaacttttaaattattattatatctgttatggtgttctgtgatcagtgattttccatgttagtatggtaattgctttgaggcatcacaactcatgcccatataagatggcaaacttaattgataaatgtgtatgttctgactactccaaagactggccattccccatcttccttcccctcctcaggccaccctactccctaagacacaacaatatggaaactaggtcaattaataatcctacgtggccctctaaatgttcaggtgaaaagactaatgaagaaggcatgttgaagttgagataggctaaaagctaggcctcttgtgccaaacatttagcaaagatatgagtgcagagaaaaaattcttgaaggaaattaaaagtgctactccaatgaacacatcaatggtaaggaagcaaaacaggcttattcatgatatggagaaagttttagtgatccggatagaataccaagccagccacaacattctcctaagccaaagcctaatccagagcaaagccctaactgtcttcaattctgtgaaggttgagagaggtgaggaagctttggaagaaaagtttgaagctagcagaggttggctcataaggtttaagaaaagaagctgtatctgtaatataaaagtgcaaggtgaaacagcaagtgctagtgtagaagcaggagtgagttatccagaagatctagctaagataactgatgaagatggctacattaagcaacagattttcaatgtagacaaaacaacctatattgaaagaagatatcatctaggactttcatagtaagagagaagtcaatgtctggtttcaaagcttcagaggacaggctgatgtgattcttaggggctaatgcagctagtaacttctaattgaagccaatacttatttgccattccaaaatccctaggacccttcagaattgtgcaaaatctactctgcctatgctctataaatggaatgacaaagcctagatgatagcacggtatacaaatattttaagcccagtgttaagacctactgctcagaaaaaagatttctttcaaaatattattgcacattgacaataacttaatcacccaagagctctgacggagaggtacaaggaaattaatgttttcatgcctgctaataaaacatcaattgtgcagcccatggatcaaagagtaatttttactttcaagtcttattacttaagaaatatatttcataatgctatatttgccatagatagtgatttccccaatggatctgggcaaggtacattgaaagccttctggaaagggtttaccattctagaagtcattaagaacatttgtgattcatgagaacaggtcaaaaatcaacattaacagaaatctggaagaagttaattccaaccctcatagattactttgaggggttttagatttcagtggagaaaatccctgcagatgttgtggaaacagcaggagaactagaattagaagtaaagcctgcctgggaggggaaggacacgcaccggagcctgttaggggatgggaagtaataggagggagagtattaggaccaatacctaatgcatgtggggcttaaaacctagatgacaggttaataggtgcaggaaaccatcatggcacatgtatacttatgtaaacaatcctgcactttctgcgcgtgtatccaggaacttaaagtaaaattaaaaaaaaaaaaaaagaagtaaagcctgaagatgtgactgaatcactacagtctcatgataaaactttagcaaataaggagttgcttcttatggatgagcaaagaaataagtttattgaaatggaatctattcctggtgaagatgctgtgaacattattgaaatgataacaaaattctagaatatttgataaactttatcagcagcatcagaatttgaaaaatttgactcgaattttgaaagaggttctactgtaggtaaaatgctatcaaacagcatcacctgctatggagaaatctttcatgaaaggaagagtcagtagatgtggcagacttcattgttgtcttattttagaaattgccacagccaccccatccttcagcaaccaccaccctgatcagtcagtagctatcattgtcaaggcaaggtcctccatcagcaaacagatgaagactggcttgaaagcgaaagtgatcattaacatttcttaataaaacattttcattaaggtatgcaggttattttttagaaataatactattacataattaatagactatagtatagcataaacataacttttatatgcactggaaaatcaaaagaatcatgtgacctgctttattgtgatatttgctctattgcggtgatctggatccaaatttgcagcttctgcaaggtatgcctgtgtagggaaaggcagcacaaactaaactacaatagaagtgacagagcacagagcaaaagagtatacttttaacatatgtgttaaataaatgtttaatacacacatcaaatacagaacctctagaagtcaatataatttaaaatgcaaacacataaaataataagcaaaactctaaatattcaacataaatgatataaaaatgtcctataaacctttaaaaatacttatttaaataacctgcaataactttgccccttaaatagggtaaatttatatagatcagcactaatttaattttggcatgtatctgaagaaatgataaatattacacattgtttatgatggtataaattgcaatattattaaaggatacatggaatctattaaaatgtttggaagtggatatatcttatgattgatttgattgatacagcaattcctcttttgtgtgtcttatacacacacatacataatatacacttaggcaaacacatttcagacgtttggattgggatcttggctgctgcttcaacctcatctaatttcctattacacctcctctctctccctttttgtacatttgtccctctctctgatttccaccatctgtctttccagtttactttctctagctccagacaacaaaaattctttaatcccactgggatctccaatcaattgattcaatcaacttttcattatgcctcaaccctttgatcttctaatctaacttctcataactcaagttaaattccatgggaaatccttaacaatcacttccacatatacatccttaactgcctgcctccctcttattgctttgacttgtttggaaaaaccacaacttggttaaatccagatcaccattctctatgtctataattctgcagctaaacataggtagagatcaatacacaaccatcatttctcatcttaaattcgtaaccacaaacctcatagagatctgttaatgctagtcaggcaattacagtgtttcccattcctttaattccttcactatcctgtttcaatttcacacctttttctgctttcttatatgtaaaacacctcctccctgtccttactctcaagtgatcactgtacatctgatttcatgaagaatattcaaatgattaaaagaaaacatcacagattcccatcaccacgtctgcccccacaccgtttacaaacccacactccctgctgcccatcttgttgccccaggtgaactatctgaactactatctaaagtcagtttcttcccacgtgcactacattccagcagcttttacttagcaaagaacattttccagcaatttccttgtctctcctttaacaccattttctccccttttcctactggatcattctcatcagcatgtaaacaagttattacttgtttcccaacctgaccacatttttcatcttccatctccgtaaatctgatctgtgccccactatttatttcctgaatttccatgatggccttttacctgatcttcctgcatgtgtcctctcaccctacacaatctattcccagcatggcagtcagaaacaaccttttaaaacagaagccaggtcttgcgcctcctattctgaaatcctcactggttttcccccaccccacccctcatgtcactcagagtaaaccctaagttcgcatgtgcctgacagggtcttacataacctacccgcccccacagcccagacctctctgatcttctggaccattgttgtcctcattgatcactctgctccagctacaactgtctgctgctctccctccaccttcccaactgaaggcttttgtgcttgttgtttctgtcctgaaaatgaacttctataatgtggttaactttcccttatctcattcaagtatttgctcaagtctttttcagtaagacaggccctaatcatcttatttaaaactggaacatacactcccactccctacacttctgcacccatttactttgctctgctttttcttttttcatagaatgtgtcacattataatactacatagtttactttttactatttatcattttattacctatcccggtcattacattttgagattcaggagtacaaaaatctttgactcttttgttcactgatgaatcacaaaaaaaaaaaaaacaaacccatcaactataacctataaaaaacctataaactataaaataacctatagaaaaacatatgatcacaaaaaaacctataacctatcagcaagaaaattggcatcaattaatacttgctaagtgaattaatgtatttgtgcaaaatatatatacagaagcatgtctggtgtatccttgttttattttattttttattttttatttttttatttttttcaattttaactattattaacgaacatttatacatttatatgcttttccattttctacactattataaataagtgtgatgaatatctttgtaagtctttgatgatacatgtgatgatttccttaggacagattcctagaagtggaattcctggatgcaagaacatgacttttctttttctttctttctttttttttaattttatttttattttattattattatactttaagttttagggtacatgtgcacaatgtgcaggtttgttacatatgtatagatgtgctatgttggtgtgctgcactcattaactcgtcatttagcattaggtatatctcctaatgttatttttccccccttcccctaccgcacaacagtccctgacgtgtgatattccccttcctgtgtccatgtgttctcactgttcaattcccatctatgagtgagaacatgcagtgtttggttttttgtccttgcagtagtttgctgagaatgatggtttccagtttcatccatgtccctacaaaggacatgaactcatcattttttatggctgcatagtattccatggtgtatatgtgccacgttttcttaatccagtctattgttgttggacatttgggttggttccaagtctttgctattgtgaatagtgccgcaataaacacgtgtgcatgcgtctttatagcagcatgatttataatcctttggggatatacccagtaatgggatggctaggtcaaatggtatttctagttctagatccctgaggaatcgccacactgacttctacaatggttgaactagtttacagtcccaccaacagtgtaaaagtgttcctatttctccacatcctctccagcacctgttttttactgactttttaatgattgccattctaactggtgtgagatggtatctcattgtggttttgatttgcatttctctgatggccagtgatgatgagcattttttcatgtgttttttggctgcataaatgtcttcttttgagaagtgtctgttcatgtccttctcccactgtttgatggggtggtttgtctttttcttgtaaatttgtttgagttcattgtagattctggatattagacctttgtcagatgagtaggttgcaaaaattttctcccagtttataggttgcctgttcactctgatggtagtttcttttgctgtgcagaagctctttagtttaattagatcccatttgttgattttggcttttgttaccattgcttttggtcttttagacatgaagtccttgcccatgcttatgtcctgaatggtattgcctaagttaccttctagggtttttatggttttaggtctaacatgtaagtctttaatccatcttcaactgatttttgtataaggtgttaggaaaggatccagtttcagctttctacatgtgactagccagttttcccagcaccatttattaaatagggaatcctttccccattgcttgtttttgtcaggtttttcaaagatcagatggttgtagatatgcggcattatttctgagggctctgttctgttccattgatcaatatctctgttttgataccagtaccatgctgttttggttactgtagccttgtagtatagtttgaagtcaggtagcgtgatgcctccagctttgttcttttggcttaggattgacttggtgatgcgggctcttttttggttccatatgaactttaaagtagttttttccaattctgtgaagaaagtcattggtagcttgatggggatggcattgaatctataaattaccttgggcagtatggccattttcacgatattaattcctcctacccatgagcatggaattttcttccatttgtttgtatcctcttttatttccttgagcagtggtttgtagttctccctgaagaggtccttcacatcccttgtaagttggattcctaggtattttattctttttgaagcaattgtgaatgggagttcactcatgatttgactctctgtttgtctgttattggtgtataagaatgcttgtgatttttgcacattgattttgtatcctgagactttgctgaagttgcttatcagcttaaggagattttgggctgagacaatggggtctgctagatatacaatcatgccatctgcaaagagggacaatttgacttccccttttcctaactgaataccctttatttccttctcctgcctaatcgccctggccagaacttccaacactatgttgaataggagtggtgagagagggcatccctgtgttgtgccagctttcaaagggaatgcttccagtttttgcccattcagtatgatattggctgtgggtttgtcatagatagctcttattattttgagatacgtcccatcaatacttaatttattgagagtttttagcatgaagggttgttgaattttgtcaaaggctttttctgcatctattgagataatcatgtggtttttgtctttggttctgtttatatgctggattacatttattgatttgcatatgttgaatcagccttgcatctcagggatgaagcccacttgatcatggtggataagctttttgatgtgctgctggatttggtttgccagtattttcttgaggatttttgcatcaatgttcatcaaggatattggtctaaaattctcttttttggttgtgtccctgccaggctttggtatcaggatgatgctggcctcataaaatgagttagggaggattccctctttttctattgattggaatagtttcagaaggaatggtaccagttcctccttgtacctctggtagaattcggctgtgaatccatctggtcccagactctttttggttggtaagctattgattattgccacaatttcagagcctgttactggtctattcagagattcaacttcttcctggtttagtcttgggagagtgtatgtgtcgaggaatttatccatttcttctagattttctagtttatttgggtagaggtgtttgtagtattctctgatgatagtttgtatttctgtgggattggtggtgatatcttctttatcattttttattgcgtctatttgattcttctctcttttcttctttattactcttgctagtggtctatcaattttgttgatcttttcaaaaaaccagctcctagattcattaatttttgaagggtttttttgtgtctctatttccttcagttctgctctgattttagttatttcttgccttctgctagctttcgaatgtgtttgctcttgcttttctaattcttttaattgtgatgttagggtatcaattttggatctttcctgctttctcttgtgggcatttactgctataaatttccctctacacactgctttgaatgtgtcccagagattctggtatgttttgtctttgttctcgttggtttcaaagaccatctttatttctgccttcattttgttatgtacccagtagtcactcaggagcaggttgttcagtttccatgtagttgagcggttttgagtgagtttcttaatcctgagttctagtttgattgcagtgtggtctgagagacagtttgttataatttgtgttcttttacatttgctgaggagagctttacttcccagtatgtggtcagttttggaataggtgtggtgtggtgctgaaaaaaatgtatatcctctttatttggggtggagagttctgtagatgtttattaggtcttcttggtgcagagctgagttcaattcctgggtatccttgttaactttcagtctcgttgatctgtctaatgttgacagtggcgtgttaaagtctcccattattattgtgtgggagtctaagtctctttgtaggtcactcaggacttgctttatgaatttgggtgctcctgtattgggtgcatatatatttaggatagttagctcttcttgttgaattgatccctttaccattatgtaatggccttctttgtctcttttgatctttgttggtttaaagtctgttttatcagagactaggattgcaacccctgcctttttttgttttccatttgcttggtagatcttcctccatccttttattttgagcctatgtgtgtctctgcacgtgagatgggtttcctgaatacagcacactgatgggtcttgactctttatccaatttgccagtctgtatcttttaattggagcatttagcccatttacatttaaagttaatattattatgtgtgaatttgatcctgtcattatgatgttagctggttattttgcttgttagttgatgcagtttcttcctagccttgatggtctttacattttggcatgtttttgcagtggctggtaccgtttgttcctttccatgtttagtgcttccttcaggagctcttttagggcaggcctggtggtggcaaaatctctcagcatttgcttgtctgtaaagtattttatttctccttcacttatgaagcttagtttggctggatatgagattctgggttgaaaattcttttctttaagaatgttgaatattgatccccactctcttctggcttgtagagtttctgccgagagatccgctgttagtctgatgtgcttccctttgtgggtaacccaacctttctctctggctgcccttaacattttttccttcatttcaactttggtgaatctgataattatgtgtcttggagttgctcttctcgaggagtatctttgtggtgttctctgtatttcctgaatctgaatgttggcctgccttgccagattgggaaagttctcctggataatatcctgcagagtgttttccaacttggttccattctccccatcactttcaggtacaccaatcagacatagatttggtcttttcacatagtcccatatttcttggagggtttgttcttttctttttattcttttttctctaaacttcccttctcgcttcatttcattcatttcatcttccatcgctgatacccattcttcccgttgatcgcattggcttctgaggcttctgcattattcacgtagttctcgagccttggctttcagctccatcaagtcctttaaggacttctctgcattggttattctagttatccattcgtctaattttttttcaaagtttttaacttctttgccattggtttgaatttcctcctgtagctcagagtagtttgatcatctgaagccttcttctctcaactcatcaaagtcattctccatccagctttgttctgttgctggtgaggagctgcattccttgggaggaggagaggtgctctgctttttagagtttccagtttttctgctctgttttttccccatctttgtggttttatctacttttggtctttgatgatggtgacgtacagatgggtttttggtgtggatgtcctttctgtttgttagttttccttctaacagacaggacctcagctgcaggtctgttggagtttgctagaggtcactccagaccctgtttgcctgggtatcagcagcggtgactgcagaacagcagtggctgtagaacagcggatattggtgatccgcaaatgctgctgcctgatcattcctttggaggttttgtctcagaggagtacccggccgtgtgaggtgtcagtctgcccctactggggggtgcctcccatttaggctgctcggggctcagggacccacttgaggaggcagtctgcccgttctcagatctccagctgcgtgctgggagaaacactgctctcttcaaagctgtcagacagggacatttaagtctgcagaggttactgctgtctttttgttcgtctgtgccctgcccccagaggtggagcctacaaaggcaggcaggcctccttgagctgtggtgggctctacccagtttgagcttccaggctgctttgtttacctaatcaagcctgggcaatggcaggcgcccttcccccgccttgctgcccccttgcagtttgatctcagactgctgtgctagcaatcagcgagactccatgggtgtaggaccctccgagccagatgcgggatataatctcctggtatgccgatttttaagcccattggaaaagggcagtattagggt

SEQ ID NO: 10405 - DNA, 6055 bp, Homo sapiens
ttttgttttgctttattttattttattttattttttatactttaagttttagggtacatgtgcacattgtgcaggttagttacatatgtatacatgtgccatgctggtgcgctgcacccactaactcgtcatctagcattaggtatatctcccaatgctatccctcccccctgcccccaccccaccacagtccccagagtgtgatattccccttcctgtgtccatgtgatctcattgttcagttcccacctatgagtgagaatatgcggtgtttggttttttgttcttgcgatagtttactgagaatgatgatttccagtttcatccatgtccctacaaaggagatgaactcatcattttttatggctgcatagtattccatggtgtatatgtgccacattttcttaatccagtctatcattgttggacatttgggttggtgccaagtctttgctattgtgaataatgccgcagtaaacatacgtgtgcatgtgtcttcatagcagcatgatttatagtcctttgggtatatagccagtaatgggatggctgggtcaaatggtatttctagttctagatccctgaggaatcgccacactgacttccacaatggttgaactagtttacagtcccaccaacagtgtaaaagtgttcctatttctccacatcctctccagcacctgttgtttcctgactttttcatgattgccattctaactggtgtgagatggtatctcattgtggttttgatttgcatttctctgatggccagtgatgatgagcattttttcacgtgttttttggctgcataaatgtcttcttttgagaagtgtctgttcatgtccttcacccactttttgatggggttgtttgtttttttcttgtaaatttgttggagttcattgtagattctggatattagccctttgtcagatgagtaggttgcgaaaattttctaccattttgtaggttgcctgttcactcagatggtagtttcttttgctgtgcagaagctctttagtttaattagatcccatttgtcaattttgtcttttgttgccattgcttttggtgttttggacatgaagtccttgcccatgcctatgtcctgaatggtaatgcctaggttttcttctagggtttttatggttttaggtctaacgtttaagtctttaatccatcttgaattgatttttgtataaggtgtaaggaagggatccagtttcagctttctacgtatggctagccagttttcccagcaccatttattaaatagggaatcctttccccattgcttgtttttctcaggtttgtcaaagatcagatagttgtagatatgtggcgttatttctgagggctctgttctgttccattgatctatatctctgttttggtaccagtaccatgctgttttggttactgtagccttgtagtatagtttgaagtcaggtagtgtgatgcctccagctttgttcttttggcttaggatcgccttggcgatgcaggctcttttttggttccatatgaactttaaagtagttttttccaattctgtgaagaaagtcattggtagcttgatggggatggcattgaatctgtaaattaccttgggcagtatggccattttcacgatattgattcttcctacccgtgagcatggaatgttcttccatttgtttgtatccttttatttccttgagcagtggtttgtagttctccttgaagaggtccttcacatcccttgtaagttagattcctaggtattttattctctttgaagcaattgtgaatgggagttcactcatgatttggctctctgtttgtctgttgttggtgtataagaatgcttgtgatttttgtacattgattttgtatcctgagactttgctgaagttgcttatcagcttaaggagattttgggctgagacaacggggttttctagatatacaatcatgtcgtctgcaaacagggacaatttgacttcctcttttcctaattgaataccctttatttccttctcctgcctaattgccctggccaaaacttccaacactatgttgaataggagtggtgagagagggcatccctgtcttgtgccagttttcaaagggaatgcttccagtttttgcccattcagtatgatattggctgtgggtttgtcatagatagctcttattattttgaaatacgtcccatcaatacctaatttattgagagtttttagcatgaagggttgttgaattttgtcaaaggctttttctgcatctattgagataatcatgtggtttttgtctttggctctgtttatatgctggattacatttattgatttgtgtatattgaaccagccttgcatcccagggatgaagcccacttgatcatggtggataagctttttgatgtgctgctggattcgttttgccagtattttattgaggatttttgcatcaatgttcatcaaggacattggtctaaaattctcttttttggttgtgtctctgcccggctttggtatcagaatgatgctggcctcataaaatgagttagggaggattccctctttttctattgattggaatagtttcagaaggaatggtaccagttcctccttgtacctctggtagaattcggctgtgaatccatctggtcctggactctttttggttggtaaactattgattattgccacaatttcagctcctgttattggtctcttcagagattcaacttcttcctggtttagtcttgggagagtgtatgtgtccaggaatttatccatttcttctagattttctagtttatttgcgtagaggtgtttgtactattctctgatggtagtttgtatttctgtgggatcggtggtaatatcccctttatcattttttattgtgtctatttgattcttctctctttttttctttattagtcttgctagtgatctatcagttttgttgatcctttcaaaaaaccagctcctggattcattaattttttgaagggttttttgtgtctctatttccttcagttctgctctgattttagttatttcttgccttctgctagcttttgaatgtgtttgctcttgcttttctagttcttttaattgtgatgttagggtgtcaattttgcatctttcctgctttctcttgtgggcatttagtgctataaatttccctctacacactgctttgaatgcatcccagagattctggtatgttgtgtctttgttctcgttggtttcaaagaacatctttatttctgccttcatttcgttgtgtatccagtagtcattcaggagcaggttgttcagtttccatgtagttgagcggttttgagtgagattcttaatcctgagttctagtttgattgcactgtggtctgagagatagtttgttataatctctgttcttttacatttgctgaggagagctttacttccaagtatgtggtcaattttggaataggtgtggtgtggtgtgctgaaaaaaatgtatattctgttgatttggggtggagagttctgtagatgtctattaggtctgcttggtgcagagctgagttcaattcctgggtatcctttttgactttctgtctcgttgatctgtctaatgttgatagtggggtgttaaagtctcccattattaatgtgtgggagtctgagtctctgtgtaggtcactcaggacttgctttatgaatctgggtgctcctgtattgggtgcatatatatttaggatagttagctcttcttgttgaattgatccctttaccattatgtaatggccttctttgtctcttttgatctttgttggtttaaagtctgttttatcagagactaggattgcaaaccctgcctttttttgttttccatttgcttggtagatcttcctccatccttttattttgagcctatgtgtgtctctgtatgtgagatgggtttcctgactacagcacactgatgggtcttgactctttatccaatttgccagtctgtgtcttttaattggagcatttagtccatttacatttaaagttaatattgttatgtgtgaatttgatcctgtcattatgatgttagctggtgattttgctcattagttgatgcagtttcttcctagtctcgatggtctttacattttggcatgattttgcagcagctggtaccggttgttcctttccatgtttagcgcttccttcaggagctcttttagggcaggcctggtggtgatgaaatctctcagcatttgcttgtctgtaaagtattttatttatccttcacttatgaagcttagcttggctggatatgaaattctgggttgaaaattcttttctttaagaatgttgaatattggcccccactctcttctggcttgtggggtttctgctgagagatccgctgttagtccgatgggcttccctttgtgggtagcctgacctttctctctggctgcccttaacattttttccttcatttcaactttggtgaatctgacaattatgtgtcttggagttgctcttctcgaggagtatctttgtggcattctctgtatttcctgaatctgaacgttggcctgccttgctagattggggaagttctcctggataatatcctgcagagtgttttccagcttggttccattctccccatcactttcaggtacaccaatcagacgtagatttggtcttttcacatagtcccatatttcttggaggctttgctcgtttctttttattcttttttctctaaacttcccttctcgcttcatttcattcatttcatcttccattgctgataccctttcttccagttgatcgcatcggctcctgaggcttctgcattcttcacgtagttctcgagccttggttttcagctctatcagctcctttaagcacttctctgtattggttattctagttatacattcttctaagttgttttcaaagttttcaacttctttgcctttggtttgaatgtcctcccgtagctcagagtaatttgatcatctaaagccttcttctctcagcttgtcaaagtcattctccatccagctttgttctgttgctggtgaggaactgcgttcctttggaggaggagaggcgctctgcgttttagagtttccagtttttctgttctgttttttcccacctttgtggttttatctactttgggtctttgatgatgatgatgtacagatgggtttttggtgtggatgtcctttctgtttgttagttttccttctaacagacaggaccctcacctgcaggtctgttggagtaccctgccgtgtgaggtgtcagtgtgcccctgctggggggtgcctcccagttaggctgctcgggggtcaggggtcagggacccacttgaggaggcagtctgcccgttctcagatctccagctgcgtgctgggagaaccactgctctcttcaaagctgtcagacagggacatttaagtctgcagaggttactgctgtctttttgtttgtctgtgccctgcccccagaggtggagcctacagaggcaggcaggcctccttgacctgtggtgggctccacccagttcgagcttcccagctgctttgtttacctaatcaagcctgggcaatggcgggcgcccctcccccagcctcgctgccgccttgcagtttgatctcagactgctgtgctagcaatcagcgagactccgtgggcgtaggaccctccgagccaggtgcaggatataatctcgtggtgcgccgttttttaagccggtccaaaaagcgcaatatttgggtgggagtgacccgattttccaggtgcgtccgtcacccctttctttgactcggaaagggaactccctgaccccttgcgcttcccaagtgaggcaatgccttgccctgctttggctggcgcacggtgcgcgcacccactgacctgcgcccactgtctggccctccctagtgagatgaacccggtacctcagatggaaatgcagaaatcacccgtcttctgcatcgctcacgctgggagctgtagaccggagctgttcctattcggccatcttggctcctccgcttttt

SEQ ID NO: 10406 - DNA, 6140 bp, Homo sapiens
gtttcttttttgtttattattattattattattatactttaagttatagggtacatgtgcacaatgtgcaggttagttacatatgtatacatgtgccatgctggtgtgttgcacccattaactcatcatttagcattaggtatatctcctaatgctatccctccccactcccctcaccccacaacagtccccagagtgtgatgttccccttcctgtgtccatgtgttctcattgttcaattcccatctatgagtgagaacatgtggtgtttggttttttgtccttgcgatagtttactgagaatgatgatttccaatttcatccatgtccctacaaaggacatgaactcatcattttttatggctgcatagtattccatggtgtatatgtaccacattttcttaatccagtctatcattgttggacatttgggttggttccaagtctttgctattgtgaatagtgccacaataaacatacgtgtgcatgtgtctttatagcagcatgatttatagtcctttgggtatatacccagtaatgggatggctgggtcaaatggtatttctagttctagatccctgaggaatcgccacactgacttccacaatggttgaactagttcacagtcccaccaacagtgtaaaagtgttcctatttctccacatcctctccagcacctgttgtttcctgactttttaatgattgccattctaactggtgtgagatggtatctcattgtggttttgatttgcatttctctgatggccagtgatgatgagcattttttcatgtgtcttttggctgcataaatgccttcttttgagaagtgtctgttcatatcctttgcccactttttgatggggttgtttgtttttttcttgtaaatttgtttgagttcattgtagattctgcatattagccctttgtcagatgagtaggttgagaaaattttctcccattctgtaggttgcctgttcactctgatggtagtttcttttgctgtgcagaagctctttagtttaattagatcccatttgtcaattttggcttttgttgccattgcttttggtgttttagacatgaagtccttgcccatgcttatgtcctgaatggtaatgcctaggttttcttctagggtttttatggttttaggtctaatgtttaagtctttaatccatcttgaattaatttttgtataaggtgtaaggaagggatccagtttcaactttctccatatggctagccagttttcccagcaccatttattaaatagggaatcctttccccattgcttgtttttctcaggtttgtcaaagatcagatagttgtagatatgcggcgttatttctgagggctctgttctgttccactgatctatatctctgttttggtaccagtaccatgctgttttggttactgtagccttgtagtatagtttgaagtcaggtagcgtgatccctccagctttgttcttttggcttaggattgacttggcgatgcgggctcttttttggtgccatatgaactttaaaggagttttttccaattctgtgaagaaagtcattggtagcttgatggggatggcattgaatctataaattaccttgggcagtatggccattttcatgatattgattcttcctacccatgagcatggaatgttcttccatttgtttgtatcctcttttatttccttgagcagtggtttgtagttctccttgaagaggtccttcacatcccttgtaagttggattcctaggtattttattctctttgaagcaattgtgaatgggagttcactcaagatttggctgtttgtctgttattggtgtataagaatgcttgtgatttttgtacattgattttgtatcctgagactttgctgaagttgcttatcagcttaaggagattttgggcttagacgatggggttttctagatatataatcatgtcgtctgcaaacagggacaatttgacttcctcttttcctaattgaacaccctttatttccttttcctgcctaattgccctggccagaacttccaacactatgttgaataggagtggtgagagagggcatccctgtcttgtgccagttttcaaagggaatgcttccagtttttgcccattcagtatgatattggctgtgggtttgtcatagatagctcttattattttaagaaatgtcccatcaatacctaatttattgagagtttttacaatgaagcgttgttgaattttgtcaaaggccttttctgcatctattgagataatcatgtggtttttgactttggttctgtttatatgctggattacatttattgatttgcgtatattgaaccagccttgcatcccagggatgaagcccacttgatcatggtggataagctttttgatgtgctgctggattcggtttgcccgtattttattgaggatttttgcatctatgttcatcaaggatattggtctaaaattctcttttttggttgtgtctctgccctgctttggtatcaggatgatgctggcctcataaaatgagttagggaggattccctctttttctattgattggaatagtttcagaaggaatggtaccagttcctccttgtacctctggtagaattcggctgtgaatccatctggtcctggactctttttggttggtaagctattgattattgccacaatttcagatcctgttattggtctattcagagattcaacttcttcctggtttagtcttgggagagtgtatgtgtcgaggaacttatccatttcttctagattttctagtttatttgcatagaggtgtttgtagtattttctgacggtagtttgaatttctgtgggatcggtggtgatacctcctttatcattttttattgcatctatttgatttttctctctttttttctttattagtcttgctagcggtctatcaattttgttcatcctttcaaaaaaccagctcctggattcattaattttttgatgggttttttttttgtctctatttccttcagttctgctctgattttagttatttcttgccttctgctagcttttgaatgtgtttgctcttgtttttctagttcttttaattgtgatgttagggtgtcaattttggatctttcctgctttctcttgtgggcatttagtgctataaatttccctctacacactgctttgaatgtgtcccagagattctggtatgttgtgtctttgttcttgttggtttcaaagaacatctttatttctgccttcatttcgttatgtacccagtagtcattcaggagcaggttgttcagtttccatgtagttgagtggttttgagtcattttcttaatcctgaattgtagtttgattgcactgtggtctgagagacagtttgttataatttctgttcttttacattcgctgaggagtgctttacttccaagtatgtggtcaattttggaataggtgtggtgtggtgctgaaaaaaatgtatattctgttgatttggggtggagagttctgtagatgtctattaggtccgcttggtgcagagctgagttcaattcctggatatccttgttaactttctgtctcgttgatctgtctaatgttgacagtggggtgttaaagtctcccattattagtgtgtgggagtctaagtctctttgtaggtcactcaggacttgctttatgaatctgggtgctcctgtattgggtgcatttatatttaggatagttagctcttcttgttgcattgatccctttaccattatgtaatggccttctttgtctcttttgatctttgttggtttaaagtctgttttatcagagactaggattgcaacccctgcctttttttgttttccatttgcttggtagatcttcctccatccttttattttgagcctatgtgtgtctctgcacgtgagatgggtttcctgaatacagcacactgatgggtcttgactctttatccagtttgccagtctgtgtcttttaattggaacatttagtccatttgtatttaaagttaatattgttatgtgtgaatttgatcctgtcgtcatgatgttagctggttattttgctcattagttgatgtagtttcttcctactctcgatggtctttacattttggcatgattttgcagcaactggtactggttgttcctttccatgtttagtgcttcctttaggagctcttttagggcaggcctggtggtgacaaaatctctcagcatttgcttgtctgtaaagtattttatttctccttcacttatgaagcttagtttggctggatatgaaatgctgggttgcaaattcttttctttaagaatgttgaatattggcccccactctcttctggcttgtagagtttctgctgagagatccgctgttactcggatgggcttccctttgtgggtaacccgaactttctctctggctgctcttaacattttttccttcacttcaactttggtgaatctgacaattatgtgtcttggagttgctcttctcgaggagtatctttgtggcgttctctctatttcctgaatctgaacattggcctgccttgctagattggggaagttctcctggataatatcctgcagagtgttttccaacttggttccattctccccgtcactttcaggtacaccaatcagatgcagatttggtcttttcacatagtcccatatttcttggaggctttgttggtttctttttattcttttttctctaaacttcccttctcgcttcatttcattcatttcctcttccatcactgataccctttcttccagttgagtgcattggctcctgaggcttctgcattcttcacgtagttctcgagccttggctttcagctccatcagctcctttaagcctaaatttttttcaaagttttcaacttctttgcctttggtttgaatttcctcctgtagcttggagtagtttgatcgtctgaagccttcttctctcaactcgtcaaagtcattctccatccagctttgttccattgctggtgaggaactgcgttcctttggaggaggagtggcactctgctttttagagtttccagtttttctgctctgttttttccccatctttgtggttttatctacttttggtctttgatgatggtgatgtactgatgggtttttgatgtggatgtcctttctgtttgttagttttccttctaacagacaggaccctcagctgcaggtctgttggaatttgctaggggtccactccagaccctgtttgcctgggtatcagcagtggtgtctgcagaaccgcggattttcatgatccgcaaatgctgctgtctgatcattcctctggaagttttgtctcagaggagtacccgaccgtgtgaagtgtcagtctgcccctactggggggtgtctctcagtttggctgctcaggggtcaggggtcagggacccacttgaggaggcagtctgcctgttctcagatctccagctgcatgctaggagaaacactgctctcctcaaagctgtcagacagggacatttaagtctgcagaggttactgctgtctttttgtttgtctgtgccctgcccccagaggtggagcctacagaggcaggcaggcctccttgagctgtggtgggctccacccagttccagcttccaggctgctttgtttacctaagcgagcctgggcaatggcgggtgcccctcccccagccttgctgccgccttgcagtttgatctcagactgctgtgctagcaatcagctagactctgtgggcgtaggaccctctgagccatgtgtgggatataatcacctggtgcgccgtttcctaagcctgtcggaaaagcgcagtattcaggtgggagtggcccgatttttcagatgccgtctgtcacccctttccttgaccaggaaagggaactccctgatcccttgcacttcccgagtgagacaatgcctcgccctgctttggctggtgtgaggtgtgctgcacccactgtcctgtgcccactatctggcactccctagtgagatgaacccggtacctcagatagaaatgcagaaatcacccgtcttctgcattgctcacgctgggagctgtagaccggagctgttcctattcggccatcttggctcctccct

SEQ ID NO: 10407 - DNA, 9530 bp, Homo sapiens
tttttttttttttttttttttttgagagagagtctcgctctgtcacccaggctggagtgcagtggcacgatcttggctcactgcaagctccgcctcccgggttcacaccattctcctgcctcagcctcccgagtagctgggactacaggtgcctgccaccacacccggctaattttttttttgtatttttagcagagacggggtttcactgtgttagccaggatggtctcaatctcctgacctcgtgatccgcccgcctcggcctcccaaagtgctgggattacaggcttgagccaccgcgcccggctacgggttcttcttttcaatccttttcaatcctaagaaggacataacatgctgaagtgaaggtatattaggatggttttctctgatttttttttttaatttgatcctaagtatggtatcatgaacgtcacatgttaggatctagcagagtttgaagaattattgtaaacccctgtaaacacagagcaaggtagaaagtgattttcatcgttctcttgctcctcttaccatcctacctgggaaatacactcccattcttatttggactgatttttttcctatgtagtgcagtggccttcattttaaagcctacaattcaacatgatgtttttgggtttagaagttatgttcttgatggtgtgaaagctacatcaaatttcagatttgtcttgtgtaatgtgatacatggacatgcggtcgctggtattggttgcttgtagccaaagaaccataaaaagtacacctaggaatagggcctatggttttgacagtaagtatcgttagagatatagctttccttctaagttggcctactaggttgagattaatgaggaaggtgtgtgtgtgtatacacataccattcactcaatcaattccagtgaaataacacagagaagacaaaaaaagtggccattagggaaaataagtggaccatgggcacagaaaacctcctgttccattcagctgtgctaattagtaatgagcataacattctttttttttttttttaaggccagacggtgtcatttagtaaaataaataaatactcctccctgccatttactaatagtctgaagccttggttgctagttctgcctctatctgttactagtcatatgatcctaggaaattggaaacttctctgagcctcaggtttctgcatctacaaagtggagatagacctaactattgtgttatcttcacctttaaagaatatagtgttcatgaaattgctctgtaaactggacagtggggccttggtgtaaggcattatgttcaggtgtgagttgagattccccgaggtatagagatcttgcattggcacttgagggtcttgaagaagattttcaatttcaatttatgcatgtacccaccggctgtattgacacagcacaaagccaagggcagatttgacaatgatttctttaattttattgatgtgaactgcaaaactgggccattcagtctgcaaagtatctaggctgtaatgatctgacattggctgtctacattcatcaaattaagtggataattagcaaaacaccatttgactttgtgatgtaaagacagtaattgtggctctttctcaattaaaaatctcatccaaagtcatgattttggttgtcacatctgtgcagatgatttccacatttgtttatacctccagctttgaattctttctgaaaagactacattattttcccaacagtcaccaggcattttccctcatgcattttccctccccattattccttcctgggatcttcattttcttatcccaatcagccagtctcaaactctcagggttaactctgactcctctcttccccacacgttccctagtcaatcagctgccaagttctatcaattctatctatgaaacacccttgaaatcttccttctcctctctaattctactgccctgctatcctactacttcatcaaggcccagcctattattacaaaaaccctgtaactggccttccttttccagtattgcctcattccaaccccgtctatatattaatgctctcatcctgctttttctctgctcaaaaatcccctggggtgggattctcactgtctaagaaacaaagcctgaattcttcctcctggtgttctcagcattgcaaggcctggctctaacctgtctttcccactttatcttctcccactccccttcatgtacactactgagtaattcttggtttcctgcacggattcatttcccttttggatgctgtcctatgttcacacatctccctcctctggaaatttcctcctcctcattatagccttcaaaccccactccaagccccacttattcttcaagagccattcaaatgccacctccccactgcgctcctttaggcttctggttggaaagactctctccctaatctgtactccactgcactttaacaacatctgcccaactttctcccctttagactataaattcctttaaggcaggatttgtgccagagtcatctctgtattccccagggtccacatatcctgcatatagtagctgttctttaaatacctgttgaataaatgaatgcttgtaaagaaagcatgcttctaatcatatttttttcttatcttctaatgtgggatgcaacttcttatttgactatgtaaactcatgtggtgaaatattttccttcaaggacacataatatgctcctatggcctccttctctctgataaggttggtcttttaccagtggtttgtagcactaattataggagggaggaaagaaaattctggaaagtagattacagaagaggaaaaacaaacatgagaattctaagtaaaaatggaaaatagcatgtttacaaagaaggacatcttgaaaggcagcattcctctagggcagtgctaattttaagaggaatagaagaaaaagtaatgtatttttctaaaaggagaaactgaacttgtaagaactgtagaataatcaaattattgtgaaattgggccagactttccccagaattctgtagcccattggatttgacaagattagacaagagaggtaaaaatgatggttggactaaagaaaaggactaatggagacaaattataggtatggtcatggtttcaccccaaagatagatgaatggtgtttaaaagaccatcatatcctacagatgggagcttttcttgtccctcccaatctacccagcgcattgaaagagaaaaagagcaaatcgaagcaatgcattttgatgcaaaatatagagacagggatggttaaaactcaagaatagaggcaggatttcatatggatacatttcatagtaatacaataaattaaatatttaaaagtttatttttaggttcaccaaaagagcccaaagtcatcaaaatgtcccatactaagatccttccaagagaattgattagagctttctgacagtataatgtgatggattagtgagttttcctcaatttgttgatgaaaaaacagtgctcaatgtattattttaacatagtagctattaggttaaatgctgttacgaccagtattaattgttaaatattaacaaaggttcagatataatcttgcctaagggcaagaggatgtctcacattttccagaatatctatgactctaagtaagtttactattttcttttttttttaattttattattattatactttaagttttagggtacatgtgcacaatttgcaggttagtttcatatgtatacatgtgccatgctggtgtgctgcacccattaactcgtcatttagcattaggtatatctcctaatgctatccctcccacctcccccaccccacaacagtccccagagtgtgatgttccccttcctgtgtccatgtgatctcattgttcaattcccacctatgagtgagaacatgtggtgtttggttttttgtccttgcgatattttacggagaatgatgatttccaatttcatccatgtccctacaaacaacatgaactcatcatttcttatggctgcatagtattccatggtgtatatgtgccacattttcttaatccagtctatcattgttggacatttgggttggttccaagtctttgctattgtgaatagtgccgctataaacatacgtgtgcatgtgtctttatagcagcatgatttataatcctttgggtatataaccagtaatgggatggctgggtcaaatgctatttctagctctagatccctgaggaattgccacactgacttccacaatggttgaactagtttacagtcccaccaacagtgtaaaagtgttcctatttctccacatcctctccagcacctgttgtttcctgactttttaatgattgccattctaactggtgtgagatggtatctcattgtggttttgatttgcatttctctgatggccagtgatggtgagcattttttcatgtgttttttggctgcataaatgtcttcttttgagaagtgtctgttcatgtccttcgcccactttttgatggggttgtttgtttttttcttgtaaatttgtttgagttcattgtagattctggatattagccctttgtcagatgagtaggttgcgaaaattttctcccattttgtaggttgcctgttcactctgatggtagtttctttgcctgtgcagaagctctttagtttaattagatcccatttgtcaattttggcttttgttgccattgcttttggtgttttagtcatgaagtacttgcccatgcctatgtcctgaatggtaatgcctaggttttcttctagggtttttatggttttaggtctaatgtttaagtctttaatccatcttgaattaatttttgtataaggtgtaaggaagggatccagtttcagctttctacatatggctagccagttttcccagcaccatttattaaatagggaatcctttccccatttcttgtttttgtcagggttgtcaaagaacagatagttgtagatatgcagcgttatttctgagggctttgttctgttccattgatctatatgtctgttttggtgccagtaccatgctgttttgtttactgtagccttgtagtatagtttgaagtcaggtagcgtgatgtctccagctttgttcctttggcttaggattgacttggtgatgcgggctcttttttggtaccatatgaactttaaggtagttttttccagttctgtgaagaaagtcattggtagcttgatggggatggcattgaatctataaattaccttgggcagtatggccattttcacgatattgattcttcctacccatgagcatggaatgttcttccatttctttgtatcctcttttatttcattgagcagtggtttgtagttctccttgaagaggtccttcacatcccttgtaagttggattcctaggtattttattctctttgaagcaattgtgaatgggagttcactcatgatttggctctctgtttgtctgttattggtgtataagaatgcttgtgatttttgtacattgattttgtatcctgagactttgctgaagttgcttatcaccttaaggagattttgggctgagacgatggggttttctagatatacaatcatgtcgtctgcaagcagggacaatttgacttcctcttttcctaattgaataccctttatttccttctcctgcctaattgccctggccagaacttccaacactatgttgaattggagtggtgagagagggcatccctgtcttgtgccagttttcaaagggagtgcttccagtttttgcccattcagtatgatattggctgtgggtttgtcatagatagctcttattattttgagatacagcccatcaatacctaatttattgagagtttttagcatgaagcgttgttgaattttgtcaaaggccttttctgcatctattgagataatcatgtagtttttgtctttgattctgtttatatgctagattacatttattgatttgtgtatattgaaccagccttgcatcccagggatgaagcccacttgatcatggtggataagctttttgatatgctgctggattcggtttgccagtattttattgaggatttttgcatcaatgttcatcagggatattggtctaaaattctcttttttggttgtgtctctgcccggctttggtatcaggatgatgctggcctcataaaatgagttagggaggattccctctttttctattgattggaatagtttcagaaggaatggtaccagttcctccttgtacctttggtagaatttggctatgaatccatctggtcctggactctttttcgttggtaagctattgattattgccacaatttgagatcctgttattggtctattcagagattcaacttcttcctggtttagtcttgggagagtgtatgtgtccaggaatttatccatttcttctagattttctagtttatttgcgtagaggtgtttgtagtattctctgatggtagtttgtatttctgtgggatcggtggtgatgtcctctttatcattttttattgtgtctatttgattcttctctcttttcttctttattagtcttgctagcggtctatcaattttgttgatcctttcaaaaaaccagctcctggattcattaattttttgaagggttttttgtgtctctatttccttcagttctgctcgattttagttatcttttgccttctgctagcttttgaatgtgtttgctcttgcttttctagttcttttaattgtgatgttagggtgtcaattttagatctttcctgctttctcttgtgggcatttagtgctataaatttccctctacacactactttgaatgtgtcccagagattctggtatgttgtgtctttgttgtcgttggtttcaaagaacatctttatttctgtcttcattttgttatgtacccagtagtcattcaggagcaggttgttcagtttccatgtagttgagcggttttgagtgcgtttcttaatcctgagttctagtttgattgcactgtggtctgagatacactctgttataatctctgttcttttacatttgctgaggagagctttacttccaactatgtggtcaattttgaaataggtgtggtgtggtgctaaaaaaatgtatattctgttgatttggggtggagagttctgtagatgtctattaggtccgcttggtgcagagctgagttcaattcctgggtatccttgttgactttctgtctcgttgatctgtctaatgttgacagtggggtgttaaagtctcccattattaatgtgtgggagtctaagtctctttgtaggtcactcaggacttgctttatgaatctgggtgctcctgtattgggtgcatatatatttaggatagttagcttttcttgttgaattgatcctgttaccattatgtaatggccttctttgtctcttttgatctttgttggtttaaagtctgttttatcagagactaggattgcaacccctgcctttttttgttttccatttgcttggtagatcttcctccatccttttattttgagcctatttgtgtctctgcacatgagatgggtttcctgaatacagcacactgatgggtcttgactctttatccaatttgccagtctgtgtcttttaattggagcatttagtccatttacatttaaagttaatattgttatgtgtaaattttatcctgtcattatgatgttagctggttgttttgctcattagttgatgcagtttctgcctagcctcgatggtctttacaatttggcatgattttgctgtggctggtaccggttgttcctttccatgtttagtgcttccttcaggagctcttttagggcaggcctgatggtgacaaaatctctcagcatttgcttgtctgtaaagtattttatttctccttcacttatgaagcttagtttggccagatatgaaattctgggttgaaaattcttttctttaagaatgttgaatattggcccccactctcttctggcttgtagagtttctgccaacagatctgctgttagtctgatgggcttccctttgagggtaacccgccctttctctctggctgcccttaacattttttccttcatttcaactttggtgaatctgacaattatgtgtcttggagttgctcttcttgaggagcatctttgtggcgttctctgtatttcctgaatctgaatgttgacctgccttgctagattgtggaagttcttctggataatatcctgaagagtgttttccaacttggttccattctccccgtcactttcaggtacacaaatcagatgtagatttggtcttttcacatagtcccatatttcttggaggctttgtttgtttctttttattcttttttctctaaacttcccttcctgcttcattttattcatttcatcttccatcagcaataccctttcttccagttgatcgcattggctcctgaggcttctgcattcttcacgtagttctcgagccttggctttcagctccgtcagctcctttaagtacttctctgtattggttattctagttatacattcgtctaaatatttttcaaagtttttaacttctttgcctttggtttgaatttcctcccgtagctcagagtagtttgatcgtctgaagacttctctcaactcatcaaagtcattctccctccagctttgttccgttgcttgtgaggaactgcgttcctttggaggaggagaggtgctctgctttttagagttcccagtttttctgctctgttttttccccatctttgtggttatatctacttttggtctttgatgatggtgatgtacagatgggtttttggtgtggatatcctttctgtttgttagttttccttctaacagacaggaccctcagctgcaggtctgttagagtttgctagaagtccactccaggccctgtttgcctgggtatcagcagcggtggctgcagaacagcggattttcgtgaacctcgaatgctgctgtctgattgttcctctggaagttttgtctcagaggagtacctggccgtgtgaggtgtcagtctgcccctacttgggggtgcctcccagttaggctgctcgggggtcaggggtcagggacccacttgaggaggcagtctgccctttctcagatctccagctgcgtgctgggagaaccactgctctcttcaaagctgtcagacagggacatttaagtctgcagaggttactgctgtctttttgtttgtctgtgcccttccctcaaaggtggagcctaccaaggcaggcagccctccttgagctgtggtgggctccacccagttcgagcttgccggctgctttgtttgcctaagcaagcctgggcaatggcgggtgcccctcccccagcctcgctgctgccttgcagtttgacctcagactgtgtgctagcaatcagtgagactctgtgggtgtaggaccctctgagccaggtgcaggatatagtctcttggtgcaccattttttaagcccgtagg

SEQ ID NO: 10408 - DNA, 6067 bp, Homo sapiens
tttttattttattttatttatttatttatttatttatttatttttttattatactttaagttttagggtacatgcgcacattgtgcaggttagttacatatgtatacatgtgccatgctggtgcgctgcacccactaactcgttatctagcattaggtatatctcccaatgctatccctcccccctccccctaccctaccacagtccccagagtgtgatattccccttcctgtgtccatgtgatctcattgttcaattcccacctatgagtgagaatatgcggtgtttggttttttgttcttgcgatagtttactgagaatgatgatttccaatttcatccatgtccctacaaaggacatgaactcatcatttgttatggctgcatagtattccatggtgtatatgtgccacattttcttaatccggtctatcattgttggacatttgggttggttccaagtctttgctattgtgaataatgccgcaataaacatacgtgtgcatgtgtctttatagcagcatgatttatagtgctttgggtatatacccagtaatgggatggctgggtcaaatggtatttctagttctagatccctgaggaatcgccacactgacttccacaatggttgaactagtttacagtcccatcaacagtgtaaaagtgttcctgtttctccacatcctctccagcacctgctgtttcctgactttttaatgattgccattctaactggtgtgagatggtatctcattgtggttttgacttgcatttctctgatggccagtgatgatgagcattttttcatgtgttttttggctgcataaatgtcttcttttgagaagtgtctgttcatgtcctttgcccactttttgatggggttgtttgtttttttcttgtaaatttgtttgagttcattgtagattctgggtattagccctttgtcagatgagtaggttgcaaaaattttctccaattttgtaggttgcctgttgactctgatggtagtttcttttgctgtgcagaagctctttagtttaattagattccatttgtcaattttgtcttttgttgccattgcttttggtgttttggacatgaagtctttgcccatgcctatgtcctgaatggtaatgcctaggttttcttctagggtttttatggttttaggtctaacgtttaagtctttaatccatcttgaattgatttttgtataaggtgtaaggaagggatccagtttcagctttctacatatggctagccagttttcccagcaccatttattaaatagggaatcctttccccattgcttgtttttctcagatttgtcaaagatcagatagttgtagatatgaggcgttatttctgagggctctgttctgttccattgatctatatctttgttttggtaccagtaccatgctgttttggttactgtagccttgtagtatagtttgaagtcaggtagtgtgatgcctccagctttgttcttttggcttaggattgccttggcgatgcgggctcttttttggttccatatgaactttaaagtagttttttccaattctgtgaagaaagtcattggtagctttatggggatagcattgaatctgtaaattaccttgggcagtatggccattttcacgatattgattcttcctacccatgagcatggaatgttcttccatttgtttgtatcctcttttatttcctcgagcagtggtttgtagttctccttgaagaggtccttcacatcccttgtaagttgtattcctaggtattttattctctttgaagcaattgtgaatgggagttcactcatgatttggctctctgtttgtctgttgttggtgtataagaatgcttgtgattttggtacattgattttgtatcctgagactttgctgaagttgcttatcagcttaaggagattttgggctgagacaatggggttttctagatatacaatcatgtcatctgcaaacacggacaatttgacttcctcttttcctaattggataccctttatttccttctcctgcctaattgccctggccagaacttccaacactatgttgaataggagtggtgagagagggcatccctgtcttgtgccagttttcaaagggaatgcttccagtttttgcccattcagtatgatattggctgtgggtttgtcatagatagctcttattattttgaaatacatcccatcaatacctaatttcttgagagtttttagcatgaagggttgttgaattctgtcaaaggccttttctgcatctattgagataatcatgtggtttttgtctttggctctgtttatatgctggattacatttattgatttgcgtatattgaaccagccttgcatcccagggatgaagcccacttgatcatggtggataagctttttgatgtgctgctggattcggtttgccagtattttattgaggatttttgcatcaatgttcatcaaggatattggtctaaaatcctcttttttggttgtgtctctgcccggctttggtatcagaatgacactggcctcataaaatgagttagggaggattccctctttttctattgattggaatagtttcagaaggaatggtaccagttcttccttgtacctctggtagaattcggctgtgaatccatctggtcctggactcttttttgttggtaaactattgattattgccacaatttcagctcctgttattggtctattcagagattcaacttcttcctggtttagtcttgggagagtgtatgtgtcgaggaatttatccatttcttctagattttctagtttatttgcgtagaggtgtttgtagtattctctgatggtagtttgtatttctgtgggatcggtggtgatatcccctttatcattttttattgtgtctatttgattcttctctctttttttctttattagtcttgctagcggtctatcaattttgttgatcctttcaaaaaaccagctcctggattcattaattttttgaagggttttttgtgtctctatttccttcagttctgctctgattttagttatttcttgccttctgctagcttttgaatgtgtttgctcttgcttttctagttcttttcattgtgatgttagggtgtcaattttggatctttcctgctttctcttgtgggcatttagtgctataaatttccctctacacactgctttgaatgcgtcccagagattctggtatgttgtttctttgttctcgttggtttcaaagaacatctttatttctgccttcatttcgttatgtatccagtagtcattcaggagcaggttgttcagtttccatgtagttgagcggttttgagtgagattcttaatcctgagttctagtttgattgcactgtggtctgagagatagtttgctataatctctgttcttttacatttgctgaggagagctttacttccaagtatgtggtcaattttggaataggtgtggtgtgatgctgaaaaaaatgtatattctgttgatttcgggtggagagttctgtagatgtctattaggtccgcttggtgcagagctgagttcaattcctgggtatccttgttgactttctgtctcgttgatctgtctaatgttgacagtggggtgttaaagtctcccattattaatgcgtgggagtctaagtctctttgtaggtcactcaggacttgctttatgaatctgggtgctcctgtattgggtgcatatatatttaggatagttagctcttcttgttgaattgatccctttaccattatgtaatggccttctttgtctcttttgatctttgttggtttaaagtctgttttatcagagactaggattgcaatccctgcctttttttgttttccatttgcttggtagatcttcctccatccttttattttgagcctatgtgtgtctctgcacgtgagatgggtttcctgaatacagcacactgatgggtcttgactctttatccaatttgccagtctgtgtcttttaattggagaatttagtccatttacatttaaagttaatattgttatgtgtgaatttgatcctgtcattatgacgttagctggtgattttgctcgttagttgatgcagtttcttcctagtctcgatggtctttacattttggcatgattttgcagcagctggtactggttgttcctttccatgtttagcgcttccttcaggagctcttttagggcaggcctggtggtgacaaaatctctcagcatttgcttgtctgtaaaggattttatttctccttcacttatgaagcttagtttggctggatatgaaattctgggttgaaaattcttttctttaagaatgttgaatattggcacccactctcttctggcttgtagggtttctgccgagagatccgctgttagtctgatgggcttccctttgagggtaacctgacctttctctctggctgcccttaacattttttccttcatttcaactttggtgaatctgacaattatgtgtcttggagttgctcttctcgaggagtatctttgtggtgttctctgtatttcctgaatctgaacgttggcctgccttgctagattggggaagttctcctggataatatcctgcagagtgttttccaacttggttccattctccccatcactttcaggtacaccgatcagacgtagatttggtcttttcacatagtcccatatttcttggaggctttgctcatttctttttattcttttttctctaaacttcccttctcgcttcatttcattcatttcatcttccgtcgctgataccctttcttccagttgatcgcattggctcctgaggcttctgcattcttcacgtagttctcgagccttggttttcagctccatcagctcctttaagcacttctctgtattggttattctagttatacattcttctaaatttttttcaaagttttcaacttctttgcctgtggtttgaatgtcctcccgtagctcagagtaattcgatcgtctgaagccttcttctctcagcttgtcaaagtcattctccatccacctttgttccgttgctggtgaggaactgcgttcctttggaggaggagagacgctctgcgttttagagtttccagtttttctgttctgttttttccccatctttgtggttttatctacttttggtctttgatgatggtgatgtacagatgggttttcggtgtggatgtcctttctgtttgttagttttccttctaacagacaggaccctcagctgcaggtctgttggaataccctgctgtgtgaggtgtcagtgtgcccctgctggggggtgcctcccagttaggctgctgaggggtcagggacccacttgaggaggcagtctgcccgttttcagatctccagctgcgtgctgggagaaccactgctctctacaaagctgtcagacagggacatttaagtctgcagaggttactgctgtctttttgtttgtctgtgccctgcccccagaggtggagcctacagaggcaggcaggcctccttgagctgtggtgggctccacccagttggagcttcccggctgctttgtttacctaagcaagcctgggcaatggcgggcgcccctcccccagcctcgctgccgccttgcagtttgatctcagactgctgtgctagcaatcagcgagactccgtgggcgtaggaccctcccagccaggtgcgggatataatctcgtggtgcgccgttttttaagccggtccgaaaagcgcaatattcaggtgggagtgacccaattatccaggtgcgtccgtcacccctttctttgactcggaaagggaactccctgaccccttgcgcttcccaagtgaggcaatgcctcgccctgcttcggcttgcgcacggtgcgcgcacccactgacctgcgcccactgtctggcactccctagtgagatgaacccggtacctcagatggaaatgcagaaatcacccatcttctgcgtcgctcacgctgggagctgtatactggagctgttcctattcggccatcttggctcctccccccataattt

SEQ ID NO: 10409 - DNA, 4840 bp, Homo sapiens
atttcatttttaattttattattattatactttaagttttagggtacatgtgcacaacgtgcagatttgttacatatgtatacatgtgtgaagttggtgtgctgcacccattaactcgtcatttagcattaggtatatctcctaatgctatccttcccccctcccccaccccacaacagtccccggtgtgtgatgttccccttcctgtgtccatgtgttctcattgttcagttcccccctatgagtgagaacatgcggtatttggttttttgtccttgtgatagtttgctgagaatgatggtttccagcttcatccatgtccctacaaaggacacgaactcatcattttttatggctgcatagtattccatggtgtatatgtgccacattttcttcatccagtctatcattgttggatatttgggttggttccaagtctttgctattgtgaagagtgccgcaataaacatacgtgtgcgtgtgtctttatagcagcatgatttataatcctttgggtatatacccagtaatgggatggctgggtcaaatggtatttctagctctagatcactgaggaatcgccacactgacttccacagtggttgaactagtttacagtcccaccaacagtgtaaaagtgttcctatttctccacatcctctccagcacctgttgtttcctgactttttaatgatcgccattctaactggtgtgagatggtatctcactgtggctttgatttgcatttctctgatggccagtgatgatgagcatttcttcatgtgttttttggctgcataaatgtcttcttttgagaaatgtctgttcatatccttcacccactttttgatggggttgtttgtttttttcttgtaaatttgtttgagttcattgtagattctggatattagccctttgtcagatgagtaggttgtgaaaattttctcccattctgcaggttacctgttcactctgatggtagtttcttttgctgtgcagaagctctttagtttaattagatcccatttgtcaattttggcttttgttgccattgcttttggtgttttagacatgaagtccttgcccgtgcctatgacctgaatggaaatgcctgggttttcttctagggtttttatggtttgaggtctaacatgtaagtctttaatccatcttgaattaatttttgtataaggtgtaaggaagggatccagtttcacctttctacatatggctagcctgttttcccagaaccatttattaaatagggaatcctttccccacttcttgtttttgtcaggtgtgtcaaagatcagatagttgtagatatgtgacattatttctgaggactctgttctgttgcattggtctatatctctgttttggtaccagtaccatgctgttttggttactgtagccttgtagtatagtttgaagtcaggtagcatgatgcctccagctttgctcttttggcttaggattgactttgcaatgcggggtcttttttggttccatgtgaactttaaagtagttttttccaattctgtgaagaaagtcattggtagcttgatggggatggcattgaatctataaattaccttgggcagtatggccattttcacgatattgattcttcctacccatgagcatggaatgttcttccatttgtttgtatcctcttttatttcattgagcagtggttttagttctccttgaagaggtccttcacatcccttgtaagttgggttcctaggtattttattccctttgaagcaattgtgaatgggagttcactcatgatttggctctctgtttgtctgttattggtgtataagaatgcttgtgatttttgtacattgattttgtatcctgagactttgctgaagttgcttatcagcttaaggagattttgggctgagacaatgggttttctagatatacaatcatgtcgtctgcaaacagggacaatttgacttcctcttttcctaattgaataccctttatttccttctcctgcctaattgccctggccagaacttccaacactatgttgaataggagtggtgagagagggcatccctgtcttgtgccagttttcaaagggaatgcttccagtttttgcccattcagtatgatattggctgtgggtttgtcatagatagctcttattattttgagatatgtcccatcaatacctaattattgagagttttcagcatgaagggttgttgaattttgtcaaaggccttttctgcatctattgagataatcatgtggtttttgtctttgggtctgtttatatgctggattacatttattgatttgcatatattgaaccagccttgcatcccagggatgaagcccacttgatcatggtggataagctttttgatgtgctgctggattcggtttgccagtattttactgaggacttttgcatcaatgttcatcaaggatattggtctaaaattctcttttttggttgtgtctctgcctggctttggtatcaggatgatgctggcctcataaaatgagttagggaggattccctctttttctattgattggaatagtttcaggaggaatggtaccagttcctccttgtacctctggtagaattgggctgtgaatccatctggtcctggactgtttttggttggtaagctattgattattgccacaatttcagatcctgttattgctctattcagagattcaacttcttcctggtttagtcttgggaaggtgtatgtgtccaggaatttatccatttcttctagattttctagtttatttgcgtagaggtgtttgtagtattctctgatggtagtttgtatttctgtgggatcagtggtgatatcacctttatcattttttattgcatctatttgattcttctctctttttttctttattagtcttgctaccggtctatcaattttgttgatccttttaaaaaaccagctcctggattcattaattttttgaagggttttttgtgtctctatttccttcagttctgctctgattttagttatttcttgccttctgctagcttttgaatgtgtttgctcttgcttttctagttcttttaattgtgatgttagggtgtcaattttggatctttcctgctttctcttgtgggcatttagtgttataaatttccctctacacactgctttgaatgtgtcccagagattgtggtatgttgtgtcttttttctcgttggtttcaaagaacatctttatttctgccttcattttgttatgtacccagtagtcattcaggagcaggttgttcagtttccatgtagttgagcggttttgagtgagtttcttaatcctgagttctagtttgattgcactgtggtctgagagacagtttgttataatttctgttcttttacatttgctgaggagagctttacttccaagtatgtggtcaattttggaataggtgtggtgtgatgctgaaaaaaatgtatattctgttgatttggggtggagagttctgtagatgtctattaggtccgcttggtgcagagctgagttcaaatcctgggtatccttgttaactttctgtctcattgatctgtctaatgttgacagtggggtgttaaagtctcccattattattgtgtgggagtctaagtctctttgtaggtcactcaggacttgctttatgaatctgggtgctcctgtattgggtgcatatatatttaggatagttagctcttcttgttgaattgatccctttaccattatgtaatggccttttttgtctcttacgatatttgttggtttaaagcctgttttatcagagactaggattgcaacacctgcctttttttgttttccattttcttggtagatcttcctccatccctttattttgagcttatgtgtgtctctgcacgtgagatgggtttcctgaatacagcacactgatgggtcttgactctttatccaatttgccagtctgtgtcttttaattggagcatttagcccatttacatttaaggttaatattgttatgtgtgaatttgatcctgtcgttatgatgttagctggttattttgctcattggttgatgcggtttcttcctagccttgatggtctttacaatttggcatgtttttgcagtggctggtactgactgttcctttccatgtttagcgcttccttcaggagctcttttagggcaggtctggtggtgacaaaatccctcagcatttgcttgtctgtaaaggattttatttctccttcacttatgaagcttagtttggctggatatgaaattctgggttgaaaattcttttctttaagaatgttgaatattggcccccactgtcttctggcttctagagtttctgccaagagatcagccgttagtctgatgggcttccctttgtgggtaacccgacctttctctctggctgcccttaacattttttccttcatttcaactttggtgaatctgacaattatgtgtcttggagttgctcttcttgaggagtatctttgtggcattctctgtatttcctgaatttgaatgttggcctgccttgctaggttgcagaagttctcctgggtaatatcctgaagagtgttttccagcttggttccattctccccatcactttcaggtacactaatcaaacgtagatttaatcttttcacatagttccatatttcttggaggctttgtttgtttctttttactctctttcctctaaacttctcttctcacttcatttcattaatttgatcttcattcacttatatactttcttccacttcatcaaatcggctactgaaggtattgcatgcatcatgtagttctc

SEQ ID NO: 10410 - DNA, 5008 bp, Homo sapiens
tatatatatatatatatatatatatatatatattatactttaagtcctagggtacatgtgcacaacatgcaggtttgttacatatctatacatgtgccatgttggtgtgctgcacccattaactcaaaatttactttaggtatatctcctaatgctatcactcccccctccccccaccccacaacaggccccggtgtgtgatgttccacttcctgtgtccaagtgttctcattgtttaattcccacctatgagtgagaacatgtggtgtttggttttttcgtccttgtgatagtttgctgaggatgatggtttccagcttcatccatgtccctacaaaggacatgaactcatcattttttatggctgcatagtattccacggtgtatatgtgccacattttcttaatccagtctatcattgttggacatttgggttggttccaagtctttgctattgtgaatagtgccgcaataaacatatgtgtgcatgtgtctttatagcagcatgatttataatcctttgggtatatacccagtaatgggattgctgggtcaaatggtatttctagttctagatccctgaggaatcaccacactgtcttccacaatggttgaactagtttacagtcccaccaacagtgtaaaagtgttcctatttctccacatcctctccagcacctgttgtttcctgactttttaatgatcgccattctaactggtgtgagatggtatctcactgtgcttttgatttgcacttctctgatggccagtgatgatgagcattttttcatgtgtcttttggctgcataaatgttttcttttgagaagcatctgttcatatcctttgcccacttattgatggggttgtttgtttttttcttgtaaatttgtttgagttctttgcagattctggatattagccccttgtcagatgagtagattgcaaaaattttctcccattttgtaggttgcctgttcactctgatggtagcttcttttgctatgcagaagctctttagtttagttagatcccatttgtcaattttggcttttgttgccattgcttttggtgttttagacatgaagtccttgcccatgcctgtgtcctgaatggtattgcctaggttttcttctagggtttttatggttttaggtctaacatttaagtctttaatccatcttgaattaatttttgtataaggtgtaaggaagggatccagtttcagctttctacatatggctagtcagttttcccagcatcatttgttaaatagggaatgctttccccatttcttgtttttgtcaggtttgtcaaagatcagatagttgtagatgtgtggtattatttctgagggctctgttctgttccattggtctatatctctgttttggtaccagtaccatgctgttttggttactgtagccttgtagaatagtttgaagtcaggtagcgtgatgcctccagctttgttcttttggcttaggattgacttggcaatgcaggctctttttttgttccttataaactttaaagtagttttttccagttctgtgaagaaagtcattggtagcttgatggggatggcattgaatctataaattaccttgggcagtatggccattttcacaatattgattcttcctatccatgagcatggaatgttcttccatttgtttgtgtcctcttttatttcgttgagcagtggtttgtagttctccttgaagaggtccttcacatcccttgtaagttggattcttaggtattttactctctttgaagcaattgtgaatgggagttcactcatgatttggctctctgtttgtctgttattggtgtataagaatgcttgtgatttttgcacattgattttgtatcctgagactttgctgaagttgcttatcaatcagcttaaggaaattttgggctgatatgatggggttttctagatatacaatcatttcatctgcaaacagggacaatttgacttcctcttttcctaattgaataccctttatttctttctcctgcctgattgccttggccagaacttccaacactgtgttgaatacgagtggtgagagagggcatccctgtcttgtgccacttttcaaagggaatgcttccagtttttgcccattcagtatgatattggctgtgggtttgtcataaatagctcttactattttgagatacgtcccatcaatacctaatttattgagagtttttagcatgaagggctgttgaattttgtcaaaggccttttctgcatctattgagataatcacgtggtttttgtctttggttctgtttatatgctggattacatttattgatttgctatgttgaaccagccttccatcccagggatgaagcccacttgatcatggtggataagctttttgatgtgctactggattcgctttgccagtattttattgaggattttcgcatcgatgttcatcagggatactggtctaaaattctctttttttgttgcgtctctgccaggcttcggtgtcaggatgatgctggcctcataaaatgagttagggaggattccctctttttctatatgattggaatagtttcagaaggaatggtaccagctccttcttgtacctctggtagaatttggctgtgaatccgtctggtcctggactttttttggttggtaagctattaattattgcctcaatttcagagcctgttattggtctattcagagattcaacttcctcccggtttagtcgtgggaggttgtatgtgtcgaggaatttatccatttcttctagattttctagtttatttgtgtaaaggtgtttatagtactctctgatggtagtttgtatttctgtgggatcggtggtgatatcccctttatcattttttattgcgtctatttgattcttctctcttttcttatttattagtcttgctagcagtctatcaattttgttgatcttttcaaaaaaccagctcctggattcattgattttttgaaggttttttttgtgtctctatctccttcagttctgctctgatcttagttatttcttgccttctgctagcttttgaatgtgtttgctcttgcttctctcgttcttttaattgtgatgttagggtgttaattttagatctttcctgctttctcttatgggcatttagtgctataaatttccctctacacactgctttaaatgtgtcccagagattctggtatgttgtgcctttgttctcgttggtttcaaagagcatctttacttctgccttcatttcattatgtacccagtagtcattcaggagcaggttgttcagtttccatgtagttgagtggttttgagtgagtttcttaattctgagttcttctatgattgcactgtggtctgagaggcagtttgttataatttctgttcttttacatttgctgaagagtgctttacttccaactatgtggtcagttttggaataagtgctatttggtgctgagaagaatgtatattctgttgatttggggtggagagttctgtagatgtctattaggtccacttggtgcagagctgagttcaattcctggatatgcttgttaactttctgtctcatggatcagcctaatgttgacagtggggtgttaaagtctcccattattattgtgtgggagtctaagtctctttgtaggtcactcaggacttgccttatgaatctgggtgctcttgtattggatgcatatatatttaggatagttagctcttcttgttgaattgatccctttactgttatgtaatggccttctttgtctcttttgatctttgttggtttaaagtctgttttatcagagactaggattgcaacccctgccttttgttgttttcctttgcttggtggatcttcctccatccctttattttgagcctatgtgtgtctctacacgtgagatgggtctcctgaatacagcacactgatgggtcttgactctttatccaatatgccagtttgtgtcttttaataggagcatttagcccacttacatttaaggttaatattgttatgtgtgaatttgatcctgtcattttgatgttagctggttattttgcttgttagttgatgcagtttcttcctagcatcaatggtctttacaatttggcatgtttttgcagtggctggtaccggttgttcctttccatgtttagtgcttccttcaggagctcttgtagggcaggcctggtggtgacaaaatctctcagcatttgcttgtctgtaaaggatttgatttctccttcacttatgaagcttagtttggctggatatgaaattctggattgaaaattcttttctttaagaatgttgaatattggcccccactctcttctggcttgtagaatttctgctgagagatcagctgttagtctgattggcttccctttgtgggtaacccaacctttttctctggctgcccttaacattttttccttcatttcaactttggtgaatctgacaattatgtgtcttggagttgctcttctcgaggagtatctttgtggcattctctgtatttcctgaatttgaatgttggcctgccttgctaggttggggaagttctcctggataatatcctgcagagtgttttccaacttagttccattctcctcgtcactttcaggtacaccaatcagatgtagatttggtcttttcacatagtcccatatttcttggaggctttgttcatttctttttattcttttttctctaaacttctcttctcacttcatttcattcatttgatcttcaatcactgataccctttcttccagctgaccaaattggctactgaagcttgtgcattcgtcacatagttctcctgccatggttttcagctccatcaggtcatttaaggccttctctacattggtaattctagttagccattcgtctaatcttttttcaaggtttttaacttctttgcgatggctcgaacttcctcctttagctcggagaagtttgtccatctga

SEQ ID NO: 10411 - DNA, 6045 bp, Homo sapiens
ataaatttcttttttttttttttttttattatactctaagttttagggtacatgtgcacattgtgcaggttagttacatatgtatacatgtgccatgctggtgcgctgcacccactaatgtgtcatctagcattaggtatatctcccaatgctatccctcccccctcccccgaccccaccacagtccccagagtgtgatattccccttcctgtgtccatgtgatctcattgttcaattcccacctatgagtgagaatatgcggtgtttggttttttgttcttgcgatagtttactgagaatgatggtttccaatttcatccatgtccctacaaaggatatgaactcatcattttttatggctgcatagtattccatggtgtatatgtgccacattttcttaatccagtctatcattgttggacatttgggttggttccaagtctttgctattgtgaatagtgccgcaataaacatacgtgtgcatgtgtctttatagcagcatgatttatactcatttgggtatatacccagtaatgggatggctgggtcaaatggtatttctagttctagatccctgaggaatcgccacactgacttccacaatggttgaactagtttacagtcccaccaacagtgtaaaagtgttcctatttctccgcatcctctccagcacctgttgtttcctgactttttaatgattgccattctaactggtgtgagatgatatctcatagtggttttgatttgcatttctctgatggccagtgatgatgagcatttcttcatgtgttttttggctgcataaatgtcttcttttgagaactgtctgttcatgtccttcgcccactttttgatggggttgtttgtttttttcttgtaaatttgtttgagttcattgtagattctggatattagccctttgtcagatgagtaggttgcaaaaattttctcccatgttgtaggttgcctgttcactctgatggtagtttcttttgctgtgcagaagctctttagtttaattagatcccatttgtcaattttgtcttttgttgccattgcttttggtgttttggacatgaagtccttgcccacgcctatgtcctgaatggtaatgcctaggttttcttctagggtttttatggttttaggtttaacgtttaaatctttaatccaccttgaattgatttttgtataaggtgtaaggaagggatccagtttcagctttctacatatggctagccagttttcccagcaccatttattaaatagggaatcctttccccattgcttgtttttctcaggtttgtcaaagatcagatagttgtagatatgcggcattatttctgagggctctgttctgttccattgatctatatctctgtttttgtaccagtaccatgctgttttggttactgtagccttgtagtatagtttgaagtcaggtagtgtgatgcctccaggtttgttcttttggcttaggattgacttggcaatgcgggctcttttttggttccatatgaactttaaagtagttttttccaattctgtgaagaaagtcattggtagcttgatggggatggcattgaatctgtaaattaccttgggcagtatggccattttcacgatattgattcttcctacccatgagcatggaatgttcttccatttatttgtctcctcttttatttccttgagcagtggtttgtagttctccttgaagaggtccttcacatcccttgtaagttggattcctaggtattttattctctttgaagcaattgtgaatgggagttcacccatgatttggctctctgtttgtctgttgttggtgtataagaatgcttgtgatttttgtacattgattttgtatcctgagactttgctgaagttgcttatcagcttaaggagattttgggctgagacgatggggttttctagataaacaatcatgtcgtctgcaaacagggacaatttgacttcctcttttcctaattgaataccctttatttccttctcctgcctgattgccctggccagaacttccaacactatgttgaataggagcggtgagagagggcatccctgtcttgtgctggttttcaaagggaatgcttccagtttttgcccattcagtatgatattggctgtgggtttgtcatagatagctcttattattttgaaatacatcccatcaatacctaatttattgagagtttttagcatgaagggttgttgaattttgtcaaaggctttttctgcatctatggagataatcatgtggtttttgtctttggctctgtttatatgctggattacatttattgatttgcgtatattgaaccagccttgcatcccagggatgaagcccacttgatcatggtggataagctttttgatgtgctgctggattcggtttgccagtattttattgaggatttttgcatcaatgttcatcaaggatattggtctaaaattctcttttttggttgtgtctctgcccggctttggtatcagaatgatgctggcctcattaaatgagttagggaggattccctctttttctattgattggaatagtttcagaaggaatggtaccagttcctccttgtacctctggtagaattcggctgtgaatccatctggtcctggactctttttggttggtaaactattgattattgccacaatttcagagcctgttattggtcgattcagagattcaacttcttcctggttcagtcttgggagagtgtatgtgtcgaggaatgtatccatttcttctagattttctagtttatttgcgtagaggtgtttgtagtattctctgatggtagtttgtatttctgtgggatcggtggtgatatcccctttatcattttttattgtgtctatttgattcttctctctttttttctttattagtcttgctagcggtctatcaattttgttgatcctttcaaaaaaccagctcctggattcattgattttttgaagggttttttgtgtctctatttccttcagttctgctctgattttagttatttcttgccttctgctagcttttgaatgtgtttgctcttgcttttctagttcttttaattgtgatgttagggtgtcaattgtggatctttcctgctttctcttgtaggcatttagtgctataaatttccctctacacactgctttgaatgcatcccagagattctggtatgtggtgtctttgttctcgttggtttcaaagaacatctttatttctgccttcatttcgttatgtacccagtagtcattcaggagcaggttgttcagtttccatgtagttgagcggctttgagtgagattcttaatcctgagttctagtttgattgcactgtggtctgagagatagtttgttataatttctgttcttttacatttgctgaggagagctttacttccaactatgtggtcaattttggaataggtgtggtgtggtgctgaaaaaaatgtatattctgttgatttggggtggagagttctgtagatgtctattatgtctgcttggtgcagagctgagttcaattcctgggtatccttgttgactttctgtctcgttgatctgtctaatgttgacagtggggtgttaaagtctcccattattaatgtgtgggagtctaagtctctttgtaggtcactgagaacttgctttatgaatctgggtgctcctgtattgggtgcataaatatttaggatagttagctcctcttgttgaattgatccctttaccattatgtaatggccttctttgtctcttttgatctttgttggtttaaagtctgttttatcagagactaggattgcaacccctgcctttttttgttttccatttgcttggtagatcttcctccatccttttattttgagcctatgtgtgtctctgcacgtgagatgggtttcctgaatacagcgcactgatgggtcttgactctttatccaacttgccagtctgtgtcttttaattgcagaatttagtccatttatatttaaagttaatattgttatgtgtgaatttgatcctgtcattatgatgttagctggtgattttgctcattagttgatgcagtttcttcctagtctcgatggtctttacattttggcatgattttgcagcggctggtaccggttgttcctttccatgtttagcgcttccttcaggagctcttttagggcaggcctggtggtgacaaaatctctcaacatttgcttgtctataaagtattttatttctccttcacttatgaagcttagtttggctggatatgaaattctgggttgaaaattcttttctttaagaatgttgaatattggcccccactctcttctggcttgtagggtttctgccgagagatccgctgttagtctgatgggctttcctttgagggtaacccgtcctttctctctggctgcccttaacattttttccttcatttcaactttggtgaatctgacaattatgtgtcttggagttgctcttctcgaggaatatctttgtggcgttctctgtatttcctgaatctgaacgttggcctgccttgctagattggggaagttctcctggataatatcctgcagagtgttttccaacttggttccattctccacatcactttcaggtacaccaatcagacgtagatttggtcttttcacatagtcccatatttcttggaggctttgctcatttctttttattcttttttctctaaacttcccttctcacttcatttcattcatttcatcttccattgctgataccctttcttccagttgatcgcatcggctcctgaggcttctgcattcttcacgtagttctcgagccttggttttcagctccatcagctcctttaagcacttctctgtattggttattctagttatacattcttctaattttttttcaaagttttcaacttctttgcctttggtttgaatgtcctcccgtagctcagagtaatttgatcgtctgaagccttcttctctcagctcgtcaaaatcattctccatccagctttgttctgttgctggtgaggaactgcgttcctttggaggaggagaggcgctctgcgttttagagtttccaatttttctgttctgttttttccccatctttgtggttttatctacttttggtctttgatgatggtgatgtacagatgggttttcggtgtagatgtcctttctggttgttagttttccttctaacagacaggaccctcagctgcaggtctgttggaatatcctgccgtgtgaggtgtcagtgtgcccctgctggggggtgcctcccagttaggctgctcaggggtcaggagtcagggacccacttgaggaggcagtctgcccgttctcagatctccagctgcgtgctgggagaaccactgctctcttcaaagctgtcagacagggacagttaagtctgcagaggttactgctgtctttttgtttgtctgtgccctgcccccagaggtggagcctacagaggcaggcaggcctccttgagctgtggtgggctccacccagttcgagcttccgggctgctttgtttacctaagcaagcctgggcaatggcgggcgcccctcccccagcctcgttgccgccttgcagtttgatctcagactgctgtgctagcaatcagcgagattccgtgggcgtaggaccctccgagccaggtgtgggatatagtctcgtggtgcgccatttcttaagccggtctgaaaagcgcaatattcgggtgggagtgacccgattttccaggtgcgtccgtcacccctttctttgactcggaaagggaactccctgaccccttgcgcttcccaggtgaggcaatgcctcgccctgcttcggctcgcgcacggtgtgcacacacactggcctgcgcccactgtctggcactccctagtgagatgaacccggtacctcagatggaaatgcagaaatcaccgtcttctgcgtcgctcacgctgggagctgtagaccggagctgttcctattcggccatcttggctcctcccta

SEQ ID NO: 10412 - DNA, 10422 bp, Homo sapiens
ttttttttttttttttttttttttttttatcagagtgacaacaggcagagaaggaagatgggtggtagtagtcttagtgttttataacctaattttggacatttttttctttattatactttaagttctagggtacatgtgcacaacgtgcaggtttgttacataggtatacatgtgccatgttgttttgctgtacccatcaacttgtcatttacattaggtatttctcctaatgctatccctcccccagcccaattttggacatattatcccatcccttttgatagtaagaagtcactaggtccacccctcactcaaggtgagggatttacacaaagatgtgaataccaagatccagaattcagaaaatctttgtgggccattttggaagccatctaccacacagctctacttctactagccaggggtttctgagtgttttttttttataatttccctgtaccctagaactcctttaaacttggtccttttggaaatacattttccttaaattgtcctatgtatatcatctgtttaccaataagaccctaacgaatgcaagtattatcccacaagcaaagggaagcgattgagactctgcgtttcttgataagggaattcttcatgaaagggtttgaagcaggggagtcatttgtccaaagtggaggatgggatctgaaatggggaagtcaatgtggagaagattcagtgtggaggtcaatgggtgatcgatgtggaagggttcggtgtggagggagagtgttggagaagtggtaggattggaggtaggaggacagtttagagattgaacaggaatccaggtgaggaaaaatgatgcccaaatcagtggcagtggtaatacagatgggaggatgtgtttgagagatgtttaggaggttcaggcaacagaatttgggggctgagaagacgtagggagaatttgagaataatgaggaggaatgaggagtcttttccctaggctatatctgtgattctcagaaagtctcctgggataaacttttgaagcaaatagctgtagaactggattgcctgcccctctcttccctgtatgtagataaattgagagagcccaagacagagtctgtaaatggaccaggatatctgggtatttgttctggctgccccactccactagctcatttatggccatgcgtaagttgttcctactttttgttaagtctagttctttaatttgtgaagtaaggggttagctatgctgggtgatctctaaagcatttttttagatctaacattctaggtcttttgtaatctaaaatagagaaacccacattttattattttactacttcatagcctcctttactttatttttaattttctttaaaaagtgaaccgagccaaaactttaaaaacaggtaagtcagaatgtttaaaacaaatggcttttggtcttcagcacttagggcttgttttttttcactctttttttttttttaacattaaataaaattcctggccacatgcagtggctcatgcctgtaatcccagcactttggaaggccaaggcaggcagatcacctgagatcaggagtctgagatcagcttggccaacatggcaaaaccctgtctctactaaaaatacaaaaattggccaggcatggtggcacacgcctgtaatcccagctacttgggaggctgaggcaggagaatcacttgagcctgggaggcagaagctacagtgagcagagatggtgccaccgcactccagcctgggtgacagagtgagactctgtctcaaggactaacttcagaaagtgttcagggtaactaatttaattgttcagtctacattttaagattcctttcattaaattttttgaagctttttttattgccttaggaaaaaactgttctgttttccttttcccccaggattagacttgctggaagaaaagctcccccatcacattatcttggttggcaggagacaggcatgcaggcaagtcccagaccagtggtatcagtgtccacagatgaaagggatggtatttttagtgtggggaatagctcagtgtggtttcatatgatgcattttgatgagtataactttctaatttgaaaagcctttggtgtgtttacgtcttcatttaatctttccaatttctccccctcatttcatttcaaggagtctaagatttttcattttggcaggcagttgatcactcttgttattgacactcctttgcagtattcttacactgtggagaacctgaatggctgtaaattccctattggcaggattttggagaaaaaaaaataaaagcgaatagatacctgtgaaagaaaaaataaatacattttaaaataattggaggatagaaggattacttttaaaagttctgttagtttgccagtacagagcaaaacagaaaatggacacatttttttgatcagcattctctgttctaaaaacttatttcaataagggaaagaatatgcaaagacatatatatagatatagacatacacccactccaaaagaatagtgatatctttctggtaaataatatccaaagtttggaaagaaatcaaatatccattgaaaggaaactaattttagggggataggattcacatttggaatgatctcatagttagtttactggatttctgttctggtcaacctaataattgtcttgaaagtgagatggctactgacattctagggtatggttagggagaatattctttatttttaaaaccctacaagattttttcattttttaaaataaaatgtcttatttgttaaatatgatggttatgtaggtttactcaaaagtgattttttccattgctctttattattttctgcatctctgtgcttacagctgaaataatttttagtattttctttagtgcaggtctgctgaagataaattctctcagttcttgtttgtctaaaatatctttgggccaggcacgttggcttacgcctgtaatcccagcacttgggaggccgaggcaggaagatcacttggcccaagagtttgaggccagtctgggtaacatagggagacaacatctctacaaaaagaaagaaataaaataaaaaaaaattagctgtgcatgttagtacatgcctgtagtcccagctactcaggaggtggaggtgggggaatcacttgagcctgggaggtcaaggctgcagtgggccatgattgtgccaccacactctagcctgggcaacagagtgaggcatggtttcaaagacaaaaagaaagtctttgtttcatcttcattttgtgaagggtgttttttctagatttagaattctagattgtcggttattttatttatcataactgtcattgtctcttggctttcattgtttctgttgggcagttggctgtaagtttgattattcctccttcgaatgtaatctgttttttcctttggctgcttttaagatttatttcactttggttttagcagttttattataaggtgtgattttctttttaatttattctccttagagcttatgagacttctttttatttggttggtgcttggggattctttttttttttgatggaggcttgctctgtcacccaggctggagtgcagtggtgcaaccttggctcactgcagctgccacctcctggaatcaagtgattctcctgccccaacctcccgagtagctgggactagaggtgcgtgccaccacgcccaaataatttttgtatttttagtacagtcggggtttcaccatgttgaccaggatggtctcgatctcttgacctcgtgatcctcccacctcagcctcccaaagtgctgggattataggcatgagccaccatgcccgactgtgcttgggaattcttaaccattaacttttcaaatattgtttatgcctagttttctcatttctctcttcttgggattgtgttcatatgttaggacctttttcctctagatttcatgtgtttcttatgctcttttctgtattttttattcctttgtcattttgtgcttcaacatggatattttctaccgacttatcctccagttcactaattctctcttcaatatattagataatctgtggttaaagtcatcccattgaatttgtaaccttagttattgattttttaagttctaaaattttcatttaattttctttttatagtttctagttttctgctaaacttctctattttgtcatttaattcctaaacttattaatcataattgtttcaaagtccatatctgatactttaaagtctttatcacttgctggactgtttctactaaccttttctttcttttttttcttttttttttgttcttctgtttatttattttattttttattttttttaattattatactttaagttttagggtacatgtgcacattgtgcaggttagttacatatgtatacatgtgccatgctggtgcgctgcacccactaactcgtcatctagcattaggtatatctcccaatgctatccctcccccctccccccaccccacaacagtccccagagtgtgatgttccccttcctgtgtccatgtgatctcattgttcagttcccacctatgagtgagaatatgcggtgtttggttttttgttcttgcgatagtttactgagaatgatgatttccagtttcatccatgtccctacaaaggacgtgaactcattcttttttatggctgcatagtagtccatggtgtatatgtgccacattttcttaatccagtctatcattgttggacatttgagttggttccaagtctttgctcttctgaataatgccgcaataaacatacatgtgcatgtgtctttatagcagcatgatttatagtcctttgggtatatacccagtaatgggatggctgggtcaaatggtatttctagttctagatccctgaggaatcaccacactgacttccacaatggttgaactagtttacagtcccaccaacagtgtaaaagtgttcctatttctccacatcctctccaacacctgttgtttcctgactttttaatgattgccattctaactggtgtgagatggtatctcattgtggttttgatttgcatttctctgatggccagtgatgatgagcattttttcatgtgtcttttggctgcataaatgtcgtcttttgagaagtgtctgttcatgtccttcgtccactttttgatggggtggtttgtttttttcttgtaaatttgtttgagttcattgtagattctggatattagccctttgtcagatgagtaggttgcgaaaattttctcccattttgtaggttgcctgttcactctgatggtagtttcttttgctgtgcagaagctctttagtttaattagatcccatttgtcaattttggcttttgttgccattgcttttggtgttttagacatgaagtccttgcccatgcctatgacctgaatggtaatgcctaggttttcttctagggtttttatggttttaggtctaacgtttaagtctttaatccatcttgaattgatttttgtataaggtgtaaggaagggatccagtttcagctttctacatatggctagccagttttcccagcaccatttattaaatagggaatcctttctccattgcttgtttttctcaggtttgtcaaagatcagatagttgtagatatgtggcattatttctgagggctctgttctgttccgttgatctatatctctgttttggtaccagtaccatgctgttttggttactgtagccttgtagtatagtttgaagtcaggtagtgtgatgcctccagcttcgttcttttggcttaggattgccttggcgatgcgggctcttttttggttccatatgaactttaaagtagttttttccaattctgtgaagaaaggcattggtagcttgatggggatggcattgaatctataaattaccttgggcagtatggccattttcacgatattgattctccctacccatgagcatggaatgttcttccatttgtttgtatcctcttttatttccttgagcagtggtttgtagttctccttgaagaggtccttcacatcccttgtaagttggattcctaggtattttattctctttgaagcaattgtgaatggagttcactcatgatttggctctctgtttgtctgttgttggtgtataagaatgcttgtgatttttgtacattgattttgtatcctgagactttgctgaagttgcttatcagcttaaagagattttgggctgagacaatggggttttctagatatacaatcatgtcgtctgcaaacagggacaatttgacttcctcttttcctaattgaataccctttatttccttctcctacctaattgccctggccagaacttccaacactatgttgaataggagtggtgagagagggcatccctgtcttgtgccagttttcaaagggaatgctgccagtttttgcccattcagtatgatattagctgtgggtttgtcatagatagctcttattattttgaaatacgtcccatcaatacctaatttattgagagtttttagcatgaagggttgttgaattttgtcaaaggccttttctgcatctattgagattatcatgcggtttttgtctttggttctgtttatatgctggattacatttactgatttgcatatattgaaccagccttgcatcccagggatgaagcccacttgatcatggtggataagctttttgatgtgctgctggattcgttttgccagtattttattgaggatttttgcatcaatgttcatcaaggatattggtctaatattctctttttatgttgtgtctctgccaggctttggtatcagggtgacgctggcctcataaaatgagttagggaggattccctcttttcctattgattggaatagtttcagaaggaatggtaccagctcctccttgtacctctggtagaattccgctgtgaatccatctggtcctggactctttttggttggtaagctattgattattgccacaatttcagatcctgttattggtctattcagagattcaacttcttcctggtttagtcttaggagagtgtatgtgtcgaggaatttatccatttcttctagactttctagtttatttgcgtagaggtgtttatagtattctctgatggtagtttgtatttctgtgggatcggtggtgatatcccctttatcattttttattgtgtctatttgattcttctctctttttttctttattagtcttgctagcggtctatctattttgttgatcctttcaaaaaaccagctcctggattcattaattttttgaagggttttttgtgtctctatttccttcatttctgctctgattttagttatttcttgccttctgctagcttttgaatgtgtttgctcttgcttttctagttcttttaattgtgatgttagggtgtcaattttggatctttcctgctttctcttgtgggcatttagtgctataaatttccctctacacactgctttgaatgcgtcccagagattctggtatgttgtgtctttgttctcattggtttgaaagaacatctttatttctgccttcatttcgttatgtacccagtagtcattcaggagcaggttgttcagtttccatgtagttgagtggatttgagtgagattcttaatcctgagttctagtttgattgcactgtggtctgagagatagtttgttataatttctgttcttttacatttgctgaagagagctttacttccaagtatgtggtcaattttggaataggtgtgatgtgctgaaaaaaatgtatattctgttgatttggggtggagagttctgtagatgtctattaggtctgcttggtgcagagctgagttcaattcctgggtatccttgtggactttctatctcattgatctgtctaatgttgacagtggggtgttaaagtctcccattattaatgtgtgggagtctaagtctctttgtaggtcactcaggacttgctttatgaatctgggtgctcctgtattgggtgcatatatatttaggatagttagctcttcttgttgaattgatccctttaccattatgtaatggccttctttgtctcttttgatctttgttggtttaaagtctgttttatctgagactaggattgcaacccctgcctttttttgttttccatttgcttggtagatcttcctccatccttttattttgagcctatgtgtgtctctgcacatgagatgggtttcctgaatacagcacactgatgggtcttgactctttatccaatttgccagtctgtgtcttttaattggagcatttagtccatttacatttaaagttaatattgttatgtgtgaatttgatcctgtcattatgatgttagctggtgattttgctcgttagttgatgcagtttcttcctagtctcgatggtctttacattttggtatgattttgcagcggctggtaccggttgttcttttccatgtttagcacttccttcaggagctcttttagggcaggcctggtggtgacaaaatctctcagcatttgcttgtctgtaaagtattttatttctccttcacttatgaagcttagtttggctggatatgaaattctggattgaaaattcttttctttaagaatgttgaatattggcccccactctcttctggcttgtagggtttctgctgagagatccggtgttagtctgatgggcttccctttgagggtaacccgacctttctctctggctgcccttaacattttttccttcatttcaactttggtgaatctgacaattatgtgtcttggagttgctcttctcgaggagtatctttgtggcgttctctgtatttcctgaatctgaaagttggcctgccttgctagattggggaagttctcctggataatatcctgcagagtgttttccaacttggttccattctccccatcactttcaggtacaccaatcagacgtagatttggtcttttcacatagtcccatatttcttggaggctttgctcatttctttttattcttttttctctaaacttcccttctcacttcatttcattcatttcatcttccattgctgataccctttcttccagttgatcgcatcggctcctgaggcttctgcattcttcacatagttgtcgagccttggttttcagctccatcagctcctttaagcacttctctgtattgattattctagttatacattcttctaaatttttttcaaagttttcaacttctttgcctttggtttgaatgtcctcccgtagctcagagtaatttgatcgtctgaagccttcttctctcagctcatcaaagtcattctccgtccagctttgttccgttgctggtgaggaactgcttccctttggaggaggagaggcgctctgctttttagagtttcccgtttttctattctgttttttccccatctttgtggttttatctgcttttggtgtttgatgatggtgatgtacagatgtttttggtgtgggtgtcctttctgtttgttagttttccttctaacagacaggaccctcagctgcaggtctgttggaatacccggccgtgtgaggtgtcagtgtgcccctgctggggggtgcctcccagttaggccgctcgggggtgcctcccagttaggctgctcgggggtcaggggtcagggacctacttgaggaggcagtctgcccgttctcagatctccagctgcgtgctgggagaaccactgctctcttcaaagctgtcagacagggacatttaagtctgcagaggttactgctgtctttttgtttgtctgtgccctgcccccagaggtggagcctacagaggcaggcaggcctccttgagctgtggtgggctccacccagttcgagcttcccggctgctttgtttacctaagcaagcctgggcaatggtgggcacccctcccccagcctcgttgccgccttgcagtttgatctcagactgctgtgctagccatcagcgagactccgtgggcgtaggaccctccgagccaggtgtgggatataatctcgtggtgcgccgttttttaagcccgtcggaaaagcgcagtattcgggtgggagtgacccgattttccaggtgccctccgtcacccctttctttgactaggaaagggaactccctgaccccttgcgcttcccgagtgaggcaacgcctcgccctgcttcggctggcgcatggtgcgtgcacccactgacctgcgcccagtgtctggcactccctagtgagatgaacccggtacctcagatggaaatgcagaaatcacccgtcttctgcgtcgctcaggctgggagctgtagactggagctgttcctatttggccatcttggctcctccctccttctgtttattttt

SEQ ID NO: 10413 - DNA, 5928 bp, Homo sapiens
ttatcctatctttctttttttaatttaattttattttattattattatactttaagttttagggtacatgtgcataatgtgcaggttagttacatatgtatacatgtgccatgttggtgtactgcactcattaacttgtcatttaacattaggtatatctcctaatgctatccctcccctctccccccaccccacaacagtccccggagttcgatgttccccttcctgtgtccatgtgttctcattgttcaattcccacctatcagtgagaacatgcggtgtttggttttttgtccttgcgatagcttgctgagaatgatgatttccagtttcatccatgtccctacaaaggacatgaactcatcattttttatggctgcatagtattccatggtgtatatgtgccacattttcttaatccagtctatcattgatggacatttgggttggttccaagtctttgcttttgtgaatagtgccgcaataaacatacgtgtgcatgtgtctttatagcagcatgatttatagtcctttgggtatatacccagtaatgggatggctgggtcaaatggtatttccagttctagatccctgaggaatcgccacactgacttccacaagggttgaactagtttacagtcacaccaacagtgtaaaagtgttcttgtttctccacatcctctccagcacctgttgtttcctgactttttaatgatcaccattctaactggtgtgagatggcatcttattgtggttttgatttgcatttctctgatggccagtgatgatgagcactttttcatgtgttttttggctacataaatgtcttcttttgagaagtgtctattcatatccttcgcccactttttgatggggttgtttgtttttttcttgtaaatttgtttgagttcattgtagattctggatattagccctttgtcagatgagtaggttgggaaaattttctcccattttgtaggttgcctgttcactctgatggtagtttcttttgctgtgcagaagctctttagtttaattagatcccatttgtccattttggcttttgttgccattgcttttggtgttttagacatgaagtccttgcccatgcctatgtcctgaatggtattgcctaggttttcttctagggttttatggttttaggtctaacatgtaagtctttaatccatcttgaattaatttttgtataaggtgtaaggaagggatccagtttcagctttctacatatggctagccagttttcccagcaccatttattaaatagggaatcctttccccattgcttgtttttgtcgggtttgtcaaagatcagatagttgtagatatgcggcattatttctgagggctctgttctgttccattgatctatatctctgttttggtaccagtaccatgctgttttggttaccgtagccttgtagtatagttagaagtcaggtagtgtgatgcctccggctttgttcttttggcttaggattgacttggcaatgcgggctcttttttggttccatatgaactttaaagtagttttttccaattctgtgaagaaagtcatttgtagcttgatggggatggcattgaatatataaattaccttgggcagtatggccattttcacgatattgattcttccaacccatgagcatggaatgttcttccatttgtttgtatcctcttttatttcattgagcagtggtttgtagttctctttgaagaggtccttcacgtcccttgtaagttggattcctacccattttattctctttgaagcaattgtgaatgggagttcactcatgatttgactctctgtttgtctgttattggtgtataacaatgcttgtgatttttgtacattgattttgtaccctgagactttgctgaagttgcttatcagcttaaggagattttgggctgagacaatggggttttctagatatacaatcatgtcatctgcaaacagggacaatttgacttcctcttttcctaattgaataccctttatttccttctcctgcctgattgccctggccagaacttccaacactatgttgaataggagtggtgagagagggcatccctgtcttgtgccagttttcaaagggaatgcttccagtttttgcccattcgttatgatattggctgtgggtttgtcatagatagctcttattattttgagatatgtcccatcaatacctaatttattgagagtttttagcatgaagcattgttgaattttgtcaagggccttttctgcatctattgagataatcatgtggtttttgtctttggttctgtttatatgctggattaccgttattgatttgcatatgttgaaccagccttgcattccagggatgaagcccacttgatcatggtggataagctttttgatgtgctgctggatttggtttgccagtattttattgaggatttttgcatcaatgttcatcaaggatattggtctaaaattctcttttttggttgtgtctctgccaggctttggtatcaggatgacgctggcctcataaaatgagttagggaggattccctctttttctgttgattgtaatagtttcagaaggaatggtaccagctcctccttgtacctctggtagaatttggctgtgaatccatctcgtcctggactctttttggttgataagctattgattattgccacaatttcagagcctgttattggtctattcagagattcaacttcttcctggtttagtcttgggagggtgtatgtgttgaggaatttatccatttcttctagattttctagtttatttgcgtagaggtgtttgtagtattctctgatggtagtttgtatttctgtgggattggtagtgatatcccctttatcattttttattgcgtctatttgattcttctctcttttcttatttattagtcttgctagcggtctatcaattttgttgatcttttcaaaaaaccagctcctggattcattaatttttttgaagggttttttgtgtctctgtttccttcaattctgctctgattttagttatttcttgccttctgctagcttttgaatgtgtttgctcttgcttttctagttcttttaattgtgatgttagggtgtcaattttagatctttcctgctttctcttgtgggcatttagtgctataaatttccctctacacactgctttgaatgtgtcccagagattctggtatgttgtgtctttattctcattggtttcaaagaacatctttatttctgccttcatttcattatgtacccagtagtcattcaggagctggttgttcagtttccatgtagttgagcagttttgagtgagtttcttaatcctgagttctagtttgattgcactgtggtctgagagacagtttgttataatttctgttcttttacatcttctgaggagtgctttacttccaactgtgtggtcagttttggaataggtctggtgtggtgccgaaaaaaatgtatattctgttgatttggggtggagagttctgtagatgtctattaggtctgcttggtgcagagctgagttcaattcctgggtatccttgttaactttctgtctcgttgatttgtctaatgttgacagtggggtgttaaagtctcccattattattgtgtgggagtctaagtctctttgtaggtcactcaggacttgctttatgaatctgggtgctcctgtattgggtgcatatatatttaggatagttagctcttcttgttgaattgatccctttatcattatgtaatggccttctttgtctcttttgatctttgttggtttaaattctgttttatcagagactaggattgcaacccctaccattttttgttttccatttgcttggtagatcttcctccatccctttattttgagcctatgtgtgtctctgcacgtgagatgggtttcctgaatacagcacactgatgggtcttgactctttatccaatttgccagtctgtgtcttttaattggagcatttagcccatttacatttaaagttaatattgttatgtgtgaatttgatcctgtcattatgatgttagctggttattttgctcgttagttgatgcagtttcttcctagccttgatggtctttacaatttggcatgtttttgcagtggctggtaccggttgttcctttccatgtttagtgcttccttcaggagctcttttagggcaggcctggtggtgacaaaatctctcagcatttgcttgtctgtaaagtattttatttctccttcacttatgaagcttagtttggctggatatgaaattctgggttgaaaattcttttctttaagaatgttgaatattggcccccactctcttctggcttgtagagtttctgccgagagatccgctgttagtctgatgggcttccctttgtggataacccgacctttctctctggctgcccttaacattttttccttcatttcaactttggtgaatctgacaattatatgtcttggagttgcttttctcgaggagtatctttgtggtgttctctgtatttcctgaatctgaatgttggcctgccttgctagattggggaagttctcctggataatatcctgcagagtgttttctaacttcgttccattctccccgtcactttcaggtacaccaatcagacgtagatttggtcttttcacatagtcccatatttcttggagactttgttcatttctttttattcttctttctctaaacttcccttctcgcttcatttcattcatttcatcttccgtcactgataccctttcttccagttgatcgcattggctcctgaggcttctgcattcttcacgtagttctcgagccttggctttcagctccatcagctcctttaagcatttctctgtattggttattctagttatacattcatctaattttttttcaaagtttttaacttctttgccattggtttgaatttcctcctgtagctcagagtagtttgatcatctgaagccttcttctctcaactcatcaaagccattctccgtccagctttgttccgttgctggtgaggaactgcattcctttggaggaggagaggcgctctgctttttagagtttccagtttttctgctctgttttttccccatctttgtggttttatctacctttggtctttgatgatggtgatgtacagatgggtttttggtgtggatgtcctttctgtttgttagttttccttctaacagacaggaccctcagttgcaggtctgttggagtttgctagaggtccactccagaccgtttgcctgggtatcagcagcggtggctgcagtacagcggtggctgtagaacagcggattttcgtgaaccgcaaatgctgctgcctgatcggtcctctggaagttttgtctcagaggagtacctggctgtgtgaggtgtcagtctgcccctacttgggggtgcctcccagttaggctgctcgggggtcagggacccacttgaggaggcagtctgcctgttctcagatctccagctgcgtgctgggagaaccactactctcttcaaagctgtcagacaggaacgtttaagtctgcagaggttactgctgtctttttgtttgtctgtgccctgcccccagaggtggagcctacagaggcaggcaggcctccttgagctgtggtgggccccacccagttcgagcttcccggctgctttgtttacctaagcaagcctgggcaatggcaggcgcccctcccccagccttgctgccaccttgcagtttgatctcagactgctgtgctagcaatcagcgagactccgtgggcataggacccgccgagccatgtgcagaatataatctcctgttgtgctgttttttaagcctgttggaaaagcgcagtattagggtgggagtgaccc

SEQ ID NO: 10414 - DNA, 7194 bp, Homo sapiens
atgcttttttcctgaaaattttcttttttttttttaattatactttaagttttagggtacatgtgcacattgtgcaggttagttacatacgtatacgtgtgccatgctggtgcactgcacccactaactcgtcatctagcattaggtatatctcccaatgctatacctcccccctccccccaccccacaacagtctccagtgtgatattccccttcctgtgtccatctgttctcattgttcaattcccacctatgagtgagaatatgcggtgtttggttttttgttcttgcaatagtttactgagaatgatgttttccaatttcatccatgtccctacaaaggacatgaactcatcattttttatggctgcatagtattccatggtgtatatgtgccacattttcttaatccagtctatcattgttggacatttgggttggttccaagtctttgctattgtgaataatgccgcaataaacatacatgtgcatgtgtctttatagcagcatgatttatagtcctttgggtatatacccagtaatgggatggctgggtcaaatggtatttccagttctagatccctgaggaatcgccacactgacttccacaatggttgaactagtttacagtcccaccaacagtgtaaaagtgttcctatttctccacatcctctccagcacctgttgtttcctgactttttcatgattgccattctaactggtgtgagatggtatctcattgtggttttgatttgcatttctctgatggccagtgatgatgagcattttttcatgtgttttttggctgcataaatgtcttcttttgagaagtgtctgttcatgtccttcgcccactttttgatggggttgtttgtttttttcttgtaaatttgtttgagttcattgtagattctggatattagccctttgtcagatgagtaggttgcgaaaattttctcccatgttgtaggttgcctgttcactctgatggtagtttcttttgctatgcagaagctctttaatttaattagatcccatttgtcaattttgtcttttgttgccattgcttttggtgttttagacatgaagtccttgcccatgcctatgtcctgaatggtaatgcctaggttttcttctagggtttttatggttttaggtctaacgtttaagtctttaatccatcttgaattgatttttgtataaggtgtaaggaagggatccagtttcagctttctacatatggctagccagttttcccagcaccatttattaaatagggaatcctttccccattgcttgtttttctcaggtttgtcaaagatcagatagttgtagatatgcggcgttatttctgagggctctgttctgttccattgatctatatctctgttttggtaccagtaccatgctgttttggttactgtagccttgtagtatagtttgaagtcaggtagcgtgatgcctccagctttgttcttttggcttaggattgccttggcgatgcgggctcttttttggttccatatgaactttaaagtagttttttccaattctgtgaagaaagtcattggtagcttgatggggatggcattgaatctgtaaattaccttgggcagtatggccattttcacgatattgattcttcctacccatgagcatggaatgttcttccatttgtttgtatcctcttttatttccttgagcagtggtttgtagttctccttgaagaggtccttcacatcccttgtaagttggattcctaggtattttattctctttgaagcaattgtgaatgggagttcactcatgatttggctctctgtttgtctgttgtttggtgtataagaatgcttgtgatttttatacattgattttgtatcctgagactttgctgaagttgcttatcagcttaaggagattttgggctgagacaacggggttttctagatatacaatcatgtcgtctgcaaacagggacaatttgacttcctcttttcctaattgaataccctgtatttccttctcctgcctaattgccctggccagaacttccaacactatgttgaataggagtggtgagagagggcatccctgtcttgtgccagttttcaaagggaatgcttccagtttttgcccattcagtatgatattggctgtgggtttgtcatagatagctcttattattttgaaatacgtcctatcaatacctaatttattgagagtttttagcatgaagggttgttgaattttgtcaaaggctttttctgcatctattgagataatcatgtggtttttgtctttggctctgtttatatgctggattacatttattgatttgcgtatattgaaccagccttgcatcccagggatgaagcccacttgatcatggtggataagctttttgatgtgctgctggattcggtctgccagtattttattgaggatttttgcatcaatgttcatcaaggatattggtctaaaatcctctttttttgttgtgtctctgcctggctttggtatcagaatgatgttggcctcataaaatgagttagggacgattccctctttttctattgattggaatagtttcagaaggaatggtaccagttcctccttgtacctctggtagaattcagctgtgaatccatctggtcctggactctttttggttggtaagctattgattattgccacaatttcagatcctgttattggtctattcagagattcaacttcttcctggtttagtcgtgggagagtgtatgtgtcgaggaatttatccatttcttctagattttctagtttatttgcgtagaggtgtttgtactattctctgatcgtagtttgtatttctgtgggatcggtggtgatatcccctttatcattttttattgcgtctattagattcttctctttttttctttattagtcttgctagcggtctatcagttttgttgatcctttcaaaaaaccagctcctggattcattaattttttgaagggttttttgtgtctctatttccttcagttctgctctgatcttagttatttcttgccttctgctagcttttgaatgtgtttgctcttgcttttctagttcttttaattgtgatgttagggtgtcaattttggatctttcctgctttctcttgtggacatttagtgctataaatttccctctacacactgctttgaatgcgtcccagagattctggtatgttgtgtctttgttctcattggtttcaaagaacatctttatttctgccttcatttcgttatgtacccagtagtcattcaggaacaggttgttcagtttccatgcagttgagcggttttgagtgagattcttaatcctgagttctagtttgattgcactgtggtctgagagatagtttgttataatttctgttcttttacatttgctgaggagagctttacttccaagtatgtggtcaattttggaataggtgtggtgtggtgctgaaaaaaatgtatattctgttgatttggggtggagagttctgtagatgtctattaggtctgcttggtgcagagctgagttcaattcctgggtatccttgttgactttctgtctcattgatctgtctaatgttgacagtggggtgttaaagtctcccattattaatgtgtgggagtctaagtctctttgtaggtcactcaggacttgctttatgaatctgggtgctcctgtattgggtgcatatatatttacgatagttagctcttcttgttgaattgatccctttaccattatgtaatggccttctttgtctcttttgatctttgttggtttaaagtctgttttatcagagactaggattgcaacccctgcctttttttgttttccatttgcttggtagatcttcctccatccttttattttgagcctatgtgtgtctctgcacgtgagatgggtttcctgaatacagcacactgatgggtcttgagtctttatccaatttgccagtctgtgtcttttaattggagcatttagtccatttacatttaaagttaatattgttatgtgtgaatttgatcctgtcattatgatgttagctggtgattttgctcattagttgatgcagtttcttcctagtctcgatggtctttacattttggcatgattttgcagcggctggtaccggttgttcctttccatgtttagcgcttccttcaggagctcttttagggcaggcctggtggtgacaaaatctctcagcatttgcttgtctgtaaagtattttatttctccttcgcttatgaagcttagtttggctggatatgaaattctgggttgaaaattcttttctttaagaatgttgaatattggcccccactctcttctggcttgtagggtttctgccgagagatctgctgttagtctgatgggcttccctttgagggtaacccaacctttctctctggctgcccttaacattttttccttcatttcaactttggtgaatctgacaattatgcgtcttggagttgctcttctcgaggagtatctttgtggcgttctctgtatttcctgaatctgaacgttggcctgccttgctagattggggaagttctcctggataatatcctgcagagtgttttccaacttggttccattctccccatcactttcaggtacaccaatcagacatagatttggtcttttcacatagtcccatatttcttggaggctttgctcgtttctttttattcttttttctctaaacttcccttctcgcttcatttcattcatttcatcttccatcgctgataccctttcttccagttgatcgcattggctcctgaggcttctgcattcttcacgtagttctcgagccttggttttcagctccatcagctcctttaagcacttctctgtattggttattctagttatacattcttctaaattgttttcaaagttttcaacttctttgcctttggtttgaatgtcctcccgtagctcagagtaatttgatcatctgaagccttcttctctcagctcgtcaaagtcattctccatccagctttgttcagttgctggtgaggaactgcgttcctttggaggaggagaggcactctgcattttagggtttccagtttttctgttctgttttttccccatctttgtggttttatctacttttggtctttgatgatggtgatgtacagatgggtttttggtgtggatgtcctttctgtttattagttttccttctaacagacaggaccctcagctgcaggtctgttggaataccctgccgtgtgaggtgtcagtgtgcccctgctggggggtgcctcccagttagactgctcgggggtcaggggtcagggacccacttgaggaggcagtctgcccgttctcagatctccagctgcgtgctgggagaaccactgctctcttcaaagctgtcagacagggacatttaagtctgcagaggttactgctgtctttttgtttgtgccctgcccccagaggtggagcctacagaggcaggcaggcctccttgacctgtggtgggctccacccagttcgagcttcccagctgctttgtttacctaatcaagcctgggcaatggcgggcgcccctcccccagcctcgctgccgccttgcagtttgatctcagactgctgtgctagcaatcagcgagattccgtgggcgtaggaccctccgagccaggtgcgggatatagtctcctggtgcgccgttttttaagcccgtcggaaaagcgcagtattcgggtgggagtgacccgattttccaggtgccgtccgtcacccctttctttgactcggaaagggaactccctgaccccttgcgcttcccaagtgaggcaatgcctcgccctgcttcggctcgcgcacggtgcgtgcacccactgacctgcgcccactgtctggcgctccctagtgagatgaacccggtacctcagatggaaatgcagaaatcaccgtcttctgcgtcgctcacgctgggagctgtagaccggagctgttcctattcggccatcttggctcctccaggaaggtcagattctaactaatttccatggactgttatgtaagaacacaggaattagatttttaatacttaggttggaattcaggcattcagtcaaatgcaatgtggagttacttcagagaggctatctgcctggcttctgcaggagtccaccaccttaatattgcccaacagctcataatagcaaaatggtggatatagatggtgttccagaaaaggaattcatcaccaagtctaaagaacatggaaataatcttactgttttcatgagctggtactaaagatgtcagacgtctcaagttctttgtgataagaacttgcaaaatcgtttttttcattagaagtcacatgaagtagattcattctagacctttatttactactcccttaaccagtgtaattgcagggtaatggcagcaactgtcttagtcagtggagtctattccttgagagggctggatgccctagagataaatccaaattatctctggttatagttgccctgaaatgaaccttctttcccaaaggaaaactattatctgtatctcttgggctgggctaggatggagaggctttgagagcattgcttgcaccggcatctttgctgatagtctgacaatgtttaaggcaggtgtttgtggcatttggccaacaccaaagtgaaatttagttgaagattcagtaagtaagtggatgactaattttgctgtgcctcaatgttcgcctgttgttgcctgttcaataattcttggttattgagctgcctctaagcagtaatttagttaaggctgtgtggatatctggaggactgtctcctctagaaattgggatgtgatttgggagtatcaccaggggttgcctgagaggcgcagcctgcagcttcgccctcttggctaagagccccttcacttttgctggcaacatgcccccctcttgctggatgggctatcttcctttcgtgttgaaggacacacctttgaaaatttgttgcctcagtaaaagatgttggggcagtggttctcaaccctggctgcacattaaagtaacttgagctttaaaaaaaaactcatgtctgggctcctccttaaaccaatttaatgagttgagggtggagcctgggcatcagtatattaagtctcttaggagaag

SEQ ID NO: 10415 - DNA, 6066 bp, Homo sapiens
ctttttttttaaaattttttttattatactttaataaatgtgtacatgtgcacattgtgcaggttagttacatatgtatacatgtgccatgctggtgcgctgcacccactaactcgtcatctagcattaggtatatctcccgatgctatccctcccccctccccccaccccacaacagtccccagagtgtgatattccccttcctgtgtccatgtgatctcattgttcaattcccacctatgagtgagaatatgcggtgtttggttttttgttcttgtgatagtttactgagaatgatgatttccaatttcatccatgtccctacaaaggacatgaactcatcattttttatggctgcatagtattccatggtgtatatgtgccacattttcttaatccagtctatcattgttggacatttgggttggttccaagtctttgctattgtgaataatgccgcaataaacatacgtgtgcatgtgtctttatagcagcatgatttatagtcctttgggtatatacccagtaatgggatggctgggtcaaatggtatttccagttctagatccttgaggaatcgcaacactgacttccacaatggttgaactagtttacagtcccaccaacagtgtaaaagtgttcctatttctccacatcctctccagcacctgttgtttcctgactttttaatgattgccattctaactggtgtgagatggtatctcattgtggttttgatttgcatttctctgatggccagtgataatgagcattttttcatgtgttttttggctgcacaaatgtcttcttttgagaagtgtctgttcatgtcctttgcccactttttgatggggttgtttgtttttttcttgtaaatttgtttgagttcattgtagattctggatattagccctttgtcagatgagtaggttgcgaaaattttctcccattttgtaggttgcctgttcactctgatggtagtttcttttgctgtgcagaagctctttagtttaattagatcccatttgtcaattttgtcttttgttgccattgcctttggtgttttagacatgaagtccttgcccatacctatatcctgaatggtaatgcctaggttttcttctagggtttttatggttttaggtctaacgtttaagtctttaatccatcttgaattgatttttgtataaggtgtaaggaagggatccagtttcagctttctacatatggctagccagttttcccagcaccatttattaaatagggaatcctttcccccttgcttgtttttctcaggtttgtcaaagatcagatagttgtagatatgcggcgttatttctgagggctctgttctgttccattgatctatatctctgttttggtaccagtagcatgctgtttgggttactgtggccttgtagtatagtttgaagtcaggtagtgtgatgcctccagctttgttcttttggcttaggattgacttggtgatgcgggctcttttttggttccatatgaactttaaagtagttttttccaattctgtgaacaaagtcattggtagcttgatggggatggcattgaatctgtaaattaccttgggcagtatggccattttcacgatattgattcttcctacccatgagcatggaatgttcttccatttgtttgtttcctcttttatttcactgagctgtggtttgtagttctccttgaagaggttcttcacatcccttgtaagttggattcctaggtattttattctctttgaagcaattgtgaatgtgagttcactcatgatttagctctctgtttgtctgttgttggtgtataagaatgcttgtgagttttgtacattgattttgtatcctgagactttgctgaagttgcttatcagcttaaggagattttgggctgagacaatggggttttctagatatacaatcatgtcatctgcaaacggacaatttgacttcctcttttcctaattgaataccctttatttccttctcttgcctaattgccctggtcagaacttccaacactatgttgaataggagtggtgagagagggcatccctgtcttgtgccagttttcaaagggaatgcttctagtttttgcccattcagtatgatattggctgtgggtttgtcatagatagctcttattattttgaaatacatcccatcgatacctaatttattgagagtttttagcatgaagggttgttgaattttgtcaaaggccttttctgcatctattgagataatcatgtggtttttgtctttggctctctttatatgctggattacatttattgatttgcgtatattgaaccagccttgcatcccagggatgaagcccacttgatcatggtggataagctttttgatgtgctgctggattcgttttgccagtattttattgaggatttttgcatcaatgttcatcaaggatattggtctaaaattctctttttttgttgtgtctctgcctggctttggtatcagaatgatgctggcctcataaaatgagttagggaggattccctctttttctattgattggaatagtttcagaaggaatggtaccagttcctccttgtacctctggtagaatttggctgtgaatccatctggtcctggactctttttggttggtaagctattgattattgcctcaatttcagctcctgttattggtctattcagagattcaacttcttcctggtttagtcttgggagagtgtatgtgtcgaggaatgtatccatttcttctagattttctagtttatttgtgtagaggtgtttgtagtattccctgatggtagtttgtatttctgtgggatcggtggtgatatcccctttatcattttgtattgcgtctatttgattcttctctctttttttctttattagttcttgctagcggtctatcaattttgttgatcctttcaacaaaccagctcctggattcattaattttttcaagggttttttgtgtctctatttccttgagttctgctctgattttagttatttcttgccttctgctagcttttgaatgtgtttgctgttgcttttctagttcttttaattgtgatgttagggtgtcaattttggatctttcctgctttctcttgtgggcattcagtgctatacatttccctctacacactgctttgaatgcgtcccagagattctggtatgttgtgtctgtgttctcgttggtttcaaagaacatctttatttctgccttcatttcattatgtacccagtagtcattcaggagcaggttgttcagtttccatgtagttgagcagttttgagtgagattcttaatcctgagttctagtttgattgcactgtggtctgagagatagtttgttataatttctgttcttttacatttgctgaagagagctttacttcccagtatgtggtcaattttggaataggtgtggtgtggtgctgaaaaaaatgtatattctgttgatttggggtggagagttctgtagatgtctattaggtccgcttggtgcagagctgagttcaattcctgggtatccttgttgactttctgtctcattgatctgtctaatgttgacagtggggtgttaaagtctcccattattaatgtgtgggagtctaagtctctttgtaggtcactcaggacttgctttatgaatctgggtgctcctgtattgggtgcatatatatttaggatagttagctcttcttgttgaattgatccctttaccattatgtaatggccttctttgtctcttttgatctttgttggtttaaagtctgttttatcagagacgaggattgcaacccctgcctttttttgttttccattggcttggtagatctccctccatccttttattttgagcctatgtgtgtctctgcacgtgagatgggtttcctgaatacagcacactgatgggtcttgactctttctgtgtctttttttttttttttttttttttttttttttttttttttgagacggagtctcgctctgtcgcccaggctggagtgcagtggcgcgatctcggctcactgcaagctccgcctcccgggttcacgccattctcctgcctcagcctcccgagtagctgggactacaggcgcccgctaccacgccaggctaattttttgtatttttagtagagacggggtttcaccgtgttagccaggatggtctcgatctcctgacctcgtgatccgcccgcctcggcctcccaaagtgctgggattacaggcgtgagccaccgcgcccggcccagtctgtgtcttttaattggagcatttagtccatttacatttaaagttaatattgttatgtgtgaatttgatcctgtcattatgatgttagctggttgttttgctcgttagttgatgcagtttcttcctagcctcgatggtctttacattttggcatgattttgcgcggctggtaccagttgttcctttccatgtttagtgcttccttcaggagctcttgtaaggcaggcctggtggtgacaaaatctctcagcatttgcttgtctttaaagtattttatttctccttcgcttatgaagcttagtttggctggatatgaaattctgggttgaaaattcttttctttaagaatgttgaatattggcccccactctcttctggcttgtagggtttctgccgagagatctgctgtttagtctgatgcgcttccctttgagggtaacccgacctttctctctggctgccctttacattttttccttcatttcaactttggtgaatctgacaattatgtgtcttggagttgctcttctcgaggagtatctttgtggcgttctctgtatttcctgaatctgaacgttggcctgccttgctagatgggggaagttctcctggataatatcctgcagagtgttttccaacttggttccattctccccatcactttcaggtacaccaatgagacgtagatttggtcttttcacatagtcccatacttcttggaggctttgctcatttctttttattcttttttctctaaacttcccttctcgcttcatttcattcatttcatcttccatcgctgataccctttcttctagttgatcgcatcggctcctgaggcttctgcattcttcacgtagttcttgagccttggttttcagctccatcagctcctttaagcacttctctgtattggttattctagttatacattcttctaaatttttttcaaagatttcaacttctttgcctttggtttgaatgtcctcccgtagctcagagtaatttgatcgtctgaagccttcttctctcagctcgtcaaagtcattctccatccagctttgttccgttgctggtgaggaactgcgttcctttggaggaggagaggcgctctgctttttagagtttccagtttttctgttctgtttttcccccatctttgtggttttatctacttttggtctttgatgatggtgatgtacagatgggtttttggtgtggatgtcctttctgtttgttagttttccttctagcagagaggaccctcagctgcaggtatgttggagtactctgccatttgaggtgtcagtgtgcccctgctggggggtgcctcccagttaggctgctcgggggtcaggggtcagggacccacttgaggaggcagtctgcccattctcagatctccagctgcgtgctgggagaaccactgctctcttcaaagctgtcagacagggacatttaagtctgcagaggttactactgtctttttgtttgtctgtgccctgcccccagaggtggagcctacagaggtaggcaggcctccttgagctgtggtgggctccacccagttcgaccttcctggctgctttgtttacctaatcaagtctgggcaatggcgggcgcccctcccccagcctcgctgccgccttgcagtttgatctcagacagctgtgctagcaatcagcgagactccgtgggcgtaggaccctctgagccacgtgcgggatataatctcatggtgcgccattttttaagcccattggaaaagcgcagt

SEQ ID NO: 10416 - DNA, 6071 bp, Homo sapiens
tttattttttttttttttatttttttttttttattttttattttttattatactttaagttttagggtacatgtgcacattgtgcaggttagttacatatgtatacatgtgccatgctggtgcgctgcacccaccaacgtgtcatctatcattaggtatatctcccactgctatccctcccccctcccccgaccccaccaccgtccccagagtgtgatattccccttcctgtgtccttgtgatctcattgttcaattcccacctatgagtgagaatatgcggtgtttggttttttgttcttgcgatagtttactgagaatgatggtttccaatttcatccatgtccctacaaaggacatgaactcatcattttttatggctgcatagtattccatggtgtatatgtgccacattttcttaatccagtctatcattgttggacatttgggttggttccaagtctttgctattgtgaatagtgccgcaataaacatacgtgtgcatgtgtctttatagcagcatgatttatagtcctttgggtatatacccagtaatgggatggctgggtcaaatggtatttctagttctagatccctgaggaatcgccacactgacttccacaatggttgaactagtttacagtcccaccaacagtgtaaaagtgttcctatttctccacatcctctccagcacctgttgtttcctgactttttaatgattgccattctaactggtgtgagatgatatctcatagtggttttgatttgcatttctctgatggccagtgatgatgagcattttttcatgtgttttttggctgcataaatgtcttcttttgagaagtgtctgttcatgtccttcgcccactttttgatggggttgtttgtttttttcttgtaaatttgtttgagttcattgtagattctggatattagccctttgtcagatgagtaggttgcgaaaattttctcccatgttgtaggttgcctgttcactctgatggtagtttcttttgctgtgcagaagctctttagtttaattagatcccatttgtcaattttggcttttgttgccattgcttttggtgttttggacatgaagtccttgcccacgcctatgtcctgaatggtaatgcctaggttttcttctagggtttttatggttttaggtctaacgtttaaatctttaatccatcttgaattgatttttgtataaggtgtaaggaagggatccagtttcagctttctacatatggctagccagttttcccagcaccatttattaaatagggaatcctttccccattgcttgtttttctcaagtttgtcaaagatcagatagttgtagatacgcggcattatttctgagggctctgttctgttccattgatctatatctctgttttggtaccagtaccatgctgttttggttactgtagccttgtagtatagtttgaagtcaggtagtgtgatgcctccagctttgttcttttggcttaggattgacttggcgatgcgggctcttttctggttccatatgaactttaaagtagttttttccaattctgtgaagaaagtcattggtagcttgatggggatggcattgaatctgtaaattaccttgggcagtatggccattttcacgatattgattcttcctacccatgagcatggaatgttcttccatttgtttgtgtcctcttttatttccttgagcagtggtttgtagttctccttgaagaggtccttcacatcccttgtaagttggattcctaggtattttattctctttgaagcaattgtgaatgggagttcagtcatgatttggctctctgtttgtctgttgttggtgtataagaatgcttgtgatttttgtacattgattttgtatcctgagactttgctgaagttgcttatcagcttaaggagattttgggctgagacgatggggttttctagatatacaatcatgtcgtctgcaaacagggacaatttgacttcctcttttcctaattgaataccctttatttccttctcctgcctgattgccctggccagaacttccaacactatgttgaataggagcggtgagagagggcatccctgtcttgtgccagttttcaaagggaatgcttccagtttttgcccattcagtatgatattggctgtgggtttgtcatagatagctcttattattttgaaatacgtcccatcaatacctaatttattgagagtttttagcatgaagggttgttgaattttgtcaaaggctttttctgcatctattgagataatcatgtggtttttgtctttggctctgtttatatgctggattacatttattgatttgcgtatattgaaccagccttgcatcccagggatgaagcccacttgatcatggtggataagctttttgatgtgctgctggattcggtttgccagtattttattgaggatttttgcatcaatgttcatcaaggatattggtctaaaattctcttttttggttgtgtctctgcccggctttggtatcagaatgatgctggcctcataaaatgagttagggaggattccctctttttctattgattggaatagtttcagaaggaatggtaccagttcctccttgtacctctggtagaattcggctgtgaatccatctggtcctggactctttttggttggtaagctattgattattgccacaatttcagagcctgttattggtctattcagagattcaacttcttcctggtttagtcttgggagggtgtatgtgtcgaggaatgtatccatttcttctagattttctagtttatttgcgtagaggtgtttgtagtattctctgatggtagtttgtatttctgtgggatcggtggtgatatcccctttatcattttttattgagtctatttgattcttctctctttttttctttattagtcttgctagcggtctatcaattttgttgatcctttcaagaaaccagctcctggattcattgattttttgaagggttttttgtgtctctatttccttcagttctgctctgattttagttatttcttgccttctgctagcttttgaatgtgtttgctcttgcttttctagttcttttaattgtgatgttagggtgtcaattttggatctttcctgctttctcttgtaggcatttagtgctataaatttccctctacacactgctttgcatgcgtcccagagattctggtatgtggtgtctttgttctcgttggtttcaaagaacatctttatttctgccttcatttcgttatgtacccagtagtcattcaggagcaggttgttcagtttccatgtagttgagcggctttgagtgagattcttaatcctgagttctagtttgattgcactgtggtctgagagatagtttgttataatttctgttcttttacatttgctgaggagagctttacttccaactatgtggtcaattttggaataggtgtggtgtggtgctgaaaaaaatgtatattctgttgatttggggtggagagttctgtagatgtctattaggtccgcttggtgcagagctgagttcaattcctgggtatccttgttgactttctgtctcgttgatctgtctaatgttgacagtggggtgttaaagtctcccattattaatgtgtgggagtgtaagtctctttgtaggtcactgaggacttgctttatgaatctgggtgctcctgtgttgggtgcataaatatttaggatagttagctcctcttgttgaattgatccctttaccattatgtaatggccttctttgtctcttttgatctttgttggtttaaagtctgttttatcagagactaggattgcaacccctgcctttttttgttttccattggcttggtagatctttctccatccttttattttgagcctatgtgtgtctctgcacgtgagatgggtttcctgaatacagcacactgatgggtcttgactctttatccaacttgccagtctgtgtcttttaattgcagaatttagtccatttatatttaaggttaatattgttatgtgtgaatttgatcctgtcattatgatgttagctggtgattttgctcgttagttgatgcagtttcttcctagtctcaatggtctttacattttggcatgattttgcagcggctggtaccggttgttcctttccatgtttagcgcttccttcaggagctcttttagggcaggcctggtgttgacaaaatctctcagcatttgcttgtctataaagtattttatttctccttcacttatgaagcttagtttggctggatatgaaattctgggttgaaaattcttttctttaagaatgttgaatattggcccccactctcttctggcttgtagggtttctgccgagagatccgctgttagtctgatgggctttcctttgagggtaacccgacctttgtctctggctgcccttaacattttttccttcatttcaactttggtgaatctgacaattatgtgtcttggagttgctcttctcgaggagtatctttgtggcgttctctgtatttcctgaatctgaacgttggcctgccttgctagattggggaagttctcctggataatatcctgcagagtgttttccaacgtggttccattctccacatcactttcaggtacaccagtcagacgtagatttggtcttttcacatagtcccatatttcttggaggctttgctcatttctttttattcttttttctctaaacttcccttctcgcttcatttcattcatttcatcttccattgctgataccctttcttccagttgatcccatcggctcctgaggcttctgcattcttcacgtagttctcgagccttggttttcagctccatcagctcctttaagcacttctctgtattggttattctagttatacattcttctaaatttttttcaaagttttcaacttctttgcctttggtttgaatgtcctcccgtagctcagagtaatttgatcgtctgaagccttcttctctcagctcgtcaaaatcattctccatccagctttgttccgttgctggtgaggaactgcgttcctttggaggaggagaggcgctctgcgttttagagtttccagtttttctgttctgttttttccccatctttgtggttttatctacttttggtctttgatgatggtgatgtacaggtgggttttctgttagatgtcctttctggttgttagttttccttctaagagacaggaccctcagctgcaggtctgttggaataccctgccgtgtgaggtgtcagtgtgcccctgctggggggtgtctcccagttaggctgctcgggggtcaggggtcaaggacccaatagaggaggcagtctgcccgttctcagatctccagctgcgtgctgggagaaccactgctctcttcaaagctgtcagacagggacacttaagtctgcagaggttactgctgtctttttgtttgtctgtgccctgcccccagaggtggagcctacagaggcaggcaggcctccttgagctgtggtgggctccacccagttcgagcttcccggctgctttgtttacctaagcaagcctgggcaatggcgggcgcccctcccccagcctcgttgccgccttgcagtttgatctcagactgctgtgccagcaatcagcgagattccgtgggcgtaggaccctctgagccaggtgtgggatatagtctcctggtgcgccgttttttaagccggtctgaaaagcgcaatattcgggtgggagtgacccgattttccaggtgcgtctgtcacccctttctttgactcggaaagggaactccctgacccttgcgcttcccaggtgaggcaatgcctcgccctgcttcggctcgcgcacggtgcgcgcacacactggcctgtgcccactgtctggctctccctagtgagatgagcccggtacctcagatggaaatgcagaaatcacccgtcttctgcgtcgctcacgctgggagctgtagaccggagctgttcctattcggccatcttggctcctccctcgtcacaag

SEQ ID NO: 10417 - DNA, 6100 bp, Homo sapiens
tttgcttctttttctttttttttttttacactttactgcaataattttcatttttttgtttgttttttttaaatgtattattattatactttaagttttagggtacgtgtgcacaatgtgcaggttagttacatatgtatacatgtgccatgctggtgcgctgcacccactaactcgtcatctagcattaggtatatctcccaatgccgtccctcccccctccccccaccccacaacagtccccagagtgtgatgttccccttcctgtgtccatgtgttctcattgttcaattcccacctatgagtgagaatatgcagtgtttggttttttgttcttgtgatagtttactgagaatgatgatttccaatttcatccatgtccctacaaaggacatgaactcatcattttttatggctgcatagtattccatggtgtatatgtgccacattttcttaatccagtctatcgttgttggacatttgggttggttccaagtctttgctattgtgaataatgccgcaataaacatacgtgtgcatgtgtctttatagcagcatgatttatagtcctttgggtatatacccagtaatgggatggctgggtcaaatggcgtttctagttctagatccctgaggaatcgccacactgacttccacaatggttgaactagtttacagtcccaccaacagtgtaaaagtgttcctatttctccacatcctctccagcacctgttgtttcctgactttttaatgattgtcattctaactggtgtgagatggtatctcatagtggttttgatttgcatttctctgatggccagtgatggtgagcattttttcatgtgttttttcggctgcataaatgtcttcttttgagaagtgtctgttcatgtccttcgcccactttttgatggggttgtttgtttttttcttgtaaatttgtttgagttcattgtagattctggatattagccctttgtcagatgagtaggttgcgaaaattttctcccattttgtaggttgcctattcactctgatggtagtttcttttgctgtacagaagctctttagtttaattagatcccatttgtcaattttggcttttgttgccattgcttttggtgttttagacatgaagtccttgcccatgcctatgtcctgaatggtaatgcctaggttttcttttagggtttttatggttttaggtctaacgtttaagtctttaatccatcttgaattgatttttgtataaggtgtaaggaagggatccagtttcagctttctacatattgctagccaggtttcccagcaccatttattaaatagggaatcctttccccattgcttgtgtttctcaggtttgtcaaagatcagatagttgtagatatgcggcattatttctgagggctctgttctgttccgttgatctatatctctgttttggtaccagtaccatgctgttttggttactgtagccttgtagtatagtttgaagtcaagtagcgtgatgcctccagctttgttcttttggcttaggattgacttggtgatgcgggctcttttttggttccatatgaactttaaagtagttttttccaattctgtgaagaaagtcattggtggcttgatggggatggcattgaatctgtaaattaccttgggcagtatggccattttcatgatattgattcttcctacccatgagcatggaatgttcttccatttgtttgtatcctcttttatttccttgagcagtggtttgtagttctccttgaagaggtccttcacatcccttgtaagttggattcctaggtattttattctctttgaagcaattgtgaatgggagttcactcatgatttggctctctgtttgtctgttgttggtgtataagaatgcttgtgatttttttactttgattttgtatcctgagactttgctgaagttgcttatcagcttaaggagattttgggctgagacaatggggtttcctagatctacagtcatgttgtctgcaaacagggacaatttgacttcctcttttcctaattgaatactctttatttccttctcctgcctaattgccctggccagaacttccaacactatgttgaatgggagtggtgagagagggcatccctgtcttgtgccagttttcaaagggagtgcttccagtttttgcccattcagtatgatattggctgtgggtttgtcatagatagcttttattattttgaaatatgtcccatccatacttaatttattgagagtttttagcatgaagggttgttgaattttgtcaaaggccttttctgcatctattgagataatcatgtggtttttgtctttggctctgtttatatgctggattacatttattgatttgcgtatattgaaccagccttgcatcccagggatgaagcccacttgatcatggtggataagctttttgatgtgctgctggattctgtttgccagtattttattgaggatttttgcatcaatattcatcaaggatattggtctacaattctcttttttggttgtgtctctgcctgagtttggtatcaggatgatgctggcctcataaaatgagttagggaggattccctctttttctattgattggaatagtttcagaaggaatggtaccagttcctccttgtacctctggtagaattcggctgtgaatccatctggtcctggactctttttggttggtaagctattgattattgccacaatttcagatcctgttattggtctattcagagattcaacttcttcctggtttagtcttgggagggtgtatgtctcgaggaatttatccatttcttctagattttctagtttatttgcatagaggtgtttatagtattctctgatggtagtttgtatttctgtgggatcggtggtgatatcccctttatcattttttattgcgtctatttgattcttctctctttttttctttcttagtcttgctagcggtctatcaattttgttgatcctttcaaaaaaccagctcctggattcattaattttttgaagggttttttgtgtctctatttccttcagttctgctctgattttagttatttcttgccttctgctagcttttgaatgtgtttgctcttgcttttctagttcttttaattgtgatgttagggtgtcaattttggatctttcctgctttctcttgtgggcatttagtgctataaatctccctctacacactgctttgaatgcgtcccagagattctggtatgttgtgtctttgttctccttggtttcaaagaacatctttatttctgccttcatttcgttatgtacccagtagtcattcaggagcaggttgttcagtttccatgtagttgagcggttttgagtgagtttcttaatcctgagttctagtttgattgcactgtggtctgagagatagtttgttataatttctgttcttttacatttgctgaggagagctttacttccaagtatgtggtcaattttggaataggtgtggtatggtgctgaaataaatgtatattctgttgatttggggtggagagttctgtagatgtctattaggtccgcttggtgcagagctgagttcaattcctgggtatccttgttgactttctgtctcgttgatctgtctaatgttgacagtggggtgttaaagtctcccattattaatgtgtgggagtctaagtctctttgtaggtcactcaggacttgctttatgaatctgggtgctcctatattgggtgcatatatatttaagacaattagctcttcttgttgaattgatccctttaccattatgtaatggccttctttgtctcttttgatctttgttggtttaaagtctgttttatcagagactaggattgcaacccctgcctttttttgttttccatttgcttggtagatctgcctccatccttttattttgagcctatgtgtgtctctgcacgtgagatgggtttcctgaatacagcacactgatgggtcttgactctttatccaatttgccagtctgtgtcttttaattggagcatttagtccatttacatttaaagttaatattgttatgtgtgaatttgatcctgtcattatgatgttagctggttattttgctcgttagttgatgcagtttcttcctagtcttgatggtctttacattttggcatgattttgcagcagctggtaccggttgttcctttccatgtttagcacttccttcaggagctcttttagggcaggcctggtggtgacaaaatctctcagcatttgcttgtctgtaaagtactttatttctccttcacttatgaagcttagtttggctggatatgaaattctgggttgacaattcttttctttaagaatgttgaatattggcccccactctcttctggcttgcggagtttctgccgagagatccgctgttagtctgatgggcttccctttgagggtaacccgacctttctctctggctgcccttaacattttttcctgcatttcaactttggtgaatctgacaattatgtgtcttggagttgctcttctcgaggagtatctttgtggtgttctctgtatttcctgaatctgaacgttggcctgccttgctagattggggatgttctcctggataatatcctgcagagtgttttccaacttggttccattctccccatcactttcaggtacaccaatcagacgtagatttggtcttttcacatagttccatatttcttggaggctttgctcttttctttttattgttttttctctaaacttcccttctcgcttcatttcattcatttcatcttctatcactgataccctttcttccagttgatcgcatcggctcctgaggcttctgcattcttcatgtagttctcgagccttggttttcagctccatcagctcctttaagcacttctctgtattgattattctagttatacattcttctaaatttttttcgaagttttcaacttctttgcctttggtttgaatgtcctcccgtagctcagagtaatttgatcgtctgaagccttcttctctcagctcatcaaagtcattctcaatccagctttgttcccttgctggggaggaactgtgttcctttggaggaggagaggcgctctgctttttagagtttccagtttttctgctctgttttttccccatctttgtgattttatctacttttggtctttgatgatggtgacgtacagatgggtttttggtgtggatgtcctttctgtttgttagttttccttctaacagacaggaccctcagctgcaggtctgttggagtactcggctgtgtgaggtgtcagtctgcccctgttggagggtgcctcccagataggctgctcgggggtcaggggtcagggaaccagttgaagaggaagtctgcccgttctcagatctccagctgcatgctgggagaaccactgctctcttcaaagctgtcagacagggacatttaattctgcagaggttactgctgtctttttgtttgtctgtgccctgccccaagaagtggagcctacagaggcaggcaggcctccttgagctgtggtgggctccacccagttcgagcttcccggctgctttgtttacctaagcaagcctgggcaatggcgggcgcccctcccccggccttgctgctgccttgcagtttgatctcagactgctgtgctagcaatcagcaagactccgcgggcataggaccctccgagccaggtgcgggatataatctcctggtgcgccattttttaagcccgtcggaaaagcgcaatattcgggtgggagtgacccaattttccaggtgccatctgtcacccctttctttgactaggaaagggaactccctgaccccttgcgcttcctgagtgaggcaatgcctcgccatgcttcggctcgtgcatggtgcgcgcacccactgacttgcgcccagtgtctggcactccctagtgagatgaacccggtacctcagatggaaatgcagaaatcacctgtcttctgtgtcgctcacagtgggagctgtagactggagctgttcccattcggccatcttggctccttc

SEQ ID NO: 10418 - DNA, 6020 bp, Homo sapiens
tatttcttttttttttattattatactttaagttttagggtacatgtgcacattgtgcaggttagttacatatgtatacatgtgccatgctggtgcgctgcgcccactaactcgtcatctagcattaggtatatctcccaatgctatccctcccccctcccccgaccccaccacagtccccagagtgtgatattccccttcctgtgtccatgtgatctcattgttcaattcccgcctatgagtgagaatatgcggtgtttggttttttgttcttgcgatagtttactgagaatgatggtttccaatttcatccatgtccctacaaaggacatgaactcatcattttttatggctgcatagtattccatggtgtatatgtgccacattttcttaatccagtctatcattgttggacatttgggttggttccaagtctttgctattgtgaataatgccgcaataaacatacgtgtgcatgtgtctttatagcagcatgatttataatcttttaggtatatacccagtaatgggatggctgggtcaaatggtatttctagttctagatccctgaggaatcgccacactgacttccacaatggttgaactagtttacagtcccaccaacagtgtaaaagtgttcctatttctccacatcctctccagcacctgttgtttcctgactttttaatgattgccattctaactggtgtgagatgatatctcatagtggttttgatttgcatttctctgatggccagtgatgatgagcattttttcatgtgttttttggctgcataaatgtcttcttttgagaagtgtctgttcatgtccttcgcccactttttgatggggttgtttgtttttttcttgtaaatttgtttgagttcattgtagattctggatattagccctttgtcagatgagtaggttgcgaaaattttctcccatgttgtaggttgcctgttcactctgatggtagtttcttttgctgtgcagaagctctttagtttaattagatcccatttgtcaattttggctttcattgccattgcttttggtgttttggacatgaagtccttgcccacgcctatgtcctgaatggtaatgcctaggttttcttctagggtttttatggttttaggtctaacgtttaaatctttaatccatcttgaattgatttttgtataaggtgtaaggaagggatccagtttcagctttctacatatggctagccagttttcccagcaccatttattaaatagggaatcctttccccattgcttgtttttctcaggtttgtcaaagatcagatagttgtagatatgcggcattatttctgagggctctgttctgttccattgatctatatctctgttttggtaccagtaccatgctgttttggttactgtagccttgtagtatagtttgaagtcaggtagtgtgatgcctccagctttgttcttttggcttaggattgacttggcgatgcgggctcttttttggttccatatgaactttaaagtagttttttccaattctgtgaagaaagtcattggtagcttgatggggatggcattgaatctgtaaattacgttgggcagtatggccattttcacgatattgattcttcctacccatgagcatggaatgttcttccatttgtttgtgtcctcttttatttccttgagcagtggtttgtagttctccttgaagaggtccttcacatcccttgtaagttggattcctaagtattttattctctttgaagcaattgtgaatgggagttcactcatgatttggctctcctgttattggtgtataagaatgcttgtgatttttgtacattggttttgtatcctgagactttgctgaagttgcttatcagcttaaggagattttgggctgagacaatggggttttctagataaacaatcatgtcgtctgcaaacagggacaatttgacttcctcttttcctaattgaataccctttatttccttctcctgcctgattgccctggccagaacttccaacactatgttgaataggagtggtgagagagggcatccctgtcttgtgccagttttcaaagggaatgcttccagtttttgcccattcagtatgatattggctgtgggtttgtcatagatagctcttattattttgaaatacgtcccatcaatacctaatttattgacagtttttagcatgaagcgttgttgaattttgtcaaaggctttttctgcatctattgagataatcatgtggtttttgtctttggctctgtttatatgctggattacatttattgatttgcatatattgaaccagccttgcatcccagggatgaagcccacttgatcatggtggataagctttttgatgtgctgctggattcggtttgccagtattttattgaggatttttgcatcaatgttcatcaaggatattggtctaaaattcccttttttggttgtgtctctgcctggctttggtatcagaatgatgctggcctcataaaatgagttagggaggattccctctttttctattgattggaatagtttcagaaggaatggtaccagttcctccttgtacctctggtagaattcggctgtgaatccatctggtcctggactctttttggttggtaaactattgattattgccacaatttcagagcctgttattggtctattcagagattcaacttcttcctggtttagtcttgggagagtgtatgtgttgaggaatttatccatttcttctagattttctagtttatttgcgtagaggtgtttgtagtattctctgatggtagtttgtatttctgtgggatcggtggtgatatcccctttatcattttttattgtgtctatttgattcttctctctttttttctttattagtcttgctagcggtctatcaattttgttgatcctttcaaaaaaccagctcctggattcattgattttttgaagggttttttgtgtctctatttccttcagttctgctctgattttagttatttcttgccttctgctagcttttgaatgtgtttgctcttgcttttctagttcttttaattgtgatgttagggtgtcaattttggatctttcctgctttctcttgtaggcatttagtgctataaatttccctctacacactgctttgaatgcgtcccagagattctggtatgtggtgtctttgttctcgttggtttcaaagaacatctttatttctgccttcattttgttatgtacccagtagtcattcaggagcaggttgttcagtttccatgtagttgagcagctttgagtgagattcttaatcctgagttctagtttgattgcactgtggtctgagagatagtttgttataatttctgttcttttacatttgctgaggagagctttacttccaactatgtggtcaattttggaataggtgtggtgtggtgctgaaaaaaatgtatattctgttgatttggggtggagagttctgtagatgtctattaggtccgcttggtgcagagctgagttcaattcctgggtatccttgttgactttctgtctcatggatctgtctaatgttgacagtggggtgttaaagtctcccattattaatgtgtgggagtctaagtctctttgtaggtcactcaggacttgctttatgaatctggctgctcctgtattgggtgcataaatatttaggatagttagctcctcttgttgaattgatccctttaccattatgtaatggccttctttgtctcttttgatctttgttggtttaaagtctgttttatcagagactaggattgcaacccctgcctttttttgttttccatttgcttggtagatcttcctccatccttttattttgagcctatgtgtgtctctgcacgtgagatgggtttcctgaatacagcacactgatgggtcttgactctttatccaacttgccagtctgtgtcttttaattgcagaatttagtccatttatatttaaagttaatattgttatgtgtgaatttgatcctgtcattatgatgttagctggtgattttgctcgttagttgatgcagtttcttcctagtctcgatggtctttacattttggcatgattttgcagcggctggtatcggttgttcctttccatgtttagcgcttccttcaggagctcttttagggcaggcctggtggtgacaaaatctctcagcatttgcttgtctataaagtattttatttctccttcacttatgaagcttagtttggctggatatgaaattctgggttgaaaattcttttctttaagaatgttgaatattggcccccattctcttctggcttgtagggtttctgccgagagatccgctgttagtctgatgggctttcctttgagggtaacccgacctttctctctggctgcccttaacattttttccttcgtttcaactttggtgaatctgacaattatgtgtcttggagttgctcttctcgaggagtatctttgtggcgttctctgtatttcctgaatctgaacgttggcctgccttgctagattgggaaagttctcctggataatatcctgcagagtgttttccaacttggttccattctccacatcactttcaggtacaccagtcagacgtagatttggtcttttcacatagtcccatatttcttggaggctttgctcatttctttttattctgttttctctaaacttcccttctcgcttcatttcattcatttcatcttccattgctgataccctttcttccagttgatcgcatcggctcctgaggcttctgcattcttcacgtagttctcaagccttggttttcagctccatcagctcctttaagcacttctctgtattggttattctagttatacattcttctaaatttttttcaaagttttcaacttctttgcctttggtttgaatgtcctcccgtagctcagagtaatttgatcgtctgaagccttcttctctcagctcgtcaaaatcattctctatccagctttgttccgttgctggtgaggaactgcgttcctttggaggaggagaggcgctctgcgttttagagtttccagtttttctgttctgttttttccccatctttgtggttttatctacttttggtctttgatgatggtgatgtacagatgggttttcggtgtagatgtcctttctggttgttagttttccttctaacagacaggaccctcagctgcaggtctgttggaataccctgccgtgtgaggtgtcagtgtgcccctgctggggggtgcctcccagttaggctgctcgggggtcaggggtcagggacccacttgaggaggcagtctgcccgttctcagatctccagctgcgtgctgggagaaccactgctctcttcaaagctgtcagacagggacacttaagtctgcagaggttactgctgtctttttgtttgtctgtgccctgcccccagaggtggagcctacagaggcaggcaggcctccttgagctgtggtgggctccacccagttcgagcttcccggctgctttgtttacctaagcaagcctgggcaatggcgggcgcccctcccccagcctcgttgctgccttgcagtttgatctcagactgctgtgctagcaatcagcgagattccgtgggcgtaggaccctctgagccaggtgtgggatatagtctcgtggtgcgccgttttttaagccggtctgaaaagcgcaatattcgggtgggagtgacccgattttccaggtgcgtccgtcacccctttctttgactcggaaagggaactccctgaccccttgggcttcccaggtgaggcaatgcctcgccctgcttcggctcgcgcacggtgcgcgcacccactggcctgcgcccactgtctggcactccctagtgagatgaacccggtacctcagatggaaatgcagaaatcacccgtcttctgcgtcgctcacgctgggagctgtagaccggagctgttcctattcggccatcttg

SEQ ID NO: 10419 - DNA, 5259 bp, Homo sapiens
tttttttctatgatttttttattatactttaagttctagggtacatgtgcacaacatgcaggtttgttacatatgtatacatgtgccatgttggtgtgctgcacccattaactcgtcatttacattaggtatatcttctaatgctatccctccccactccccccaccccacgacaggccctggtgtgtgatgttccccaccccgtgtccaagtgttctcattgttcagttcccacctatgagtgagaacatgtggtgtttggttttctgctcctgtgttcgtttgctcagaatgatggtttccaacttcatccatgtccctacaaaggacatgaactcatccttttttatggctgcatagtattccatagtgtatatgtgccacattttcttaatccagtctgtcattgatggacatttgggttggttccaagtctttgctcttgtgaatagtgccacaataaacatatgtgtgcatgtgtctttctagcagcatgatttataatcctttgggtatatacccggtaatgggatggctgggtcaaatggtatttctagttctagatccttgaggaatcaccacactgtcttccacaatggctgaactagtttacagtcccaccaacagtgtaaaagtgttcctatttctccacatcctctccagcacctgttgtttcctgactttttaatgatcgccattctaactggtgtgagatggtatctcattgtggttttgatttgcatttctctgatggccagtgatgatgagcattttttcatgtgtctgttggctgcataaatgtcttcttttgagaagtgtctgttcatatcctttacccactttttgatggggttgtttgatttttttcttataaatttgtttaagttctttgtagattctggatattagccctttgtcagatgagtagattgtaaaaattttctcccattctgtaggttgcttgttcactctgatggtagtttcttttgctgtgcagaaactctttagtttaattagatcccatttgtcagttttggcttctgttgccattgcttttggtgttttagtcatgaagtccttgcccatgcctatgtcctgaatggtattgcctaggttttcttctagggtttttatggttttaggtctaagatgtaagtctttaatccatcttgaattaattttgtataaggtgtaaggaaaggatacagtttcagctttctagatatggctagccagttttcccagcactatttattaaatagggaatcctttccccatttcttgtttgtctgtttgtttgtttgttgttgttgttgttgttgttgtttgagatggagtctcgctctgttgcctaggctggagtgcagtgacgcgatctcggctcactgcaagctccacctcccaggttcacaccattctcctgcctcagcttccctagtagctgggactacaggtgcccgccaccacatctggctaatttttttgtattttttagtagagacagacagggtttcaccatgttagccaggatggtcttgatctcccgacctcgtgatccacccacctcggcctcccaaagtgctgggattacaggcgtgagccactgcgcctggccccatttcttgtttttgtcaggtttgtcaaagatcagatggttgtagacatgtggtgttatttctgagggctctgttctattccattggtctatatctctgttttggtacagtaccatgctgttttggttactgtagtatagtttgaagtcaggtagcgtgatgcctccagctttgttcttttggcttaggattgtcttggcaatgcaggctcttttttggtttcatatgaactttaaagtagttttttccaattctgtgaagaaagtcattggtagcttgttggggatggcattgaatctataaattaccttgggcaatatggccattttcacaatattgattcttcctatccatgagcatggaatgttcttccatttgtttgtgtcctgttttatttcactgagcagtggtttgtagttctccttgaagaagtccttcacatccattgtaagttggattcctgggtatttcattctctttgaagcaattgtgaatgggagttcactcatgatttggctctctgtttgtttgttattggtgtgtaggaatgcttgtgatttttgcacagtgattttgtatcctgagactttgctgaagttgcttatcagcttaagaacattttgggctgagacgatggggttttctaaatatacaatcatgtcatttgcaaacagggacaatttgacttcctcgtttcctaattgaataccctttatttctttctcctgccttattgccctggccagaacttccaacactatgttgaataggagtggtgagagagggcatccctgtcttgtgccagtttccaaagggaatgcttccagtttttgcccattcagtacgatattggctgtgggtttgtcataaataactcattattttgagatgcctcccatcaatacctagtttattgagagtttttagcatgaagggctgttgaattttctcaaaggcctttttggcatctattgaaataatcatgtggtttttgtctttggttctgcttttatgatggattacgtttattgatttgtgtatgttgaaccagccttgcatcccaaggatgaagccaacttgatcagggtggataagctttttgatgtgctgctggattcagtttgccagtattttattgaggatttttgcatagatgttttattgaggattttcgcatagatgttcatcagggatattggtctttttttgttgtgtctctgccaggctttggtatcaggatgatgctggcctcataaaatgagttatggaggattccctctttttctattgattggaaaagtttcagaaggaatggtaacagctcctctttgtacctctggtagaattcggctgtgaatccatctggtcctggactttttttggttggtaggctattaattattgcctcaatttcagagtctgttattggtctattcagggattcaacttcttcctggtttagtcttgggagcgtgtctgtgtccgggaatttatccattttatctagattttctagtttatttgtgtagaggtgtttatagtattctctgatggtagtttgtatttctgtgtaatcggtggtgatatcccctttatcattttttattgtgtctattctatccttctctcttttcttctttactagtcttgctagcagtctatcaattttgttcatcttttcaaaaaaccagctctcggattcattgattttttgaagggttttttgtgtctctgtctccttcaattctgctctgatcttagttatttcctgccttctgctagcttttgaatgtgtttgctcttgcttctctagttcttttcattgtgatgttagggtgtcaattttagatctttcttgctttctcctgtggtcatttaatgctataaatttccctctacacactgctttaaatgtgtcccagagattctggtatgttgtgtctttgttctcattggtttcaaagaacatctttatttctgccttcatttagttatgtaccaagtagtcattcaggagcaggttgttcagtttccatgtagttgagtggttttgagtgagtttcttaatcctgagttctagtttgattgcactgtggtctgagagacagcttgttataatttctgttcttttacatttgctgaggagtgcttttcttccaaccatgtggtcaattttggaataagtgtaatgtggtgctgagaagaatgtatattctgttgatttggggtggacagttctgtagatgtctattaggtccgcttggtgcagagctgagttcaattcttggatatccttgttaactttctgtctcattgatctgtttaatgttgacagtggggtgttacagtctcccattattattgtgtgggagtctaagtatctttgtaggtctctaaggacttgctttatgaatctgggtgttcctgtattgggcgcatatatatttaggacagttagctcttcttgttgaattgatccctttaccattatgtaatggccttctttgtctcttttgatctttgttggtttaaagtcccttttatcagagactaggattgcaacccttgcttttttttgttttccatttgcttggtagatcttcctccatccctttattttcagtctatgtgtgtctctgcatgtgagctgggtctcctgaatacagcacactgatgggtcttgactctatccaatttgccagtctgtgtcttttaattggagcatttagtccatttacatttaacgttaatattgttatgtgtaaatttgatcatgtcattatgatgttggctggttattttgctcgttagttgatgcagtttcttcctagcatcgatggtctttacaattaggcatgtttttgcagtggctggtaccgattgttcctttccatgtttagtgcttccttcaggagctcttgtaaggcaggcctggtggtgacaaaatctctcagcatttgcttgtctgtaaaggattgtatttctccttcacttatgaagcttaggttgactggatatgaaattctgggttgaaaattcttttctttaagaacgtcgaatattggcccccactctcttctggcttgtagagtttctgccgagagatctgctgttagtctgatgggcttccctttgtgggtaactcgagctttctctctggctgcccttaacattttttccttcatttcaactttggtgaatctgacaattatgtgtcttggagttggtcttctcgaggagtatctttgtggtgttctctgtatttcctgaattttaatgttggcctgccttgctaggttggggaagttctcctggataatatcctgcagagtgttttccaacttggttccattctccctgtcactttccggtacaccaatcagacatagatttgatcttttcatatagtcccatctttcttggaggctttgttcatttctttttactcttttttctctaaacttctcttctcacttcatttcattcatttgatcttcaatcactgataccctttcttccacttgatagaatcggccactgaagcttgtgcatgcatcacgtagttcttgtgccatgattttcagctccatcaggtcatttaaggtcttttctatgctgttcattctagttagccattcgttta

SEQ ID NO: 10420 - DNA, 6147 bp, Homo sapiens
tattgattatttaattaatttttttttattattatactttaagttttagggtacatgtgcacaatgtgcaggttagttacatatgtatatatgtgccatgctggtgtgctgcacccatcaactcgtcatttagcattagctatatctcctaatgccatccctcgcccctccccccaccccacaacaatccccagactgtgatgttccccttcctgtgtccatgtgttgccattgttcaattcccacctatgagtgagaacatgcggtgtttggttttttgtccctgcaatagtttactgagaatgatgatttccaatttcatccatgtccctacaaaggacatgaactcatcattttttatggctggatagtattccatggtgtatatgtgccacattttcttaatccagtctatcattgttggacattcggattggttccaagtctttgctattgtgaatagtgccgcaataaacatatgtgtccatgtgtcattatagcagcatgatttataatcctttgggtatatacccagtaatgggatggctgggtcaaatggtatttctagttctagatccctgaggaattgccacactgacgtccacaatggttgaactagtttacagtcccaccaacagtgtaaaagtgttcttatttctccacatcctctccagcacctgttgtttcctgactttttaatgactgccattccaactggtgtgagatggtatctcattgtggttttgatttgcatttctctgatggccagtgatggtgagcattttttcatgtgttttttggccgcataaatgtcttcttttgagaagtgtctgttcatgtcctttgcccactttttgatggggttgtttttttcttgtaaatttgtttgagttcattgtagattctggatattagccctttgtcagatgagtaggtggcaaaaattttctcccattttgtaggttgcctgttcactctgatggtaatttcttctgctgtgcagaagctccttagtttaattagatcccatttgtcaattttggcttttgttgccattgcttttggtgttttagacatgaagtccttgcccatgcctatgtcctgaatggtattgcctaggttttcttctagggtttttatggttttaggtctaacatttaagtctttaatccatcttgaattaatttttgtataaggtgtaaggaagggatccagtttcagctttctacatatggctagccagttttcccagcaccatttattaaatagggaatcctttccccattgcttgtttttctcaggtttgtcaaagatcagatagttgtagatatgcggcattatttcagagggctctgttccgttccattgatctatatctctgttttggtaccagtaccatcctgttttggttactgtagccttgtagtatagtttgaagtcaggtagggtgatgcctccagctttgttcttttggcttaggattgacttggtgatgtgggctcttttttggttccatatgaactttaaagtcgttttttccaattctgtgaagaaagtcattggtaggttgatggggatggcattgaatctataaattaccttgggcagtatggccattttcacgatattgattcttcctacccatgagcatggaatgttcttccatttgtttgtatcctcttttatttcattgagcagtggtttgtagttctccttgaagaggtccttcacatcccttgtaagttggattcctaggtattttattctctttgaagcaattgtgaatgggagttcactcatgatttggctctctgtttgtctgttattggtgtataagaatgcttgtgatttttgtacattgattttgtatcctgagactttgccaaagttgcttatcagcttaaggagattttgggctgagacaatggggttttctagatatataatcatgtcatctgcaaacagggacaatttgacttgctcttttcctaattgaataccctttatttccttctcctgcctaatttccctggccagaacttaaaacactatgttgaataggagtggtgagagagggcatccctgtcttgtgccagttttcaaagggaatgcttccagtttttgcccattcagtatgatattggctgtgggtgtgtcatagatagctcttattattttgagatacgtcccatcaatacctaatgtattgagagtttttagcatgaagaattgttgaattttgtcaaaggccttctctgcatctattgagataatcatgtgttttttgtccttggttctgatatatgctggattacatttattgatttacgtatattgaaccagccttgcatcccagggatgaagcccagttgattttgctggataagctttttgatgtgtattttattgagaatttttgcatcaatgttcatcaaggaaggatattggtctaaaatgctctttttttgttgtgtctctgcccggctttggtatcaggatgatgctggcctcataaaatgagttagggaagattccctctttttctattgattggaatagtttcagaaggaatggtaccagttcctccttgtacctctggtagaattcggctctgaatccatctggtcctggactctttttggttggtaagctattgattattgccacaatttcagctcctgttattggtctattcagagattcaacttcttcctggtttagtcttgggagagtgtatgtgttgaggaatttatccatttcttctagattttctagtttatttgcatagaggtgtttgcagtattctctgatagtagtttatatttctgtgggatccgtggtgatatccgctttatcattttttattgcatctatttgattcttctctctttttttctttattagtcttgctagtggtctatcaattttgttgatcctttcaaaaaaccagctcctggattcattaattttttgaagggttttttgtgtctctatttccttcagttctgctctgattttagttatttcttgccttctgctagcttttgaatgtgttggctcttgcttttctagttcttttaattgtgatgttagggtgtcaattttggatctttcctgctttctcttgtgggcatttagtgctataaatttccctctacacactgctttgaatgtgtcccagagattctggtatgttgtgtcttttttctcgttggtttcaaagaacatctttatttctgccttcatttcattatgtacctagtagtcattcaggagcaggttgttcagtttccatgtagttgagcggttttgagtgagtttcttaaccctgagttctagtttgattgcactgtggtctgagagacagtttgttataatttctgttcttttacatttgctgaggagagctttacttccaagtatgtggtcaattttggaataggtgtggtgtggtgctgaaaaaatgtatattctgttgatttggggtggagagttctgtagatgtctattaggtctgcttggtgcagagctgagttcaattcctgggtatccttgttgactttgtgtctcgttgatctgtctaatgttgacagtggggtgttaaagtccccattattaatgtgtgggagtctaagtctctttgtaggtcactcaggacttgctttatgaatctgggtgctcctgtattgggtgcatatatatttaggatagttagctcttcttgttgaattgatccctttaccattatgtaatggccttctttgtctcttttgatctttgttggtttaaagtctgttttatcagaggctaggattgcaatccctgcctttttttgttttccatttgcttggtagatcttcctccatccttttattttgagcctatgtgtgtctctgcacgtgagatgggtttcctgaatacagcacactgatgggtcttgactctttatccaatttgccagtctgtgtcttttaattggagcattcagtccatttacattgaaagttaatattgttatgtgtgaatttgatcccgtcattatgatgttagctggttattttgctcgatagttgatgcagtttcttcctagtctcaatggtctttacattttggcatgattttgcagcggctggtaccggttgttcctttccatgtttagcgcttccttcaggagctcttttagggcaggccttgtggtgacaaaatctctcagcatttgcttgtctgtaaagtattttatttctccctcacttatgaagcttagtttggccagatatgaaattctgggttgaaaattcttttctttaagaatgttgaatattggcccccactctcttctggcttgtagagtttctgctgagagatccgctgttagtctgatgggcttccctttgagggtaacccaacctttctctctggctgcccttaacattttttccttcatttcaactttggtgaatctaacaattatgtgtcttggagttgctcttctcgaggagtatctttgtggcgttctctgtatttcctgaatctgaatgttggcctgccttgctagatgggggaagttctcctggataatatcctgcagagtgttttccaacttggttccattctccccatcactttcaggtacaccaatcagacgtagatttggtcttttcacatagtcccatatttcttggaggcttgttcgtttctttttattcttttttctctaaacttcccttctcgcttcatttcattcatttcatcttccatcactgataccctttcttccagttgatcgcattggctcctgaggcttctgcattcttcacgtagttctcgagccttggctttcagctccatcagctcctttaagcacttctctgtattggttattctagttatacattcttctaaatttttttcaaagttttcaacttttttgcctttggtttgaatttcctcctgtagctcggagtagtttgatcatctgaagcttcttctctcaactcgtcaaagtcattctgcatccagctttgttccattttgttccattgctggtgaggagctgcgttcctttggaggaagagaggcgctctggtttttagagtttccagtttttctgctctgtttttttccccatctttgtggttttatctacttttgctctttgatgatggtgatgtacagatgggtttttggtgtggatgtcctttctgtttgttagttttccttctaacagacaggaccctcagctgcaggtctgttggagtttgctagaggtccactccagaccctgtttgcctgggtatcagcagtgttgtctgcataacagcagatttttgtgaaccgcgaatgctgctgtctgatcgttcctctggaagttttgtctcagaggagtacccggccatgtgaaatgtcagtctgcccctactggggggtgcctcccagttagtctgctcgggggtcagggttcggggacccacttgaggaggcagtctgcccgttctcagatctccagctgtgagctgggagaaccactgctctcttcaaagctatcagacagggacatttaagtctgcagaggttactgctgtctttttgtttttctgtgccctgcccccagaggtggagcctacagaggcaggcaggcctccttgagctgtggtgggctccacccagttggagtttcctggctgctttacctcagcaagcctgggcaatggcaggcgcccttcccccagcctcgctgccgccttgcagtttgatctcagactgctgtgctagcaattagtgagactccgtgggcgtaggaccctccgagccaggtgcgggatatgatctcctggtgcgccgttttttaagcccctcggaaaagcgcagtattcgggtgggagtgacccgattttccaggtgccgtctgtcacccctttctttgactaggaaagggaactccctgaccccttgttcttcccgagtgaggcaatgcctcgccctgcttcggctcgtgcacggtggctgcacccactgtcctgcacccactgtctagcactccctagtgagatgaacctggtatctcagatggaaatgcagaaatcacccatcttctgcgttactcacgctgggagctgtagaccagagctgttcctattcggccatctt

SEQ ID NO: 10421 - DNA, 6076 bp, Homo sapiens
ttctttttttttttcctttcttttttttatttttatttttatttttattttttattattatactttaagttttagggtacatgtgcacattgtgcaggttagttacatacgtatacatgtgccatgctggtgtgctgcacccactaactcgtcatctagcattaggtatatctcccaatgctatccctcccccctcccccaaccccacaacagtccccagagtgtgatgttccccttcctgtgtccatgtgatctcattgttcagttcccacctatgagtgagaatatgtggtgtttggttttttgttcttgcgatagtttactgagaatgatgatttccaatttcatccatgtccctacaaaggacatgaactcatcatattttatggctgcatagtattccatggtgtatatgtgccacattttcttaatccagtctatcattgttggacatttgggttggttccaagtctttgctattgtgaataatgccacaataaacatacgtgtgcatgtgtctttatagcagcatgatttataatcctttgggtatatacccagtaatgggatggctgggtcaaatggtatttctagttctagatccctgaggaatcgccacactgacttccacaatggttgaactagtttacagtcccaccaacagtgtaaaagtgttcctatttctccacatcctctccagcacctgttctttcctgactttttaatgattgccattctaactggtgtgagatggtatctcattgtggttttgatttgcatttctctgatggccagtgatgatgagcattttttcatgtgttttttggctgcataaatgtcttcttttgagaagtgtctgttcatgtcctttgcccactttttgatggggttgtttgtttttttcttgtaaatttgtttgagttcatcgtagattctggatattagccctttgtcagatgagtaggttgcgaaaattttctcccatgttgtaggttgcctgttcactctgatggtagtttcttttgctgtgcagaagcactttagtttaattagatcccatttgtcaattttgtcttttgttgccattgcttttggtgttttagacatgaagtccttgcccatgcctatgtcctgaatggtaatgcctaggctttcttctagcgtttttatggttttaggtctaacgtttaagtctttaatccatcttgaattgatttttatataaggtgtaaggaagggatccagtttcagctttctacatatggctagccagttttcccagcaccatttattagatagggaatcctttccccattgcttgtttttctcaagtttgtcaaagatcagatagtcgtagatatgcggcgttatttctgagggctctgttctgttccattgatctatatctctgttttggtaccagtaccatgctgttttggttactgtagccttgtagtatagtttgaagtctggtagtgtgatgcctccagctttgttcttttggcttaggattgacttggcgatgcgggctcttttttggttccatatgaactttatagtagttttttccaattctgtgaagaaaggcattggtagcttgatggggatggcattgaatctgtaagttaccttgggcagtatggccattttcacgatattgattcttcctacccatgagcatggaatgttcttccatttgtttgtatcctcttttatttcattgagcagtggtttgtagttctccttgaagaggtccttcacatcccttgtaagttggattcctaggtattttattctctgtgaagcaattgtgaatgggagttcactcatcatttggctctctatttgtctgttgttggtgtataagaatgcttgtgatttttgtacattgattttgtatcctgagactttgctgaagttgtttatcagcttaaggagattttgggctgagacaatggggttttctagatatacaatcatgtcatctgcaaacagggacaatttgacttcctcttttcctaattgaataccctttatttccttctcctgcctaattggcctggccagaacttccaacactatgttgaataggagtggtgagagagggcatccctgtcttgtgcccgttttcaaagggaatgcttccagtttttgcccattcagtatgatattggctgtgggtttgtcatagatagctcttattattttgaaatacgtcccatcaatacctaatttattgagagtttttagcatgaagggttgttgaattttgtcaaaggccttttctgcatctattgagataatcatgtggtttttgtctttggctctgtttatatgctggattacatttattgatttgagtatattgaaccagccttgcatcccagggatgaagcccacttgatcatggtggataagctttttgatgtgctgctggatttgttttgccactattttattgaggatttttgcatcaatgttcatcaaggatattggtctaaaattctcttttttggttgtgtctctgccaggctttggtatcagaatgatgctggcctcataaaatgagctagggaggattctctctttctctattgattggaatagtttcagaaggaatggtaccagttcctccttgtacctctggtagaattcggctgtgaatccatctggtcctggactctttttggttggtaagctattgattattgccacaatttcagatcctgttattggtctattcagagattcaacttcttcctggtttagtcttgggagagtgtatgtgtcaaggaatttatccatttcttctagattttctagtttatttgcgcagaggtgtttatagtattctctgatggtagtttgtattcctgtggatcggtggtgatatcccctttatcattttttattgcgtctatttgattcttctctctttttttctttattagtcttgctagcagtctatcaattttgttgatcctttcaaaaaaccagctcctggattcattaattttttgaagggttttttgtgtctctatttccttcagttctgctctgattttagttatttcttgccttctgctagcttttgaatgtgtttgctcttgcttttctagttcttttaattatgatactagggtgtcaattttggatctttcctgctttctcttgtgggcatttagtgctataaatttccctctacacactgctttgaatgcatcccagagattctggtacgttgtgtctttgttctcattggtttcaaagaacatctttatttctgccttgatttcgttatgtacccagtagtcattcaggagcaggttgttcagtttccatgtagttgagcggttttgagtgagtttcttaatcctgagttctagtttgattgcactgtggtctgagagatagtttgttataatttctgttcttttacatttgctgaggagagctttacttccaagtatgtggtcaattttggaataggtgtggtgtggtgctgaaaaaaatgtatattctgttgatttggagtggagagttctgtagatgtctattaggtccgcttggtgcagagctgagttcaattcctgggtatccttgttgactttctgtctagttgatctgtctaatgttgacagtggggtgttaaagtctcccattattaatgtgtcggagtctaagtctctttgtaggtcactcaggacttgctttatgaatctgggtgctcctgtattgggtgcatatatatttaggatagttagctcttcttgttgaattgatccctttaccattatggaatggccttctttgtctcttttgatctttgttggtttaaagtctgttttatcagagactaggattgcaatccctgcctttttttgttttccatttgcttggtagatcttcctctatccttttattttgagcctatgtgtgtctctgcacgtgggatgggcttcctgaatacagcacactgatggatcttgactctttatccaatttgccagtctgtgtcttttaattggagcatttagtccatttacatttaaagttaatagtattatgtgtgaatttgatcctgtcattatgatgttagctggttattttgcttgttagttgatgcagtttttttctagtctcgatagtctttacattttggcatgattttgcagtggctggtaccggttgttcctttccatatttagcgcttccttcagcagctcttttagggcaggcctggtggtgacaaaatctctcagcatttgcttgtctgtaaagtattttatttctccttcacttatgaagcttagtttggctggatatgaaattctgggttgaaaattctttcctttaagaatgttgaatattggcccccactctcttctggcttgtagggtttctgccgagagatccgctgttagtctgatgggcttccctatgagggtgacccgacctttctctctggctgcccttaacattttttccttcatttcaactttgatgaatctgacaattatgtgtcttggagttgctcttctcgaggagtatctttgtggcgttctctgtatttcctgaatttgaatgttggcctaccttgctagattggggaagttctcctggataatatcctgcagagtgttttccaacttggttccattctccccatcactttcaggtacaccaatcagacgtagatttggtcttttcacatagtcccatatttcttggaggctttgcttgtttctttttattcttttttctctaaacttcccttctcacttcatttcattcatttcatcttccatcgctgataccctttcttccagttgatcgcatcggctcctgaggcttctgcattcttcacgtatttcttgagccttggttttcagctccatcagctcctttaagcacttctctgtattggttattctagttatacattcttctaaatttttttcaaagttttcaacttctttgcctttggtttgaatgtcctcctgtagctcagagtaatttgatcgtctgaagccatcttctctcagctcgtcaaagtcattctctgttcagctttgttccgttgctggtgaagagctgtgttcttttggaggaggagaggcgctctgctttttagaatttccagtttttctgttctgttttttccccatctttgtggttttatctacttttggtctttgatgatggtgatgtacagatgggtttttggtgtggatgtcctttctgtttgttagttttccttctaacagacaggaccctcagctgcaggtctgtcggagtaccctgcagtgtgaggtgtcagtgtgcccctgctggggggtgcctcccagttaggctgctcgggggtcaggggtcagggacccacttgaggaggcagtctgcgtgttctcagatctccaactgcatactgggagaaccactgctctcttcaaagctgtcagacagggacatttaagtctgcagaggttactgctgtctttttgtttgtctgtgccctgcccccagaggtggagcctacagaggcaagcaggcctccttgagctgtggtgggctccacccagttggagcttccgggctgctttgtttacctaaggaagcctgggcaatggcgggtgcccctcccccagcctcgctgccaccttgcagtttgatctcagactgctgtgctagcaatcagcgagactccgtgggcgtaggaccttccgagccaggtgcaggatataatctcgtggtgcgccgttttttaagcccgtcggaaaagcacagtattcgggtgggattgacccgattttccaggtgccgtccgtcacccctttctttgattaggaaagggaactccctgaccccttgcactttccaagtgaggcaatgcctcgccctgcttcagctcgcgcacggtgcgcgcacccactgacctgcgcccactgtgtggcactccctagtgagatgaacccagtacctcagatggaaatgcagaaatcacctgtcttctgcgtcgctcaggctgggagctgtagaccggagctgttcctattcggccatcttggctcctccctcc

SEQ ID NO: 10422 - DNA, 4726 bp, Homo sapiens
ttgtattaataaactttttttttttaattatactttaagttctagggtacatgtgcacaacgtgcagatctgatacataggtatacatgtgccatgttggtttgctgcacccatcaactcatcatttacattaggtatttctcctaatgctatccctcccccaacccaccacccgcaacaggtcccagtgtgtgatgttccctgccctgtgtccaggtgatctcattgttcagttcccacctatgagtgagaacatgcggtgtttggttttctgtcttgtgatagtttgctgagaatgatggtttccagcttcatccatgtccctgcaaagggcatgaactcatcgttttttatggctgcatagtattccgtggtgtatatgtgccacattttcttaatctagtctatcattggtggatatttgggttggttccaagtctttgctattgtgaatagtgcctcagtaaacatacgtgtgcatgtgtctttatagtagcatgatttataatcctttggatatatacccagtaatgggattgctgggtcaaatggtaattctagttctagatccttgaggaatcgccacactgtcttccacaatggttgaaccagtttacactcccaggaacagtgtaaaagcgttcctatttctccacatcctctccagcatctgttgtttcctgactttttaatgattgccattctaactggcatgagatggtatctcattgtggttttgatttgcatttctctgatggccagtgatgatgagcattttttcatgtgtctgttggctgcataaatgtcttcttttgagaagtgtctgttcatatcctttgcccactttttgatggggttgtttgtttttttcttgtaaatttgtttgagttctttgtagattctggatattagccctttgtcagagggtagattgcaaaaattttctcccattctgtaggttgcctgttcactctgatggtactttcttttgccatgcagaagctctttagtttaattagatcccatttgtctattatggctttcattgccattgcttttgttgttttagtcatgaagtccttgcctatgcctgtggcctgaatggtatttcctaggttttcttgtagggtttttatggttttaggtctaacatttaagtctttaatccatcttgaattaatttttgtataaggtgtaaggaagggatccagtttcagctttctacatatggctagccagttttcccagcaccatttattaaatagggaatccttttcccatttcttgtttttgtcaggtttgtcaaagatcagatggttttagatgtgtggtgttatttctgaggcctctgttctgttccattggtctatatctctgttttggtaccagtaccatgctgtttcggttattgtagtcttctagtatagtttgaggtcaggtagcctgatgcctccagctttgttcttattccttaggattgtcttggcaatgtgggctcttttttggttccatatgaactttaaagtagtttttttccaattctgtgaagaaagttattggtagcttgatggggatggcattgaattctataaattactttgggcagtatggccattttcacaatattgattcttcctatccatgagcatggaatattcttccatttgtttgtgtcctcttttatttcgttgagcagtggtttgtagttctccttgaagagaattggattcctaggtattttattctctttgtagcaattgtattattctctttgtagcaattgtaaatgggagttcactcatgatttgtctctctgcttgtctgttaatggtgtataggaatgcttgtgatttttgcacattgattttgtatcctgagactttgctgaagttgcctatcagcttaaggagattttgggctgagacgatggggttttctaaatatacaatcatgtcatctgcaaacacaacaatttgacttcctcgtttcctaattgaataccctttatttctttctcttgcctgattgccctggccagaacttccgacattgtgttgaataggagtggtgagagagggcatccttgtcttgtgctggttttcaaagggaatgcttccagtttttgcccattcagtatgatattggctgtgggtttgtcataaatagctcttattattttgagaaacattccatcaatacctagtttattgagtgtttttagcatgaagcactgttgaattttgtcaaaggccttttctgcatctattgggataaccatgtggtttttgtcgttggttctgtttatgtgatggattacgtttattgatttgcatatattgaagcagcctttcttccctgggatgaagccagcttgatcgtggtggataaggtttttggtgtgctactggattcggtttgccagtattttattgaggattttcacattgatgttcatcagggatattggtctaaaattctcttttttttgttgtgtctttgccaggctttggtatcaggatgttgctggcctcataaaatgagttagggaggattccctctttttctattgattggaatagtttcaggaggaatggtaccagctcctctttgtacctctggtagaattcagctgtgaatccgtctggtcctggacttgttttggttggtaggctattattgcctgaatttcagagcctgttattggtctattcagagattgaacttcttcctggttgtcttgggagggtgtatgtgtccaggaatttatccattcctcctacattttctagtttatttgcgtagaggtgtttgtagtattctctgacggtagtttgtatttctgtgggatcagtggtgatatcccctttatcattttgtattgtgtatatttgattcttctctcttttcttctttattagtcttgctagtggtctatcaattttgatgatcttttcaaaaaaccagctcctggattcattgatgttttgaagggttttttttgtgtctatcactttcagttctgctctgatcatagttacttcttgccttctgctaggttttgaatttgtttgctcttgcttctctagttcttttaattgtgatgttagggtgtcaattttagatcttttcctggtttctcttgtgggcatttagtgttataaatttccttctacacactgctttaaatgtgtcccagagattctggtacgttgtgtctttgttctcattggtttccaagaacatctttatttctgccttcatttcgttagttacccagtagtcattcaggagcaagttgttcaatttccatgcagttgtgcagttttgagtgagtttcttaatcctgagttctaatttgattgcactgtggtctgagagacagtttgttgtgatttctgttctttcacatttgctgaggagtgctttacttccaattgtgtggtcaattttggaataagtgtgatgtggtgctgagaagaatgtatattctgttgatttagggtggagagttctgtagatgtctattaggtctgcttgttgcagagctgagttcaggtcctggatatccttgttaaccttctgtctcgttgatctgtccaatattgacagtggggtgttaaagtctcccattattattgtttgggagtctaagtctctttgtaggtctctaaggacttgctttatgaatctgagtgctcctgtattgggtgcatatatatttaggatagttagatcttcttgttgaattgatccctttaccattaggtagtggctttctttgtctcttttgatctttgttggtttaacatctgttttatcagagactgggattgcaacccctgcttttttttgctttccatttgcttgttagatcttcctccatgcctttattttgagcctatgtgcgtctttgcacgtgagatgggtctcctgaatgcagcacactgatgggtctttactctatccaatttgcagtctttgtgttttaattggggcatttagcccatttacatttaagggtaatattgttatgtgtgaatttgatcctgtcattatgatgttcgctggttattttgactgttaattgatgcagtttcttcctagcatcaatggtctttacaatttggcctgtttttgcagtggctggtactggttgtttctttccatgtttagtgcttccttcagaagctcttgtaaggcaagccgggtggtgacacaatctgtcagcatttgcttgtctgtaaaggattttatttctccttcacttaggaagcttagtttggctagatatgaaattctgggttgaaaattcttttcattaagaatgttgaacattggcccctactgtcttctggcttgtagggtttctgctgagagatctgctgttagtctgatgggctttcctctgtggataactcgacctttctctctgactgcccttaacactttttccttcatttcaaccttggtaaatctgacaattttgtgtcttggggttgctcttctcgaggagtatctttgtggcattctctgtattttgtgaatttgaatgttggcctgccttgctaggttggggaagttctcctggataatatcctgaagtgtgttttccaatgtggttccattctccccatcactttcaggtacaccaatcaatcgtaaatttgctcttttcacatagtcccatatttcttggaggctttgtttgtttcttttactctttttt

SEQ ID NO: 10423 - DNA, 6072 bp, Homo sapiens
atacaaatattttttttaaattatttttattatactttaagttttagggtacatgtgcacattgtgcaggttagttacatatgtatacatgtgccatgctggtgcgctgcacccactaactcgtcatctagcattaggtatatctcccaatgctatccctcccccctccccccaccccaccacagtccccagagtgtgatattccccttcctgtgtccatgtgatctcattgttcaattcccacctatgagtgagaatatgcggtgtttggttttttgttcttgcgatagtttactgagaatgatggtttccaatttcatccatgtccctacaaaggacatgaactcatcattttttatggctgcatagtattccatggtgtatatgtgccacattttcttaatccagtctatcattgttggacatttgggttggttccaagtctttgctattgtgaataatgctgcaataaacatacgtgtgcatgtgtctttatagcagcatgatttatagtcatttgggtatatacccagtaatgggatggctgggtcaaatggtatttctagttctagatccctgaggaatcgccacactgacttccacaatggttgaactagtttacagtcccacccacagtgtaaaagtgttcctatttctccatatcctctccagcacctgttgtttcctgactttttaatgattgccattctaactggtgtgagatgatatctcatagtggttttgatttgcatttctctgatggccagtgatgatgagcattttttcatgtgttttttggctgcataaatgtcttcttttgagaagtgtctgttcatgtccttcgcccactttttgatggggttgtttgtttttttcttgtaaatttgtttgagttcattgtagattctggatattagccctttgtcagatgagtaggttgcgaaaattttctcccatgttgtaggttgcctgttcactctgatggtagtttcttttgctgtgcagaagctctttagtttaattagatcccatttgtcaattttggcttttgttgccattgcttttggtgttttggacatgaagtccttgcccacgcctatgtcctgaatggtaatgcctaggttttcttctagggtttttatggttttaggtctaacgtttaaatctttaatccatcttgaattgatttttgtataaggtgtaaggaagggatccagtttcagctttctacatatggctagccagttttcccagcaccatttattaaatagggaatcctttccccattgcttgtttttctcaggtttgtcaaagatcagatagttgtaggtatgcggcgttatttctgagggctctgttctgttccattgatctatatctctgttttggtaccagtaccatgctgttttggttaatgtagccttgtagtatagtttgaagtcaggtagtgtgatgcctccagctttgttcttttggcttaggattgacttggcgatgcaggctcttttttggttccatatgaactttaaagtagttttttccaattctgtgaagaaagtcattggtagcttgatggggatggcattgaatctataaattaccttgggcagtatggccattttcacgatattgattcttcctacccatgagcatggaatgttcttccatttgtttgtatcctcttttatttccttgagcagtggtttgtagttctccttgaagaggtccttcatatcccttgtaagttggattcctaggtattttattctctttgaagcaattgtgaatgggagttcactcatgatttggctctctgtttgtctgttgttggtgtataagaatgcttgtgatttttgtacattgattttgtatcctgagactttgctgaagttgcttatcagcttaaggagattttgggctgagacgatggggttttctagataaacaatcatgtcgtctgcaaacagggacaatttgacttcctcttttcctaattgaataccctttatttccttctcctgcctgattgccctggccagaacttccaacactatgttgaataggagcggtgagagagggcatccctgtcttgtgccagttttcaaagggaatgcttccggtttttgcccattcagtatgatattggctgtgggtttgtcatagatagctcttattattttgaaatacgtcccatcaatacctaatttattgagagtttttagcatgaagtgttgttgaattttgtcaaaggctttttctgcatctattgagataatcatgtggtttttgtctttggctctgtttatatgctggattacatttattgatttgcgtatattgaaccagccttgcatcccagggatgaagcccacttgatcatggtggataagctttttgatgtgctgctggattcggtttgccagtattttattgaggatttttgcatcaatgttcatcaaggatattggtctaaaattctcttttttggttgtgtctctgcccggctttggtatcagaatgatgctggcctcataaaatgagttagggaggattccctctttttctattgattgaaatagtttcagaaggaatggtaccagttcctccttgtacctctggtagaatacggctgtgaatccatctggtcctggactctttttggttggtaaactattgattattgccacaatttcagctcctgttattggtctattcagagattcaacttcttcctggtttagtcttgggagagtgtatgtgttgaggaatgtatccatttcttctagattttctagtttatttgcgtagaggtgtttgtagtattctctgatggtagtttgtatttctgtgggatcggtggtgatatcccctttatcattttttattgtgtctatttgattcttctttttttctttattagtcttgctagcggtctatcaattttgttgatcctttcaaaaaactagctcctggattcattgattttttgaagggttttttgtgtctctatttccttcagttctgctctgattttagttatttcttgccttctgctagcttttgaatgtgtttgctcttgcttttctagttcttttaattgtgatgttagggtgtcaattttggatctttcctgctttctcttgtgggcatttagtgctataaatttccctctacacactgctttgaatatgtcccagagattctggtatgttgtgtctttgttctcgttggtttcaaagaacatctttatttctgccttcatttcgttatgtacccagtagtcattcaggagcaggttgttcagtttccatgtagttgagcggctttgagtgagattcttaatcctgagttctagtttgattgcactgtggtctgagagatagtttgttataatttctgttcttttacatttgctgaggagagctttacttccaactatgtggacaattttggaataggtgtggtgtggtgctgaaaaaaatgtatattctgttgatttggggtggagagttctgtagatgtctattaggtccgcttggtgcagagctgagttcaattcctgggtatccttgttgactttctgtctcgttgatctgtctaatgttgacagtggggtgttaaagtctcccattattaatgtgtgggagtctaagtctctttgtaggtcgctcaggacttgctttatgaatctgggtgctcctgtattgggtgcatatatatttaggatagttagctcctcttgttgaattgatccctttaccattatgtaatggccttctttgtctcttttgatctttgttggtttaaagtctgttttatcagagactaggattgcaacccctgcctttttttgttttccatttgcttggtagatcttcctccatccttttattttgagcctatgtatgtctctgcacgtgagatgggtttcctgaatacagcacactgatgggtcttgactctttatccaacttgccagtctgtgtcttttaattggagaatttagtccatttacatttaaagttaatattgttatgtgtgaatttgatcctgtcattatgatgttagctggttattttgctcgttagttgatgcagtttcttcctagtctcgattgtctttacattttggcatgattttgcagtggctggtaccggttgttcctttccatgtttagcgcttccttcaggagctcttttagggcaggcctggtggtgacaaaatctctcagcatttgcttgtctgtaaagtattttatttctccttcacttatgaagcttagtttggctggatatgaaattctgggttgaaaattcttttctttaagaatgttgaatattggcccccactctcttctggcttgtagggtttctgccgagagatctgctgttagtctgatgggcttccctttgagggtaacccgacctttctctctggctgcccttaacattttttccttcatttcaactttggtgaatctgacaattatgtgtcttggagttgctcttctcgaggagtatctttgtggcattctctgtatttcctgaatctgaatgttggcctgccttgctaggttggggaagttctcctggataatatcctgcagagtgttttccaacttggttccattctccacatcactttcaggtacaccaatcagacgtacatttggtcttttcacatagtcccatatttcttggaggctttgctcatttctttttattcttttttctctaaacttcccttctcgcttcatttcattcatttcatcttccattgctgataccctttcttccagttgatcgcatcggctcctgaggcttctgcattcttcacgtagttctcgagccttggttttcagctccatcagctcctttaagcacttctctgtattggttattctagttatacattcttctaaatttttttcaaagttttcaacttctttgcctttggtttgaatgtcctcccgtagctcagagtcatttgatcgtctgaagccttcttctctcagctcgtcaaaatcattctccatccagctttgttccgttgctggtgaggaactgcgttcctttggaggaggagaggcgctctgcgttttagagtttccagtttttctgttctgttttttccccatctttgtggttttatctacttttcgtctttgatgatggtgatgtacagatgggttttcggtgtggatgtcctttctgtttgttatttttccttctaacagacaggaccctcagctgcaggtctgttggaataccctgccgtgtgaggtgtcagtgtgcccctgctggggggtgcctcccagttaggctgctcaggggtcaggggtcagggacccacttgaggaggcagtctgcccgttctcagatctccagctgcatgctgggagaaccactgctctcttcaaagctgtcagacagggacatttaagtctgcagaggttactgctgtctttttgtttgtctgtgccctgcccccagaggtgaagcctacagtggcaggcaggcctccttgaactgtggtgggctccacccagttcgagcttcctggctgctttgtttacctaagcaagcctgggcaatggcgggcgcccctcccccagcctcgctgccgccttgcagtttgatctcagaatgctgtgctagcaatcagagagactccgtgggcgtaggaccctccgagccaggtgtgggatatagtctcgtggtgcgccgttttttaagccggtctgaaaagcgcaatattcgggtgggagtgacccgattttccaggtgcgtccgtcacccctttctttgactcggaaagggaactccctgaccccttgcgcttcccaggtgaggcaatgcctcgccctgcttcggctcgcgcacggtgcgcgcacccactggcctgcgcccactgtctggcactccctagtgagatgaacccggtacctcagatggaaatgcagaaatcacccgtcttctgcgtcgctcacgctgggagctgtagaccggagctgttcctattcggccatcttggctcctccaacccaaatattttttaagtagctgctcagta

SEQ ID NO: 10424 - DNA, 6031 bp, Homo sapiens
ttttcttatttatttatttatttattattattatactttaagttttagggtacatgtgcacaatgtgcaggttagttacatatgtatacacgtgccatgctggtgcgctgcacccaccaactcgtcatctagcattaggtatacctcccaatgctatccctcccccctgccctcaccccacaacagtccccagagtgtgatgttccccttcctgtgtccacgtgttctcattgttcaattcccacctatgagtgagaatatgcggtgtttggttttttgttcttgcgatagtttactgagaatgatgatttccaatttcattcatgtccctacaaaggacatgaactcatcattttttatgactgcatagtattccatggtgtatatgtgccacattttcttaatccagtctatcattgttggacatttgggttggttccaagtctttgctattgtgaataatgccacaataaacatacgtgtgcatgtgtctttatagcagcatgatttatagtcctctgggtatataaccagtaatgggatggctgggtcaaatggtatttctagttctagatccctgaggaatcgccacactgacttccacaatggttgaactagtttacagtcccaccaacagtgtaaaagtgttcctatttctccacatcctctccagcacctgttgtttcctgactttttaatgattgccattctaactggtgtgagatggtatctcattgtggttttgatttgcatttctctgatggccagtgatggtgagcattttttcatgtgttttttggctgcataaatgtcttcttttgagaagtgtctgttcatgtccttcgcccattttttgatggggttgtttgtttttttcttgtaaatttgtttgagttcattgtagattctggatattagccctttgtcagatgagtaggttgcgaaaattttctcccattttgtaggttgcctattcactctgatggtagtttcttttgctgtgcagaagctctttagtttaattagatcccatttgccaattttggcttttgttgccattgcttttggtgttttagacatgaagtccttgcccatgcctatgtcctgaatggtaatgcctaggttttcttctagggtttttatggttttaggtctaacatttaagtctttaatccatcttgaattaatttttgtataaggtgtaaggaagggatccagtttcagctttctacatatggctagccagttttcccagcaccatttattaaatagggaatcctttccccattgcttgtttttctcaggtttgtcaaagatcagatacttgtagatatgcggccttatttctgagggctctgttctgttccattgatctatatctctgttttggcaccagtaccatgctgttttggttactgtagccttgtagtatagtttgaagtcaggtaacgtgatgcctccagctttgttcttttggcttaggatagacttgacgatgcgggctcttttttggtcccatatgaactttaaagtagttttttccaattctgtgaagaaagtcattggtagcttgatggggatagcattgaatctgtaaattaccttgggcagtatggccattttcacgatattgattcttcctacccatgagcatggaatgttcttccatttgtttgtatcctcttttatttccttgagcagtggtttgtagttctccttgaagaggtccttcacatcccttataagttggattcctaggtattttattctctttgaagcaattgtgaatgggagttcactcatgatttggctctgtgtttgtctgttgttggtgtataagaatgcttgtgacttttgtacattgattttgtatcctgagactttgctgaagttgcttatcagcttaaggagattttgggctgagacaatggggttttctagatatacaatcatgtcgtctgcaaacaggaacaatttgacttcctcttttcctaattgaataccctttatttccttctcctgactaattgccctggccagaccttccaacactatgttgaataggagtggtgagagagggcatccctgtcttgtgccagttttcaaagggaatgcttccagtttttgcccattcagtatgatattggctgtgggtttgtcatagatagctcttattattttgaaatacatcccatcaatacctaatttattgagagtttttagcatgaagcattgttgaattttgtcaaaggccttttctgcatctattgagataatcatgtggtttttgtctttgattctgtttatatgctggattacatttattgatttgtgtatattgaaccagccttgcatcccagggatgaagcccacttgatcatggtggataagctttttgatgtgctgctggatttggtttgccagtattttattgaggatttttgcatcaatgttcatcaaggatattggtctaaaattctcttttttggttgtgtctctgcccagctttggtatcaggatgatgctggcctcataaaatgagttagggaagattccctctttttctattgattggaatagtttcagaaggaatggtaccagttcctccttgtacctctggtagaattcggctgtgaatccatctggtcctggactctttttggttggtaagctattgattattgccacaatttcagatcctgttattggtctattcagagattcagcttcttcctggtttagtcttgggagagtgtatgtgtcaaggaatttatccatttcttctagattttctagtttatttgcatagaggtgtttatagtattctctgatggtagtttctgtttctgtgggatcggtgatgatatcccctttatcattttttattgtgtctatttgattcttctctcttttttctttattagtcttgctagcggtttatcaattttgttgatcctttcaaaaaaccagctcctggattcattaattttttggagggtttttttgtgtctctatttccttcaattctgctctgattttagttatttcttgccttctgctagcttttgaatgtgtttgctcttgcttttctagttcttttaattgtgattatagggtgtcaattttagatctttcctgctttctcttgtgggcatttagtgctataaatttccctctacacactgctttgaatgcgtcccagagattctagtatgttgtgtctttgttctcgttggtttcaaagaacatctttatttctgccttcatttcgttatgtacccagtagtcattcaggagcaggttgttcagtttccatgtagttgagcggttttgagtgagattcttaatcctgagttctagtttgattgaactgtggtctgagagatagtttgttataatttctgttcttttacatttgctgaggagagctttactttcaagtatgtggtcaattttggaataggtgtggtgtggtgctgaaaaaaatgtatattctgttgatttggggtggagagttctgtagatgtctattaggtctgcttggtgcagagctgagttcaattcctgggtatccttgttaactttctgtcttgttgatctgtctaatgttgacagtggggtgttaaagtctcccattattaatgcatgggaatctaagtctctttgtaggtcactcaggacttgctttatgaatctgggtgctcctgtattgggtgcatatatatttgggatagttagctcttcttgttgaattgatccctttaccattatgtaatggccttctttgtctcttttgatctttgttggtttaaagtctgttttatcagagactaggattgcaacccctgcctttttttgttttccatttgcttggtagatcttcctccatccttttattttgagcctatgtgtgtctctgcacgtgaaatgggtttcctgaatacagcacactgatgggtcttgactctttatccaatttgccagtctgtgtcttttaattggagcatttagtccatttacatttaaagttaatattgttatgtgtgaatttgatcctgtcattatgatgttagctggttattttgctcattagttgatgcagtttcttcctagtctcaatggtctttacattttggcatgattttgcagcagctggtactggttgttcctttccatgtttagtgcttccttcaggagctcttttagggcaggcctggtggtgacaaaatctctcagcatttgcttgtctgtaaaggattttatttctccttcacttatgaagcttagtttggctggatatgaaattctgggttgaaaattcttttttttaagaatgttgaatattgacccccactctcttctggcttgtagagtttctgccgagagatccgctgttagtctgatgggcttccctttgagggtaacccgacctttctctctggctgttcttaacattttttccttcatttcaactttggtgaatctgacaattacgtgtcttggagttgctcttctcgaggagtatctttgtggcgttctctgtatttcctgaatctgaacgttggcctgccttgctagattggggaagttctcctggataatatcctgcagagtgttttccaacttggttccattctccccgtcactttcaggtacaccaatcagatgtagatttggtcttttcacatagtcccatatttcttggaggctttgctcgtttctttttattcctttttctctaaacttcccttctcgcttcatttcattcatttcatcttccatcactgataccctttcttctagttgatcgcatcagctcctgaggcttctacattcttcacgtagttctcgagccttggttttcagctccatcagctcctttaagcacttctctgtattggttattctagttattcattcttctaaattcttttcaaagttttcaacttctttgcctttggtttgaatgtcctcccatagttcggagtaatttgatcgtctgaagccttcttctctcagctcgtcaaagtcattctccgtccagctttgttccattcctggtgaggaactgcattcctttggaggaggagaggagctctgctttttagagtttccagtttttctgctctgttttttccccatctttgtggttttatctacttttggtctttgacgatggtgatgtacagatgggttttttgtgtggatgtcctttctgtttgttagttttccttctaacagacaggaccctcagctgcaggtctgttagagtacccggccgtgtgaagtgtcagtctgcccctgctggggggtgcctcccagttaggctgctcgggggtcaggggtcagggacccacttgaggaggcagtctgcccgttctcagatctccagctgcgtgctgggagaaccactgctctcttcaaagctgtcagacagggacatttcagtctgcagaggttactgctgtctttttgtttgtctgtgccctgcccccagaggtggagcctacagaggcaggcaggcctccttgagctgtggtgggctccacccagttcgagcttcccggctgttttgtttacctcagcaagcctgggcaatggcgggcgcccctcctccagcctcgctgccaccttgcagtttgatctcagactgctgtgctagcaatcagcgagactctgtgggcgtaggaccctctgagccaagtgcgggatataatctcctggtgggccgttttttaagcccgtcggaaaagcgcagtattcgggtgagagtgacccgattttccaggtgccctctgtcacccctttctttgactaggaaagggaactccctgaccccttgtgcttcctgagtgaggcaatgcctcgccctgcttcggctcacgcacggtgcgcgcacccactgacctgtgcccactgtctggcactccctagtgagatgaacctcagatggaaatgcagaaatcacctgtcttctgcgttgctcacgctgggagctgtagaccggagctgttcctatttggccatcttg

SEQ ID NO: 10425 - DNA, 6088 bp, Homo sapiens
tttttttttttttttttttttttttttttttttttttttttttttttttttttttttattatactctaagttttagggtacatgtgcacattgtgcaggttagttacatatgtatacatgtgccatgctggtgcgctgcacccactaatgtgtcatctagcattaggtatatctcccaatgctatccctcccccctcccccgaccccaccacagtccccagagtgtgatattccccttcctgtgtccatgtgatctcattgttcaattcccacctatgagtgagaatatgcggtgtttggttttttgttcttgcgatagtttactgagaatcatggtttccaatttcatccatgtccctacaaaggatatgaactcatcattttttatggctgcatagtattccatggtgtatatgtgccacattttcttaatccagtctatcattgttggacatttgggttggttccaagtctttgctattgtgaatagtgccgcaataaacatacgtgtgcatgtgtctttatagcagcatgatttatactcatttgggtatatacccagtaatgggatggctgggtcaaatggtatttctagttctagatccctgaggaatcgccacactgacttccacaatggttgaactagtttacagtcccaccaacagtgtaaaagtgttcctatttctccgcatcctctccagcacctgttgtttcctgactttttaatgattgccattctaactggtgtgagatgatatctcatagtggttttgatttgcatttctctgatggccagtgatgatgagcatttcttcatgtgttttttggctgcataaatgtcttcttttgagaagtgtctgttcatgtccttcgcccactttttgatggggttgtttgtttttttcttgtaaatttgtttgagttcattgtagattctggatattagccctttgtcagatgagtaggttgcaaaaattttctcccatgttgtaggttgcctgttcactctgatggtagtttcttttgctgtgcagaagctctttagtttaattagatcccatttgtcaattttgtcttttgttgccattgcttttggtgttttggacatgaagtccttgcccacgcctatgtcctgaatggtaatgcctaggttttcttctagggtttttatggttttaggtttaacgtttaaatctttaatccatcttgaattgatttttgtataaggtgtaaggaagggatccagtttcagctttctacatatggctagccagttttcccagcaccatttattaaatagggaatcctttccccattgcttgtttttctcaggtttgtcaaaaatcagatagttgtagatatgcggcattatttctgagggctctgttctgttccattgatctatatctctgttttggtaccagtaccatgctgttttggttactgtagccttgtagtatagtttgaagtcaggtagtgtgatgcctccagctttgttcttttggcttaggattgacttggcaatgcgggctcttttttggttccatatgaactttaaagtagttttttccaattctgtgaagaaagtcattggtagcttgatggggatggcattgaatctgtaaattaccttgggcagtatggccattttcacgatattgattcttcctacccatgagcatggaatgttcttccatttgtttgtctcctcttttatttccttgagcagtggtttgtagttctccttgaagaggtccttcacatcccttgtaagttggattcctaggtattttattctctttgaagcaattgtgaatgggagttcacccatgatttggctctctgtttgtctgttgttggtgtataagaatgcttgtgatttttgtacattgattttgtatcctgagactttgctgaagttgcttatcagcttaaggagattttgggctgagacgatggggttttctagataaacaatcatgtcgtctgcaaacagggacaatttgacttcctcttttcctaattgaataccctttatttccttctcctgcctgattgccctggccagaacttccaacactatgttgaataggagcggtgagagagggcatccctgtcttgtgccggttttcaaagggaatgcttccagtttttgcccattcagtatgatattggctgtgggtttgtcatagatagctcttattattttgaaatacgtcccatcaatacctaatttattgagagtttttagcatgaagggttgttgaattttgtcaaaggctttttctgcatctattgagataatcatgtggtttttgtctttggctctgtttatatgctggattacatttattgatttgcgtatattgaaccagccttgcatcccagggatgaagcccacttgatcatggtggataagctttttgatgtgctgctggattcggtttgccagtattttattgaggatttttgcatcaatgttcatcaaggatattggtctaaaattctcttttttggttgtgtctctgcctggctttggtatcagaatgatgctggcctcataaaatgagttagggaggattccctctttttctattgattggaatagtttcagaaggaatggtaccagttcctccttgtacctctggtagaattcggctgtgaatccatctggtcctggactctttttggttggtaaactattgattattgccacaatttcagagcctgttattggtcgattcagagattcaacttcttcctggtttagtcttgggagagtgtatgtgtcgaggaatgtatccatttcttctagattttctagtttatttgcgtagaggtgtttgtagtattctctgatggtagtttgtatttctgtgggatcggtggtgatatcccctttatcattttttattgtgtctatttgattcttctctctttttttctttattagtcttgctagcggtctatcaattttgttgatcctttcaaaaaaccagctcctggattcattgattttttgaagggttttttgtgtctctatttccttcagttctgctctgattttagttatttcttgccttctgctagcttttgaatgtgtttgctcttgcttttctagttcttttaattgtgatgttagggtgtcaattttggatctttcctgctttctcttgtaggcatttagtgctataaatttccctctacacactgctttgaatgcgtcccagagattctggtatgtggtgtctttgttctcgttggtttcaaagaacatctttatttctgccttcatttcgttatgtacccagtagtcattcaggagcaggttgttcagtttccatgtagttgagcggctttgagtgagattcttaatcctgagttctagtttgattgcactgtggtctgagagatagtttgttataatttctgttcttttacatttgctgaggagagctttacttccaactatgtggtcaattttggaataggtgtggtgtggtgctgaaaaaaatgtatattctgttgatttggggtggagagttctgtagatgtctattaggtctgcttggtgcagagctgagttcaattcctgggtatccttgttgactttctgtctcgttgatctgtctaatgttgacagtggggtgttaaagtctcccattattaatgtgtgggagtctaagtctctttgtaggtcactgaggacttgctttatgaatctgggtgctcctgtattgggtgcataaatatttaggatagttagctcctcttgttgaattgatccctttaccattatgtaatggccttctttgtctcttttgatctttgttggtttaaagtctgttttatcagagactaggattgcaacccctgcctttttttgttttccattggcttggtagatcttcctccatccttttattttgagcctatgtgtgtctctgcacgtgagatgggtttcctgaatacagcacactgatgggtcttgactctttatccaacttgccagtctgtgtcttttaattgcagaatttagtccatttatatttaaagttaatattgttatgtgtgaatttgatcctgtcattatgatgttagctggtgattttgctcattagttgatgcagtttcttcctagtctcgatggtctttacattttggcatgattttgcagcggctggtaccggttgttcctttccatgtttagcgcttccttcaggagctcttttagggcaggcctggtggtgacaaaatctctcaacatttgcttgtctataaagtattttatttctccttcacttatgaagcttagtttggctggatatgaaattctgggttgaaaattcttttctttaagaatgttgaatattggcccccactctcttctggcttgtagggtttctgccgagagatccgctgttagtctgatgggctttcctttgagggtaacccgacctttctctctggctgcccttaacattttttccttcatttcaactttggtgaatctgacaattatgtgtcttggagttgctcttctcgaggagtatctttgtggcgttctctgtatttcctgaatctgaacgttggcctgccttgctagattggggaagttctcctggataatctcctgcagagtgttttccaacttggttccattctccacatcactttcaggtacaccaatcagacgtagatttggtcttttcacatagtcccatatttcttggaggctttgctcatttctttttattcttttttctctaaacttcccttctcgcttcatttcattcatttcatcttccattgctgataccctttcttccagttgatcgcatcggctcctgaggcttctgcattcttcacgtagttctcgagccttggttttcagctccatcagctcctttaagcacttctctgtattggttattctagttatacattcttctaaatttttttcaaagttttcaacttctttgcctttggtttgaatgtcctcccgtagctcagagtaatttgatcgtctgaagccttcttctctcagctcatcaaaatcattctccatccagctttgttctgttgctggtgaggaactgcgttcctttggaggaggagaggcgctctgcgttttagagtttccagtttttctgttctgttttttccccatctttgtggttttatctacttttggtctttgatgatggtgatgtacagatgggttttcggtgtagatgtcctttctggttgttagttttccttctaacagacaggaccctcagctgcaggtctgttggaataccctgccgtgtgaggtgtcagtgtgcccctgctggggggtgcctcccagttaggctgctcgggggtcaggagtcagggacccacttgaggaggcagtctgcccgttctcagatctccagctgcgtgctgggagaaccactgctctcttcaaagctgtcagacagggacacttaagtctgcagaggttactgctgtctttttgtttgtctgtgccctgcccccagaggtggagcctacagaggcagtcaggcctccttgagctgtggtgggctccacccagttcgagcttcccggctgctttgtttacctaagcaagcctgggcaatggcgggcgcccctcccccagcctcgttgccgccttgcagtttgatctcagactgctgtgctagcaatcagcgagattccgtgggcgtaggaccctccgagccaggtgtgggatatagtctcgtgttgcgccgtttcttaagccggtctgaaaagcgcaatattcgggtgggagtgacccgattttccaggtgcgtccgtcacccctttctttgactcggaaagggaactccctgaccccttgcgcttcccaggtgaggcaatgcctcgccctgcttcggctcgcgcacggtgcgcacacacactggcctgcgcccactgtctggcactccctagtgagatgaacccggtacctcagatggaaatgcagaaatcaccgtcttctgcgtcgctcacgctgggagctgtagaccggagctgttcctattcggccatcttggctcctcccccttcactgtgtttt

SEQ ID NO: 10426 - DNA, 5750 bp, Homo sapiens
ttcttagtgtttttttaaattattatactttaacttctagggtacatgtgcacaacatgcaggtttgttacatatgtatgcatgtgccatgttggtgtgttaactcgttaactcgtcatttacattaggtatatctcctcatgctatgcctcccacctccgcccaccccaggacaggccctggtgtgtgatgttccccaccctgtgtctaagtgttctcattgttcaattcctacctgtgagtgagaacatgcggtgtttggttttctgtccatgcgatagtttgctcagaatgatggtttccagcttcatccatgtccctataaaggacatgaactcattcttttttatggctgtgtagtattccatggtgtatatgtgccacattttcttaatccagtctatcactgatggacatttgggttggttccaagtctttgctattgtgaatagtgccacaataaacatatgtgtgcatgtgtctttatagaagcatgatttataatactttgggtatatacccagtaatgggatggctgggtcaaatgggatttctagctctagatccttgaggaatcgccacactgtcttccacaatggttgaactagtttacagtcccaccaacagtgtaaaagtgttcctatttctccacatcctctccagcacctgttgtttcctgacttcttaatgatcgccattctaaccggtgtgagatggtatctcactgtggttttgattttcatttctccgatggccagtgatgagcattttttcatgtctgttggctgcataaatatcttcttttgagaagtgtctgttcatatcctttgcccactttctgatggggtcgtttgatttttttcttataaatttgtttaagttctttgtagattctgaatattagccctttgtcagatgggtagattgtaaaaattttctcccattttgtaggttgcctgttcactctgatggtagtttctgttgctgtgctgaagctctttagtttatttagatcccatttgtcaattttggcttttgttgccattgcttttggtgttttagtcatgaagtccttgcccatgcctaggtcctgaatggtattgcctaggttttcttctagggtttttatggttttaggtctaacatttaagtctttaatccatcttgaattaatttttgtgtaaggtttaaggaagggatccagtttcagctttctacatatggctagctagttttcccagcaccatttattaaatagggaatcctttccccatttcttgtttttatcaggtttgtcaaagatcagatggttgtagatgtgtggtattatttctgagggctctgttctgttccattggtccatatctctgttttggtaccagtaccatgctgttttggttactgtagccttgtagtgtagtttgaagtcaggtagcatgatgcctccagctttgttcttttggcttaggattgtcttggcaacgtgggctcttttttggttccatatgaactttaaagtagttttttccaattctgtgaagaaagtcattggtagcttgatggggattgcattgaatctataaattaccttgggcagtatggccattttcatgatattgattcttcctatccatgagcatagaatgttcttccatttgtttgtgtcctcttttattttgttgagcagtggtttgtagttcttgaagaggtccttcacatcccttgtaagttggattcctaggtattctattccctttgaagcaattctgaatgggagttcactcatgatttggcctgttattggtatataggaatgcttgtgatttttgcacattgattttgtatcctgagactttgctgaagttgcttatcagcttaaggagattttgggtggagacgatggggttttctaaatatacaatcatgtcatctgcaaacagggacaatttgacttcctcttttcctaattgaatacgctttatttctttctcttgcctgattgtcctggccagaacttccaacactgtgttgaataggagtggtaagagagggcatccctgtcttgtgccagttttcaaagggaatgcttccagtttttgcccattcggtatgatattggctgtgggtttgtcataaataactctgattattttgagatacatcccatcaatacctagtctagggctgggcgcggtggcttacgcctgtaatcccagcactttgggaggctgaggcaggcggatcacaaggttaggacatcgagaccatcctggctaacacagtgaaaccccatctctactaaaaatacaaaaaattagccgggcgtggtggcgggcgcctgtagtcccagctactcaggaggctgaggcaggagaatggtgtgaacccgggaggcagagcttgcagtgagcagaaatcgtgccactgcactccagcctgggcgacagagcaagactccttctcaaaaaaacaaaatgaaacaaaacaaaagaaatacctagtctattgaaagtttttagcatgaagggctgttgaattttgtcgaaggccttttctgcatctattgagattatcatgtggtttttgtcattggttctgtttatgtgatggattatgtttattgatttgcgtatgttgaaccagccttgcatcccagtgatgaagccaacttgattgtggtggataagctttttgatgtgctgctggattcagtttgccagtattttattgaggatttttgcatcgatgttcatttggggatattggtctaaaattctccttttttgttgtatttctgccaggctttggtatcaggatgacgctggcctcataaaatgagttagggaggagtccctctttttctattgattggaatagtttcagaaggaatggtaccagctcctctttgtacctctggtagaatttggctgtgaatccgtctggtcctggactttttctggatggtaggctattgttgcctcaatttcagagcctattgttggtctattcagggattcaacttcttcctggtttagtcttgggagggtgtatgtgttgaggagtttatccatttcttctagattttctagtttatttgcatggaggtgtttatagtgttctctgatggtagtttgtatttctgtgggatcggtgttgatatcccatttatcattttttattgcatctatttgattcttctatcttttcttctttattagtcttgctagcagtctatcaattttgttgatcttttcaaaaaatcagctcctggattcattgattttttgaagggtttttcgtgtttctatctccttcagttctgctctgatcttagttatttcttgccttctgctagcttttgaatgtgtttgctcttgcttctctagttcttttaattgtgatgttagggtgtcaattttagatctttcctgctttctcttgtgggcatttagtgctataaatttccttctatgtactgctttaaatgtgtcccagagattctggtatgttgtgtctttgttctcattggtttcaaagaacatctttctttctgccttcattttgttatgtacccagtagtcattcaggagcaggttgttcagtttccatgtagctgagcgattttgagtgagtttcttaatcctgagttctagtttgattgcactgtggtctgagagacagtttgttacaatttctgttcttttacatttgctgaggagtgctttacttccaactatgtggtcagttttggaataagtgcgatgtggtgctgagaagaatgtgtgttctgttgatttggggtagagagtttggtagatgtctattaggtctgctcggtgcagagctgagttcaagtcctggatatccttgttaactttctgtctcattgatctgtctaatgttgacagtggggtgttaaagtctcccattattattgtgtgggagtctaaatctctttgtaggtctttaagggcttgctttatgaatctggatgctcctgtattgggtgcatatatatttaggatagttagctcttcttgttgaattgatccctttaccattatgtaatggccttctttgtctcttttgatctttgttggtttaaagtctgttttatcagaaactaggattgcaactcctgctttttttttgctttccatttgcttggtagatcttcctccatccctttatgttgagcctatgtgtgtctctgcacgtgagatgggtttcctgaatacagcacactgatgggtcttgactctttatccagtttgccagtctgtgtcttttaatgggagcatttagcccatttacatttaaggttaatatttttatgtgtgaatttgatcctgtcattatgatcttagctggttattttgctcgttagttgatgcggtttcttcctagcatcaatggtctttacaatttgacatgtttttgcagtggcttgtaccggttgttcctttccatgtttattgcttccttcaggagctcttgtaaggcaggcctggtggtgacaaaatctctcagcatttgtttgtctgtaaaggattttatttctccttcacttatgaagcttagtttggctggatatgaaattctgggttgtaaattcttttctttaagaatgttgaatattggcccccactctcttctggcttgtagagtttctgccgagagacctgctcttagtctgatgggcttccctttgtgggtaacccgacctttctctctggctgcccttaatattttctccttcatttcaactttggtgaatctgacaattatgtgtcttggagttgctcttcttgaggagtatctttgtggtgttctctgtatttcctgaatttgaatgttggcctgccttgctaggctggggaagttctcctggataatatcctgaagagtgttttccaacttggttccattctccctgtcattttcaggtacaccaatcagacgtagatttggtcttttcatatagtcctatatttcttggaggctttgtttgtttctttttactcttttttctctaaacttctcttcttgcttcatttcattcatttgatcttccatcactgataccctttctttcacttgatcaaatcagctactgaagcttgtgcatgcgtcatgtagttcttgtgccatggtttttagctccatcaggtcatttaaggacttctctacactgtttattctagttagccattcgtctaatcttttctcaaggttttagcttctttgcgatgggctcgaacatcctcctttagctcggagaagtttgttattaccgatcgtctgaagccgccttctctcaactcgtcaaagtcattctctatccagctttgttccgttgctggcgaggagctgcgttccttgggaggggaagaggagctctgatttttataattttcagcttttctgctctggtttatccccatctttgtggttttatctacctttggtctttgatgatggggacgtacagatggagttttggtgtggatgtcctttctgtttgttagttttccttctaacagtcaggaccctcagctgcaggtctgttggagtttgctggaggtccactccagaccctgtttgcctgggtatcacagcagaggctgcagaacagcaaatattgcagaatggcaaatgttgctgcctgatccttcctctggaagcttcgtctcagaggggcacccggtcgtatgaggtgtcagttggcccctattgggaggtgtctccca

SEQ ID NO: 10427 - DNA, 6049 bp, Homo sapiens
ttatctaaataaattttttcttttattattatactttaagttttagggtacatgtgcacattgtgcaggttagttacatatgtatacatgtgccatgctggtgcgctgcacccactaactcgtcatctagcattagatatatctcccaatgctatccctcccccctccccccaccccacaacagtccccagagtgtgatgttccccttcctgtgtccatgtgatctcattgttcaattcccacctatgagtgagaatgtgcggtgtttggttttttgttcttgtgatagtttactgagaatgatgatttccaatttcatccatgtccctacaaaggacatgaactcatcattttttatggctgcatagtattccatggtgtatatgtgccacattttcttaatccagtctgtcattgttggacatttgggttggttccaagtctttgctattgtgaatagtgacgcaataaacatacatgtgcatgtgtctttatagcagcatgatttatagtcctttgggtatatacccagtaatgggatggctgggtcaaatggtattctagttctagatccctgaggaatcgccacactgacttccacaatggttgaactagtttacagtcccaccaacagtgtaaaagtgttctatttctccacatcctctccagcacctgttgtttcctgactttttaatgattgccattctaactggtgtgagatggtatctcattgtggttttgatttgcatttctctgatggccagtgatgatgagcattttttcatgtgttttttggctgcataaatgtcttcttttgagaagtgtctgttcatatcctttgcccactttttgatgggattgtttgtttttttcttgtaaatttgtttgagttcattgtagattctggatattagccctttgtcagatgagtaggttgcgaagattttctcccattttgtaggttgcctgttcactctgatggtagtttcttttgctgtacagaagctctttattttaattagatcccatttgtcaattttgtcttctgttgccattccttttggtgttttagacatgaagtccttgcccatgcctatgtcctgaatggtattgcctaggttttcttctagggtttttatggttttaggtctgacgtttaaatctttaatccatcttgaattgatttttgtataaggtgtaaggaagggatccagtttcagctttctacatatggctagccagttttcccagcaccgtttattaaatagggaatcctttccccattgcttgtttttctcaggtttgtcaaagatcagatagttgtagatatgcggcgttatttctgagggctctgttctgttccattgatctatatctctgttttggtaccagtaccatgctgttttggttactgtagccttgtagtatagtttgaagtcaggtagcgtgatgcctccagctttgttcttttggcttaggattgacttggcgatgtgggctcttttttggttccatatgaactttaaagtagtttttttccatttctgtgaagaaaggcattggtagcttgatgaggatggcactgaatctgtaaattaccttgggcagtatggccattttcacgatattgattcttcctacccatgagaatggaatgttcttccatttgtttgtatcctcttatttcgttgagcagtggtttgtagttctccttgaagaggtccttcacatcccttggaagttggattcctgggtattttattgtctttgaagcaattgtgaatgggagttctctcatgatttggctctctgtttgtctgttgttggtgtataagaatgcttgtgatttttgtacattgattttgtatcctgagactttgctgaagttgcttatcagcttaaggagattttgggctgagacagtggggttttctagatatacaatcatgtcatctgcaaagagggacaatttgacttcctcttttcctaattgaataccctttatttccttctcctgcctaattgccctggccagaacttccaacaccatgttgaataggagtggtgagagagggcatccctgtcttgtgccagttttcaaagggaatgcttccagtttttgcccattgagtatgatattgtctgtgggtttgtcatagatagctcttattattttgaaatatgtcccatcaatacctaatttgttgagagtttttagcatgaagggttgttgaattttgtcaaaggctttttctgcatctattgagataatcatgtggtttttgtctttggctctgtttatatgctggattacatgtattgatttgcgtatattgaaccagtcttgcatcccagggatgaagcccacttaatcatggtggataagctttttgatgtgctgctggattcgttttgccagtattttattgaggatttttgcatcaatgttcatcaaggatattggtctaatattctcttttttggttgtgtctctgccaggctttggtatcagaatgatgctggactcataaaatgagttagggaggattccctctttttctattgattggaatagtttcagaaggaatggtaccagttcctccttgtacctctggtagaattcggctgtgaatccatctggtcctggactctttttggttggtaagctattgattattgccacaatttcagctcctgttattggtctattcagagattcaacttcttcctggtttagtcttgggagagtgtatgtgttgaggaatttatccatttcttctagattttctagtttatttgcgtagaggtgtttgtagtattctctgatggtagtttgtatttctgttggatcggtggtgatatcccctttatcattttttattgtgtctatttgattcttctctctttttttctttattagtcttactagcggtctatcaattttgttgatcctttcaaaaaaccagctcctggattcattaattttttgaagggttttttgtgtctctatttccttcagttctgctctgattttagttatttcttgccttctgctagcttttgaatgtgtttggtcttgcttttctagttcttttaattgtgatgttagggtgtcaattttggatctttcctgctttctcttgtgggcatttagtgctataaatttctctctacacactgctttgaatgcgtcccagagattctggtatgttgtgtctttgttctcattggtttcaaagaacatctttatttctgccttcatttcgttatgtacccagtagtcattcaggagcaggttgttcagtttccatgtagttgagcggttttgagtgagattcttaatcctgagttctagtttgattgcactgtggtctgagagatagtttgttataatttgtgttcttttacatttgctgaggagagctttacttccaagtatgtggtcaattttggaataggtgtggtgtggtgctgaaaaaaatgtatattctgttgatttggggtggagagttctgtagatgtctattaggtctgcttggtgcagagctgagttcaattcctgggtatccttgttgactttctgtctcgttgatctgtctaatgttgacagtggggtgttaaaatctcccattattaatgtgtgggggtctaagtctctttgtaggtcactcaggacttgctttatgaatctgggtgctcctgtattgggtgcatatatatttaggatagttaactcttcttgttgaattgatccctttaccattatgtaatggccttctttgtcttttttgatctttgttggtttaaagtctgttttatcagagactaggattgcaacccctgcctttttttgttttctatttgcttggtagatcttcctccatccttttattttgagcctatgtgtgtctctgcacgtgagatgggtttcctgaatgcagcacactgatgggtcttgactctttatccaatttgccagtctatgtcttttaattggagcatttagtccatttacatttaaagttaatattgtgatgtgtgaatttgatcctgtcattatgatgttagctggttattttgctcgttagttgatgcagtttcttcctagtctcaatggtctttacattttggcatgattttgcagtggctggtaccggttgttcctttccatgtttagtgcttccttcaggagctcttttagggcaggcctggtggtgacaaaaatctctcagcatttgcttgtttgtaaagtattttatttctccttcacttatgaagcttagtttggctggatatgaaattctgtgttgaacattcttttctttaagaatgttgaatattggcccccactcccttctggcttgtagagtttctgctgagagatcaggtgttagtctgatgggcttccctttgtgggtaacccgacctttctctctggctgcccttaacattttttccttcatttcaactttggtgaatctgacaattatgtgtcttggagttgctcttctcgaggagtatctttgtggcgttctctgtatttcctgaatctgaacgttggcctgccttgttagattggggaagttctcctagataatatcctgcagagtgtttttcaacttggttccattctccgcgtcactttcaggtacaccaatcagatgtagatttggtcttttcacatagtcccatatttcttggaggctttgctcatttctttttattctttttttctctaaacttcccttctcgcttcatttcattcatttcaccttccattgctgataccctttcttccagttgatcgcatcggctcctgaggcttctgcattcttcacgtagttctcgagccttggttttcagctccatcagctcctttaagcacttctttgtattggttattgtagttatacattcttctaaatttttttcaaagttttcaacttctttgtctttggtttgaatgtcctcccgtagctcagagtaatttgatcgtctgaagccttcttctctcaacttgtcaaagtcgttctccgtccagctttgttccgttgctggtgaggaactgcgttcctttggaggaggagaggcgctctgctttttggagtttccagtttttctgttctgttttttccccatctttgtggttttatctccttttggtctttgatgatggtgatgtacagatgggtttttggtgtggatgtcctttctgtttgttagttttccttctaacagacaggaccctcagctgcaggtctgttggagtaccctgccgtgtgaggtgtcagtgtgcccctgctagggggtgcctcccagttaggctgttcgggtgtcaggggtcagggacccacttgaggaggcagtctgcccgttctcagatctccagctgcgtgctgggagaaccactgctctcttcaaagctgtctgacagggacatttaagtctgcagaggttactgctgtctttttgtttgtctgtgccctgcccccagaggtggagcctacagaggcaggcaggcctccttgagctgtgtgggctccacccagttcgagcttcctggctgctttgtttacctaagcaagcctgggcaatggcgggcgcccctcccccagcctcgctgccgccttgcagtttgatctcagactgctgtgctagcaatcagggagactccatgggcgtaggaccctccgagccaggtgtgggatataatctcgtgctgcgctgttttttaagccggtcggaaaagcgcagtatttgggtgggagtgacccgattttccaggtgccatccgtcacccctttctttgactaggaaagggaactcgctgaccccttgcgcttcccgagtgaggcaatgcctcaccctgcttcggctcgcacacggtgcgcgcacccactgatctgcgcccactggcactccctattgagatgaacccggtacctcagatggaaatgcagaaatcacccgtcttctgcgttgctcacgctgggagctgtagaccggagctgttcctattcggccatcttggctcctcccccagtaaatt

SEQ ID NO: 10428 - DNA, 6046 bp, Homo sapiens
agtaatttttcttttttttttattatactttaagttttagggtacatgtgcacatcgtgcaggttagttacatatgtatacatgtgccatgctggtgcgctgcacccactaactcgtcatctagcattaggtatatctcccgatgctatccctcccccctccccccaccccacaacagtccccagagtgtgatagtccccttcctgtgtctatgtgatctcatagttcaattcccacctatgagtgagaatatgcggtgtttggtttttttgttcttgcgatagtttactgagaatgatgatttccaatttcatccatgtccctacaaaggacatgaactcatcatttttttatggctgcaaagaattccatggtgtatatgtgccacattttcttaatccagtctatcattgttggacatttgggttggttccaagtctttgctattgtgaataatgccgcaataaacatacgtgtgcatgtgtctttatagcagcatgatttatagtcctttgggtatacacccagtaatgggatggctgggtcaaatggtatttccagttctagatccctgaggaatcgccacactgacttccacaatggttgaactagtttacagtcccaccaacagtgtaaaagtgttcctatttctccacatcctctccagcacctgttgtttcctgactttttaatgattgccattctaactggtgtgagatggtatctcattgtggttttgatttgcatttctctgatggccagtgatgatgagcattttttcatgtgttttttggctgcataaatgtcttcttttgagaagtgtctgttcatatcctttgcccactttttgatggggttgtttgtttttttcttgtaaatgtgtttgagttcattgtagattctggatattagccctttgtcagatgagaaggttgcgaaaattttctcccattttgtaggttgcctgttcactctgatggtagtttcttttgctgtgcagaagctctttagtttaattagatcccatttgtcaattttggcttttgttgccattgcttttggtgttttagacatgaagtccttgcccatgcttatgtcgtgaatggtaatgcctaggttttcttctaggggttttatggttttaggtctaacgtttaagtctttaatccatcttgaattgatttttgtacaaggtgtaaggaagggatccagtttcagctttctacatatggctagccagttttcccagcaccatttattcaatagggaatcctttccccattgcttgtttttctcaggtttgtcaaagatcagatagttgtagatatgcggcgttatttctgagggctctgttctgttccattgatctatatctctgttttggtaccagtaccacgctgttttggttactgtagccttgtagtatagtttgaagtcaggtagtgtgatgcctccagctttgttctcttggcttaggactgacttggcgatgcgggctctgttttggttcatatgaactttaaagtagttttttccaattctgtgaagaaaggcattggtagcttcatgaggatggcattgaatctgtaaattaccttgggcagtatggtcattttcacgatattgattcttcctacccatgagcatggaatgttcttccatttgtttgtatcctcttttatttccttgagcagtggtttgtagttctccttgaagaggtccttcacatcccttgtaagttggattcctaggtattttattctctttgaagcaattgtgaatgggagttcactcaggatttggctctctgtttgtctgttgttggtgtataagaatgcttgtgatttttgtacattgattttgtatcctgagactttgctgaagttgcttatcagcttaaggagattttgggctgagacaatggggttttctagatatacaatcatgtcgtctgcaaacagggacaatttgacttcctcttttcctaattgaataccctttatttccttctcctgcctgattgccctggccagaacttccaacactatgttgaataggagtggtgagagagggcatccctgtcttgtgccaggtttcaaagggaatgcttccagtttttgcccattcagtatgatattggctgtgggtttgtcatagatagctcttattattttgaaatacgtcccatcaatacctaatttattgagagtttttagcatgaagggttgttgaattttgtcaaaggctttttctgcatctattgagataatcatgtggtttttgtctttggctctgtgtatatgctggattacatttattgatttgcgtatattgaaccagccttgcatcccagggatgaagcccacttgatcatggtggataagctttttgacgtgctgctggattcgttttgccagtattttattgaggatttttgcatcaatgttcatcaaggatattggtctaaaattctctttttttgttgtgtctctgcctggctttggtatcagaatgatgttggcctcaaaatgagttagggaggattccctctttttctattgattggaatagtttcagaaggaatggtaccagttcctcctcgtacctctggtagaattcggctgtgaatccatctggtcctggactctttttggttggtaaactattgattattgccacaatttcagagcctgttattggtctattcagagattcaacttcttcctggtttagtcttgggagggtgtatgtgtccaggaatttatccatttcttctagattttctagtttatttgcgtagagctgtttgtagtattctctgatggtagtttctatttctgtgggatcggtggtgatatcccctttatcattttttattgcgtctatttgattcttctctctttttttctttattagtcttcctagcggtctatcaattttgttgatcctttcaaaaaaccagctcctggattcattaattttttaaagggttttttgtgtctctatttccttcagttctgctctgattttagttatttcttgccttctgctagcttttgaatgtgtttgctcttgcttttctagttcttttaattgtgatgttagggtgtcaattttggatctttcctgctttctctttttggcatttagtgctataaatttccctctacacactgctttgaatgtgtcccagagattctggtatgttgtgtctttgttctcgttggtttcaaagaacatctttatttctgccttcatttcactatgtacccagtagtcattcaggagcaggttgttcagtttccatgtagttgagcggttttgagtgagattcttaatcctgagatcgagtttgattgcactgtggtctgagagatagtttgttataatttctgttcttttacatttgctgaggagagcttcacttccaactatgtggtcaattttggaataggtgtggtgtggtgctgaaaaaaatgtatattctgttgatttggggtggagagttctgtagatgtctattaggtccacttggtgcagagctgagttcaattcctggttatccttgttgactttctgtctcgttgatctgtctaatgttgagagtggggtgttaaagtctcccattattaatgtgtgggagtctaagtttctttgtaggtcactcaggacttgctttatgaatctgggtgctcctgtattgggtgcatatatatttaggatagttagctcttcttgttgaattgatccctttaccattatgtaatggccttctttgtctcttttgatctttgttggtttaaagtctgttttatcagagactaggattgcaacccctgcctttttttgttttccatttgcttggtagatcttcctccatccttttattttgagcctatgtgtgtctctgcacgtgagatgggtttcctgaatacagcacactgatgggtcttgactctttatccaatttgccagtctgtgtcttttaattggagcatttagtccatttacatttaaagtgaatattgttatgtgtgaatttgatcctgtcattatgatgttagctggttattttgctcgttagttgatgcagtttcttcctagtctcgatggtctttacatttaggcatgattttgcagtggctggtaccggttgttcctttccatgtttagtgcttccttcaggaactcttgtaaggcaggcctggtggtgacaaaatctctcagcatttgcttgtctgtaaagtattttatttctccttcacttatgaagcttagtttggctggatatgaaattctgggttgaaaattcttttctttaagaatgttgaatattggcccctactctcttctggcttgtagggtttctgccgagagatcagctgttagtctgatgggcttccctttgagggtgacccgacctttctctctggctgcccttaacattttttccttcatttcaactttggtgaatctgacaattatgtgtcttggagttgctcttctcgaggagtatctttgtggtgttctctgtatttcctgaatctgaacgttggcctgccttgccagattggggaagttctcctggataatatcctgcagagtgttttccaacttggttccattctccccatcactttcaggtacaccaatcagacgtagatttggtcttttcacatagtcccatatttcttggaggctttgctcatttctttttattcttttttctctaaacttcccttcttgcttcatttcattcatttcatcttccatcactgacaccctttcttccagttgatcgcatcggctcctgaggcttctgcattcttcacgtagttcttgagccttggttttcagctccatcagctcctttaagcacttctctgtattggttattctagttataccttcttctaaatttttttcaaagttttcaacttctttgcctttggtttgaatgtcctcccgtagctcagagtaatttgatcatctgaagccttctctcagctcgtcaaagtcattctccatccagctttgttccgttgctggtgaggaactgcgttcctttggaggaggagaggcactctgctttttagagtttccagtttttcttttctgttttttccccaactttgtggttttatctacttttggtctttgatgatggtgatatacagatggacttctggtgtggaagtcctttctgtttgttagttttccttctaacagagaggaccctcagctgcaggtctgttggagtaccctgccgtgtgaggtgtcagtgtgcccctgctggggggtgcctcccagttaggctgctcgggggtcaggggtcagggacccacttgaggaggcagtctgcctgttctcagatctccagctgcgtgctgggagaaccactgctctcttcaaagctgtcagacagggacatttaagtctgcagagattactgctgtctttttgtttgtctgtgtcctgcccccagaggtggagcctacagaggcaggcaggcctccttgagctgtggtgggctccacccagttcgagcttcccggctgctttgtttacctaaggaagcctgggcaatggcgggcgcccctcccccagcctcgctgccgccttgcagtttgatctcagactgctgtgctagcaatcagggagactccgtgggcgtaggaccctccgagccaggtgcgggatataatctcctggtgcgccgttttttaagcccgtcggaaaagcgcagtattccggtaggagtgacccgattttccaggtcccgtctgtaacccctttctttgactcagaaagggaactccctgaccccttgcgcttcccaagtgaggcaatgccttgccctgcttcggctcacgcacggtgcgcgcacccactgacctgcgcccactgtgtggcactccctagtgagatgaacccggtacctcagatggaaatgcagaaatcacccgtcttctgcgtcgctcaagctgggagctgtagaccagagttgttcctatttggccatcttggctcctccccccagtaattt

SEQ ID NO: 10429 - DNA, 5691 bp, Homo sapiens
tatgttgctaggtgattttttatttatttttttattatactttgagttttagggtacatgtgcacaatgtgcaggtttgttacatatgtatacatgtgccatgttggtgtgctgcacccattaactcatcatttaacattaggtatatctcctaatgctacccctcctccctacccccaccccacaacaggccctggtgtgtgatgttccccttcctgtgtccatgtgttctcattgttcaattcccacctatgagtgagaacatgtggtgtttggttttttgtccttgcgatagtttgctgagaatgatggtttccagcttcatccatgtccctacaaaggacatgaactcatcattttttatggctgcatagtattccatggtgtatatgtgccacattttcttaatccagtctatcattgttggacatttgggttggttccaagtctttgctattgtgaatagtgccgcaataaacatatgtgtgcatgtgtctgtatagtagcatgatttataatcctttgggtatatacccagtaatgggatagctgggtcaaatggtatttctagttctagatccctgaggaatcgccacactgacttccacgatggttgaactagtttacagtcccaccaacagtgtaaaagtgttcctatttctccacatcctctccagcacctgttgcttcctgactttttaatgattgccattctaactggtgtgagacggtatctcattgtggttttgatttgcatttctctgatggccagtgatgatgagcattttttcatgtgtcttttggctgcataaatgtcttcttttcagaagtgtctgttcatatccttcacccactttttgatggggctgtttgtttttttcttgtaaatttgtttgagttctttgtagattctgggtattaaccctttgtcagatgagtagattgcaaaaattttctcccattttgtaggttgcctgttcactctgatggtagtttcttttgctgtgcagaagctctttagtttaattagatcccatttgtcaattttggcttttgttgcccttgcttttagtgtttcagacatgaagtccttgcccatgcctatgtcctgaatggtattgcctaggttttcttctatggtttttatggttttaggtctaacatttaagtctttaatccatcttgaattaatttttgtataaggtgtaaggaagggatccagtttcagctttatacatatgactagccagttttcccagcaccatttattaaatagggaatcctttccccatttcttgtttttgtcaggtttgtcaaatatcagatggttgtagatatgtggcattatttctgagggctccattctgttccattggtctatatctctgttttggtaccagtaccatgctgttttggtttctgtagccttgtagtatagtttgaagttaggtagtgtgatgcctccagctttgttcttttggcttaggattgacttggcaatgcaggctcttttttggttccatatgaactttaaagtggttttttccaattctgtgaagaaaatcattggtagcttgatggggatggcattgaatttataaattaccttgggcagtatggccattttcacgatattgattcttcctacccatgagcatggaatgttcttccatttgtctgtatcctcttttatttcattgagcagtggtttgtagttctccttgaagaggtccttcacatcccttgtaagttggattcctaggtattttatcctctttgaagcaattgtgaatgggagttcactcatgatttggctctctgttagtctgttgttggtgtataagaatgcctgtgatttttgcacattgattttgtatcctgagactttgctgaagttgcctatcagcttaaggagattttgggctgagatgatggggttttctagatatacaatcatgtcatctgcaaacagggacaatttgacttcctcttttcctaattgaataccctttatttccttctcctgcctgattaccctggccagaacttccaacactatgttgaataggagtggtgagagagggcatccctgtcttgtgccagttttcaaagggaatgcttacagtttttgcccattcagtatgatattggctgtgggtttgtcacggatagctgttattattctgagatacatcccatcaatacctaatctattgagagtttttagcatgaagcgctgttgaattttgtcaaaggccttttctgcatctattgagataatcatgtggtttttgtcattggttttgtttatagcctggattacgtttactgatttgcgtatgctgaaccagccttgcatcccagggatgaagcccacttgatcatggtgtttaagctttttgatgcgctgctggatttggtttgccagtattttattgaggatttttgcatcaatgttcatcagggatattggtctaaaattctctttttttgttttgtttctgccaggctttggtatcaggatgatgctggcctcataaaatgagttaggaaggattccctctctttctattgattgtaatagtttcagaagcaatggtaccagctcctccttgtacctctggtagaattcggctgtgaatccatctggtcctggactttttttggttggtaagctattaattattgcctcaatttcagagcctatttttggtctattcagagattcaacttcctcctggtttagtcttgggagggtgtatgtgtcgaggaatttatccatttcttctagattttctagtttatttgtgtggaggtgtttatagcattctctgatggtagtttgtatttctgtgggatcggtggtgatatcccctttatcattttttattgcatctatttgattcttctctcttttcttctttattagtcttgctagtggtcggtcaattttgttgatcttttcaaaaaaccagctcctggattcattgattttttttgaagggttttttgtgtctctgtttccttcagttctgctctgatcttagttatttcttgccttctgctagtttttgactgtgtttgctcttgcttctctagttcttttaattgtgatgttagggtgtcaattagatcttttctgctttctcttgtgggcatttagtgctgtaaatttccctctacacactgctttgaatatgtcccagagattctggtatgttctgtctttgttctcgttggtttcaaagaacatctttatttctgctttcatttcgttatgtacccagtagtcattcaggagcaggttgttcagttttcatgtagttgagcggttttgagtgagtttcttaatcctgagttctagtttgattgcaccgtggtctgagagacagtttgttataatttctgttcttttccatttgctgaggagagctttacttccaactatgcagtcaattttgtaatgggtgtggtgtggtgctgaaaagaatgtatattctgttgatttggggtggagaattctgtagatgtctattaggtccacttggtgcagagccgagttcaattcctggatatccttgttaactttctgtcttgttgatctgtctaatgttgacagtagggtgttaaagtctcccattattattgtgtgggagtctaagtctctttgtaggtctctaaggacttgctttatgaatctgggtgctcctgtattgagtgcatatatatttaggatagttatctcttcttgttgaattgatccctttaccattatgtaatggccttctttgtctcttttgatctttgttggcttaaagtctgttttatcagagactaggattgcaacctctgcctttttttgttttccatttgcttggtagatcttcctccatccctttattttgagcctatgtgtgtctctgcacatgagatgggtttcctgaatatagcacactgatgggtcttgactccttatccaatttgccagtctgtgtctttaatttggagcatttagcccatttacatttaaggttaatatggttatgtgtgaatttgatcttgtcattatgatgttagctggttattttgctcattagttgatgcagtttcttcctagcctcaatggtctttacaatttggcatgtttttgcagtggctggtactggttgttcctttccatgtttagtgcttccttcaggagctcttttagggcaggcctgatggtgacaaaatctctcagcatttgcttgtctgtaaagtattttatttctccttcacttatgaagcttagtttggctggatatgaaattctgggttgaaaattcttttctttaagaatgttgaatattggcccccactctcttctggcttgtagagtttctgccaagaggtcagctgttagtctcatgggcttcccttcgtggataacccaacctttctctctggctgcccttaacattttttccttcatgtcaactttggtgaatctgacaattatgtgtcttggagttgctcttcttgaggagtatctttgtggcgttctctgtatttcctgaatatgaatgttgtcctgccttgctagatttgggaagttctcctggataatatcctgcagagtgttttccaacttggttccattctccctgtcactttcaggtacaccaatcagatgtagatttggtcttttcacatagtcccgtatttcttggaggctttgttcatttctttttattcttttttctctaaagttctcttcttgctttatttcatccatttgatcttctatctctgataccgtttcttccagttgatcaaattggctactgaggcttgtgcattcatcacgtagttctcatgccttggttttcagctccatcaggtcctttaaggacttctctgcattagttattctagttagcctttcgtctaattttttttcaaggtttttaacttctttgccatgggttcgaacttcctcctttagctcggagtagtttgatcgtctgaagccttcttatctcaactcgtcaaagtcattgtccgtccagctttgttccattgctggtgaggagttgcgttcctttgggggaggagaggtgctctgatttttagagtttccagtttttctgctctgttttttccccgtctttgtggttttatctacctttggtctttgacgatggtgacatacagatggagttttggtgtggatgtcctttctgtttgttagttttccttctaacagtcaggacccacagctgcaggtctgttggagtttgctggaggtccactccagaccctgtttgcctgggtatcagcagtggaggctgcagaacagcggatattggtgaccagcaaatattgctgcctgatcattcctctggaagttttatctcagaggagcacccggctgtgtgaggtgtcagtctgtccctactggggggtgcctcctagttaggctactcgggggtcagggacccacttgaggagacagtctgtccattctcagatctccagctgcgtgctgggagaaccactactctcttcaaagctgtcagacagggacatttaagtctgcagaggattctgctgccttttgtttggctatgccctgcccccagaggtggagtctacagaggcaggcaggcctccttgagctgcggttggctccacccagttcgagcttcctgg

SEQ ID NO: 10430 - DNA, 14945 bp, Homo sapiens
tttaccaattgtgtaacttctttttttttttttattatactttaagttttagggtacatgtgcacattgtgcaggttagttacatatgtatacatgtgccatgttggtgcgctgcacccactaactcgtcatctagcattaggtatatctcccaatgctatccctcccccctcccccctccccaccacagtccccagagtgtgatattccccttcctgtgtccatgtgatctcattgttcaattcccacctatgagtgagaatatgcggtgtttggttttttgttcttgcgatagtttactgagaatgatgatttccaatttcatccatgtccctacaaaggacacgaactcatcattttttatggctgcatagtattccatggtgtatatgtgccacattttcttaatccagtctatcattgttggacatttgggttggttccaagtctttgctattgtgaataatgccgcaataaacatacgtgtgcgtgtgtctttatagcagcatgatttatagtcatttgggtatataccctgtaatgggatggctgggtcaaatggtatttctagttctagatccctgaggaatcgccacactgacttccacaatggttgaactagtttacagtcccaccaacagtgtaaaagtgttcctatttctccacatcctctccagcacctgttgttacctgactttttaatgattgccattctaaccggtgtgagatggtatctcattgtggttttgatttgcatttccctgatggccagtgatggtgagcattttttcatgtgttttttggctgcataaatgtcttcttttgagaagtgtctgttcatgtccttcgcccactttttgatggggttgtttgtttttttcttgtaaatttgtttgagttcattgtagattctggatattagtgctttgtcagatgagtaggttgcgaaaattttctcccattttgtaggttgcctgttcactctgatggtagtttcttttgctgtgcagaagctctttagtttaattagatcccatttgtcaattttggcttttgttgccattgcttttggtgttttggacatgaagtccttgcccatgcctatgtcctgaatggtaatgcctaggttttcttctagggtttttatggttttaggtctaacgtttaaatctttaatccatcttgaattgatttttgtacaaggtgtaaggaagggatccagtttcagctttctacatatggctagccagttttcccagcaccatttattaaatagggaatcctttccccattgcttgtttttctcaggtttgtcaaagatcagatagttgtagatatgcggcattatttctgagggctctgttctgttccattgatctatatctccgttttggtaccagtaccatgctgtaaagttaaatgtaattatgttgtggaggttatgtctctttttccagcattcttgaaagtaaaagattttcacaactgtctattattgtccaccaagaaacatatgaggaagcaaaatgaattttaataatagcataaaatctgagaaagacacatgtaaatatagtattttaaggttcttatatgaataaagtgatgtgttcttatttaaacatgtatgtataatccctatatcaaccaacataaaagttaaaaataaatcattaaactgcccactcagttttaaaagcggataagaatacaagttgaatagtataaagattagttaaaaataaaacagtgacatgacaaacttaaagtagacaatttcaataattatgttaaatacagactaagatatgaactgtcagatcagataaaaaaacaagaccctactatatgctgtctacaaatcttgttttcaataaaaagatacaaattaaaggtaaaatgataaagataccctatgctaaaatagctagagaaacaatactaacatgatccacttaatacataaaagacacttggcaacatcctgcattaattttataaaaaataataaatttacccacttcctcaacttgataaaggatatctacagctaatatccagtacttattgctgcaagcctcagtgctcttctcttgatgttagaatgaaggcaagtatgtatattctcaccatttctagtcaacattttcctacagacctggcctgtacactagggcaagaaaaagaaataaaaggctttttggaaaccaaaagtcatgattgcctatgcagaaaatttagtgaataatacccacaaaacattctgctagaatcaatcagcaagttttacaaggaaataatatacaagatcaatatataaaactcaattatacttttttatgcaaataatgaaaaatcagaaattgagataaaaataacgttaaaatatcaccaagtataaaagcacctctagagcatttgagtaaagagttctaaaagtgtgttcctcaatcaaagcaatgataatagggcaaaacttatcaaaatcaactatttcagaattctggaatagttgagaaggcctgcaaaaattcaaggagcattcattcaagagaaatggctaaatcctggggaaaaatttcctgctttccttgggaatggcagggagggggcagggaatgtcaggatattttgtaatgctgctaatgactctgggatcacaaaatatataacagggcattggcaaataacagtatcttttgatatatcaagtagcacattacattttacatgtaatagaaaacctttctgaaacataatttcatattttggcttcatcttttataggttataaatacctatatttataacctatataaatgtaacttatgtttatttatacaagcccaaatgtaacttatgtttagtaatgctaaattatatttacatagatatcaaaacaattgtttacatttttactatcattaacaagatcaattgttttgttaatataaaactacagcctcttgtatttgtgaattgttgttttacatagctaaggtatttaaatacctatttatgaattcagttatattaactgaactacttttttatcatcaagcaagataaacatttactgaaaattatgtattttatagaacaggtgaaacttttaccaatacattgctgttttaccacttattaaattttatttttatcctatggttggtctagcttggaagctaaaaattaagtggaattatcggatatcataagaatctgcctgatttagacttcatgaatctaaatgttcttattacttttattttaaaatagcttcctacgggtttgtaattcagacaaattgtttgaatttctgaaacaaataagcaaaatagagtcttgatattgtttgctctctgaatttattactgcttagatcaaaaaagctgaggaaggatggtctcatgatattgaatttgtaacacattacattctagaagatacagacttggaattaaaattcaacttgacattttaaaatgttattaaatttactatcagtcagaacattctgtagaacagaacattttcattgaatctatggcaaactattttggtttggcatttagggctcaattactttggaaggacatttgcccatagaagctgattgattcattcatattccatccccaaagatatcatagtttaaaaagggaactgcatccccattccttaatgtgttgattattaaatagtcatgattaagcttatgtttctgaaataataactacctttgagattattttaccttaaaaatatagcaaattctaacataattaacaaaatataaaatagtgatatcatgggagatttcttttagtgcccactaatacttgggtagtattcaaacatttttattaaaattatcctgttggttccttgtgttctatcagtaataagattagttaatacacagtgatttccacggcaagaatttagactgctaaaagcaagaattagagaggccaaaacactaaatgcctagagtgtgtgattagtaacgtttttctttatctcagtgcttttgaacaagtcactgacttttctgagatgtataaccttttaattttaattttcttcaatgaatgcctaaaatttttgtggtgactcttcttcaaaaataaataacactattacagaaatcaaacttagtaaagaaactgagttgatgtcaatacatatatatatatatatatatatatataccatacacatatatacacatgcacacattcatacacatatatactctttcctgcaatgtggaatgtccaatcccgttcatcaccaacctttcttagatcactttcttttccagctctatctcataagccacatattcaaatgatctcttatctgtatcattgtcttatgtaaagttctgtgctggctccttggagtactgcaaatcagatttgttttatctctttaggttggtgtctccagtgtatctcctggctaatctttatattctcattacttttcacattattgcttatgaaaaaaatttttctttatttcttatcaagaaagtcctctttcggtgacatttgcatctctgtatcagagatttttaaccttttcttatgctatggacaactttagcagactgggaagcctgagtcattttcccaagaataatgtttactttggattacaagagaaactaattacattgagatccaaatgtgtaaatagtaaagaataactgtattatatagtaatttatgtgcccctttaaaattattaatatattacagtgggtctaacaattatgattttgaaatggtgatgagagtaaacaagattttgtggtatctataatgataccaaattatcattatatgaaaatatatgtgtaatatgaaaatttgcataatttttattggtgacaatgtcacagacactgctaatacctactgcgggtttttgcctacatttgtaatgggatctcaagacccaagaatgaggattctgctttatataattttctctgctggtctagaacatttctctcacccccaaaggaaaatttctgcccactgtagtcatttcccatccttacttccaaccttagggaactactgatctggcttttgcttctgtagatttgtttttttattttgaatacttcatataaatgaaaccatatgatatgtgatcttttgtgtctagctgttttcacttagcataacattttgtctcttccttcattttgcagcatgcaacagtaatttgttcctctttattactgaagagtattccattatatggatatacttttgagtaatgacgctataagcttttgtgtaaacattttgtgtaggcaaatattttcatttattttggggagagacctaggagtagaatttatcagtcttacaaagtttaactaatgttaaagttttaagcaattgttaaaatcttttccaaaataggtgcgcaattttacattccctcatcaatgaggatttcatcttttctacaccttcattaacacacgtgcatgtctgacttttgatttagctttccttgtgtttgtaaagcatgatctcattgtgattttacttcatatttccttgatgtctaatgatgttagcatttttcatgtgctcatttgccatttgtatatcttctttggtaaaatatctatccaagctttctgctcagtttttaattcggttatttgtcatcatcttattaaattgaatgagttatgtattctagctaaagtctcttatcagatatattgcttgcaaatgttttcttctagcctgtagcttgtatttatacttacataagggtatattctgaaacacaaaagttttaaattttgatgacaaactttgcctaaaccaagatcatcagaatttactcctgttttattttttaagttttatttttgcctcttacattaggtctaattttatattatgtcatatactaagtctaattaggtactaatttataaggtcaattttgagtgcactctgaggtatgggtctaattcatttattaattaagaggaattgaaagttatttaaatttcttcttttgccctttaatacatcaaaagtcaggcttagtagtgttggtaaataatattatggggaaatctatacagaaaaatgaatgaagaaactgttaatttattctttagtccctaagggaagtgtggaaacaaaaatagaaaagagacaaaaaatttctgaattatgttctgattctcttttctgtgggccttgtcttactaaggagtacattatgttaatgatcataatttaagctaggagcagacacatgttactcataatcaccgttgggagtgtacgtgcagactcctcattggccactctgtaccaactggcatgcagctacatgagagtaaatttggcaggacagtatgagttgggcagcttgaaagagatggctagattgagtcttcttgagccatattatttccacaaaacatagacacagcaccataggtgatttttttttagcagcatccttcatacacagggtaaggcggtagtataagagccctgcagaataacctggctgagccaaggtttaatagagacatggccatatttgattggtctctgtccaactgatctcagacaggttaagcaaagagatgctactaattctttttctttttgtttttttttgagatggtgtcttcctcgttgcccaggctggagtgcaatggcacgatctcggctccccacaacctccgcctcctgggttcaagcgattctcctgcctcagcctcctgagtagctgggattacaggcatgcaccaccacgctcaggtatttgtatttttagtagagatggggtttcaccacattggccaggttggtcttgaactcccgacctcaggtgatctgcccgtctcggcctcccaaagttctgggattacaggcgtgagccaccgcgtccggtgctactagttcttgtctaagtcaaaagagacaagcttacccgttacatcagctacaatattcagctgaaagggcagcaacaccctaatggacaagagacatcacttcaaagggaggtaaaagcatctacacttgataacttacacattttttaactgccctgagtttactcaggtggtgtgcgcttctcaactaaaccacaccccagtcctcccacttgaaaaatgtcagagaaaaatgagcaagggaatgggtaggccacaggagggtctaaacattttggtatcagcctgaacactgcctaactacactgataaaatgatcagaaaataaatatttaaattggattgatcacgaaaagaattttctcagtaagtagcagggggttaaaaatgatcaattcagctacacacaaaataagtttggcaggcagctctaaagaaactcccaataatccccacttcatcatatccatgctcctgcataattcccttgccttgcacatgagaagaacctaataacttgcttttaagaaatagaacatggctaaagtgatgggatgtcactttcatgattttttttttttaatttggaagttagatttaattaattttttttgcattccaggacttatggaattttttttattattattacactttaagttttaaggtacgtgtccacaatgtgcaggttagttacatatgtatacatgtgccatgctggtgtgctgcacccattaactcgtcatttagcattaggtatatctcctaatgctatccctcccccctcccccctccccccacaccacaacagtccccttccatcaccctttctcttactgacacccttgccctggttccgatgaagccaattaccacattgtgagatgttctgggaaaggaccacatggcaaggaaataagggaggcttctgaccaacagcttgtgaagaattgaaaccttagttacaagtcagctggaacagaatcttaccaaccactatattagtgagttaagaagtggatccttccagtaaagctctgagatgagggcagcattgtgaaaatctcaggcctggaggagccacctaagccacacctagattcttggtccacagaaactgtaagatgataacattgctgttttatgctactaagttctggagtaatttgcaatgcagcaatagaaaactaataatttacattacatatatatatatatatctggaaaagggtgataaatgttttttggtttacaacatataatggtgactagaggtcacaaagggtctgaaaatgtttcccttttcatgtagttgagtgtgaatttgggaaggtacaattgtacttcttctctctagcatcattgaaatgaagcctctttgagcatcacatagttgtatatgtatcacacagagtgtatatatatatacattcgctgaagtttacacacccaggcacctcccccaaaatttctttcagtcattgcacactaaggatactgtggggagtaggaattcatcaaatttaattaaaacttgaaaagcatggtgtttcttatggaatataaggagctaacaaaatatacttaagagtgtttaactgttggttttgaattaacatagtccaacaagcttatttgacaggtgaataacaattattctttttcctggaagaaaagggcattcttgaaaaatcatggaaagctttgattaccaactttccatgactaaacctcaatacaaacccagaagctaagagtaggctggagaaggcaatgccaagttaattattaaatacaaaaatggaaacttgaaagagtttagggaagtggagctgaacctagtagcaaaatcagaattatgcataggagccaagatcaggaaggcactctgaaaggattaggtagcatggaactgagttgctaacaaggaataacttaattttccaaactgtgtgatgctcaaagaggcttcatttcaatgatgctagagagaagaagtacaattgtaccttcccaaattcacattcaactacatgaaaaggaaaacatttttagaccctttgtaagccctagtcagcattatattttgtagaccaaaaaaacatttatttattatcacccttttccagatcttttctatttttaaaattaatttcttcccccacacaggtctcaaatatagtttagacctttagaaagcttgtaaaaactgaaagatcttgtcaactctgaaaacagtgtatatgatagaatatttgctaactacacaaatttcaactctggctgactatattagaaccatatccctgccacttaccagatgtgtgaccttgaacatgtcatttaacttatctgaacctgtctcctcatctgaaaaatggatatgataatattagttaccaatataggataattgtgaagtttaaatgagtaaacatgtataaagagctcataataatatatggcaccaaataagttaaagataattatgaattgtattaatcatattattattattactttttattttattattattatactttaagttttagggtacatgtgcacaatgtgtaggtttgttacatatgtatacatgtgccatgttggtgtgctgcacccactaactcgtcatttagcattaggtatatctcctactgctatccctcccccctcccctgaccccacaacagtccccagagtgtgatgttccccttcctgtgtccatgtgttctcattgttcaattcccaatgatgagtgagaacatgcgctgtttggttttttgtccttgcaatagtttgctgagaatgatggtttccagtttcatccatgtccctacaaaggacatgaactcatcattttttatggctgcatagtattccatggtgtatatgtgccacattttcttaatccagtctatcgttgttggacatttgggttggttccaagtctttgctactgtgaatagtgctgcaataaacatacgtatgcatgtgtctttatagcagcatgatttataatcctttgggtatatacccagtaatgggattgctgggtcaaatggtatttctagttctagatccctgaggaattgccacactgacttctacaatggttgaactagtttacagtcccaccaacagtgtaaaagtgttcctatttctccacatcctctccagcatccattgtttcctgactttttaatgatcgccattctaactggtgtgagatggtatctcattgtggttttgatttgcatttccctgatggccagtgatggtgagcattttttcacatgttttttggctacataaatgtcttattttgagaagtgtctgttcatatcctttacccactttttgatggagttgtttgtttttttcttgtaaatttgtttgagttcattgtagattctggatattagccctttgtcagatgagtaggttgcaaaaattttctcccatgttgtaggttgcctgttcactctgatggtagtttcttttactgtgcagaagctctttagtttaattagatcccatttgtcaattttggcttttgttgccattgcttttggtgttttagacatgaagtccttgcccatgcttatgtcctgaatggtaatgcctaggttttcttctagggtttttatggttttaggtctaacatttaagtctttaatccatcttgaattaatttttgtatgaggtgtaaggaagggatccagattcagctttctacatatggctagtcagttttcccagcaccactgattaaatagggaatcttttccccacttcttgtttttgtcaggtttgtcaaagatcagatagttgtagatatgtggcattatttctgagggctctgttctgttccattgatctatatctctgttttggtaccagtaccatgctgttttgattactgtagccttttaatatagtttgaagtcagttagcatgatgcctccagctttgttcttttggcttaggattgacttggcgatgcgggctcctttttggttccatatgaactttaaagtagtttttttcaattctgtgatgaaagtcattggtagcttgatggggatggcattagatctataaattaccttgggcagtgtggccattttcacgatattgattcttcctacccatgagcatggaatgttcttccatttgtttgtatcctcttttatttccttgagcagtggtttgtagttctccttgaagaggtccttcacatcccttgtaagttggattcctaggtatttcattctctttgaagcaattgtgaatgggagttcactcatgatttggctctctgtttgtctgttattggtgtataagaatgcttgtgatttttgtacattgattttgtatcctgagaatttgctgaagttgcttaccagcttcaggaaattttgggctgagacaatggggttttctagatatacaatcatgtcatctgcaaacagggacaatttgacttcctcttttcctaattgaatgccctttatttccttctcctgcctaattgccctggccagaacttccaacactgtgttgaataggagtggtgagagaaggcatccctgtcttgtgccagttttcaaagggaatgcttccagtttttgcccattcagtatgatattggctgtgggtttgtcatagatagctcttattattttgagatatgtcccatcaatacctaatttattgagagtttttagcacgaagcattgttgaattttgtcaaaggccttttctgcatctattgagataatcatgtggcttttgtctttggttctgtttatatgctggattacatttattgatttgcgtatgttgaaccagccttgcatcccagggatgaagcccacttgatcatggtggataagctttttgatgttctgctggattcggtttgccagtattttattgaggatttttgcatcaatgttcatcaaggatattggtctaaaattctcttttttggttgtgtttctgccccccggctttggtatcaggatgatgctggcctcataaaatgagttagggaggattccctctttttctattgattggaatagtttcagaaggaatggtaccagctcctccttttacctctggtagaattcggctgtgaatccatctggtcctggactttttttggttggtaagctattgattattgccacaatttcagatcctgttattggtctatgcagagattcaacttcttcctggtttagtcttgggagggtgttatgtgtcgaggaatttatccacttcttctagattttctagtttatttccttagaggtgtttgtagtattctctgatggtagtttgtatttctgtgggatcagtggtgatatcccctttatcattttttattgcatctatttgattcttctctcttttcttctttattagtcttgctagcagtctatcgattttgttgatcttttcaaaaaagcagctcctggattcattgattttttgaagggttttttgtgtctctatttccttcagttctgctctgattttagttatttcttgccttctgctagcttttgaatgtgtttgctcttgcttttctagttcttttaattgtgatgttagggtgtcaattttggatctttcctgctttctcttgtgggcatttagtgctataaatttccctctacacactgctttgaatgtgtcccagagattctggtatgttgtgtctttgttctcgttggtttcaaacaacatctttacttctgccttcatttcgttatgtacccagtagtcattcaggagcagattgttcagtttccacacagttgagcagttttgagtgagtttcttaatcctgagttctagtttgattgcactgtggtctgagagacagtttgttataatttttgttcttttacatttgctgaggagagctttacttccaactatgtggtcaattttggaataggtgtggtgtggtgctgaaaaaaatgtatattctgttgatttggggtggagagttctgtagatgtctattaggtccgcttggtgcagagctgagttcaattcctgggtatccttgttaactttctgtttcattgatctgtctaatgttgacagtggggtgttaaagtctctcattattattgtgtgggagtctaagcctctttgtaggtcactaaggacttgctttatgaatctgggtgctcctgtattgggtgcatatatattgaggatagttagctcttcttgttgaattgatccctttaccattatgtaatggcctctttgtctcatttgatctttgttggtttaaagtctgttttatcagagactaggattgcaacccctgccttttttttgttttccatttgcttggtagatcttcctccatccctttattgtgagcctatatgtgtctctgcatgtgagatgggtttcctgaatacagcaaactgatgggtcttgactctttatccaatttgccagtctgtgtcttttaattggagcatttagtccatttacatttaaagttaatattgttatgtgtgtatttggttctgtcattatgaggttagctggttattttgctcgttagttgatgcagtttcttcctagccttgatggtctttacattttggcatgtttttgcagtggctggtaccagttgttcctttccatgtttagtgcttccttcaggagctcttttagggcaagccttgtggtgacaaaatctctcagcatttgcttgtctgtaaagtattttatttctccttcacttatgaagcttagtttggctggatatgaaattctgggttgaaatttcttttctttaagaatgttgaatattggtccccactctcttcttgcttgtagagtttctgctgagagatcagctgttagtctgatgggcttccctttgttggtaacgcgacctttctctctggctgcccttaacattttttccttcatttcaacttgggtgaatctgacaattatgtgtcttggagttgatcttcttgaggagtatctttgtggcgttctctgtatttcctgaatttgaatgttggcctgccttgctagattggggaagttctcctggataatatcctggagagtgttttccaacttggttccattctctccatcattttcatgtacaccaatcagatgtagatttggtcttttcacatagtcccatatttcttggaggctttgctcatttctttttattgttttttctctaaacttcccttctcgcttcatttcattcatttcatcttccatcactgataccctttcttccttttgatcgcattggctcctgaggcttctgcattcttcacatagttcttgagccttggctttcagctccatcagctcctttaaggacttctctgcattggttattctagttatccattcgtctaattttttttttcaaagtttttaacttctttgccattggtttgaatttcctcctgtagctcagagtagtttgatcgtctgaagccttcttctctcagctcgtcaaagtcattttccgtccagctttgttccgttgctggtgaggagctgtgttcctttggaggaggaggggtgctctgctttttagagtttccagtttttctgctcttttttttccccatctctgtggttttatctacttttggtctttgatgatggtgatgtacagaagggtttttggtgtggatgtcctttctgtttgttagttttccttctaacagacaggatcctcagcttcaggtctgttggagtttgctagaggtcaacttcagaccctgtttgcctgggtatcagcgtggtggctgtagaacagcggatcttggtgaaccgcaaatgctgctgcctgatcattcctctggaagttttgtctcagaggagtacccggctgtgtgaagtgtcagtctgcccttactggggggttcctcccagttaggctgctcaggggtcaagg

SEQ ID NO: 10431 - DNA, 5602 bp, Homo sapiens
tttttttttcttttttatacgttaagttttagggtacatgtgcacaacgtgctggttagttacatatgtatacatgtgccatgttggtgtgctgcagtcattaactcgtcatttaacattaggtgtatctcctaatgctatccctccccactccccaagccacacaacaggccccggtgtgtgatgttccccttcctgtgtccatgtgttctcattgttcaattcccacctatgagtgagaacgtgtggtgtttggttttttgtcgttgcgatagtttgctgagaatgatggtttccagcttcatccatgtccctacaaaggacatgaactcatcatcttttatgactgcatagtattccacggtgtatatgtgccacattttcttaatccagtctatcattgttggacatttgggttggttccaagtctttgctatggtgaatagtgccacaataaacatacgtgtacatgtgtctttatagcagcatgatttatagtcctttgggtatatacccagtaatgggattgttgggtccaatggtatttctagttctagatccctgaggaattgccacactgacttccacaatggtggaactagtttatagtcccaccaacagtgtaaaagtgttcctatttctccacatcctctccagcacctgttgtttcctgactttttaatgatcgccattctaactggtgtgagatggtatctcattgtggttttgatttgcatttctctgatggccagtgatgatgagcattttttcatgtgtcttttggctgcataaatgtcttcttttgagaagtgcctgttcatatccttctcccactttttgatggggttgtttgttttttccttgtaaatttatttgagttctttatagattctggatattagccctttgtcagatgagtagattgcaaaaattttctcccattttgtgggttgcctgttcactctgatggtagtttcttttgctgtgcagaagctcttgagtttaattagatcccatttgtcaattttggcttttgttgccattgcttttggtgttttagatatgaagtccttgcccatgcctatgtcctgaatggtattgcctaggttttcttctagggtttttatggttttaggtgtaacatttaagtctttaatccatcttgaattaatttttgtataaggtgtaaggaagggatccagtttcagctttctaaatatggctagccagttttcccagcaccatttattaaatagggaatcgtttccccatttcttatttttgtcatgtttgtcaaagatcagatgggtgtagatatgtggcattatttctgagggctctgttctgttccattggtctatatctctgttttggtaccagtactatgctgttttggttactgtagccttgtagtatagtttgaagtcaggtagtgtgatgcctccagctttgttcttttggcttaggattgacttggcaatgtgggcccttttttggttccatatgaactttaaagtagttttttccaattctatgaagaaagttcttggtagcctgatggggatggcattgaatctataaattaccttgggcagtatggccattttcatgatattgattcttcctacccatgagcatggaatgttcttccatttgtttgtatcctcttttatttcattgagcagtggtttatagttctccttgaagaggtctttcacatcccttgtaagctggattcctaggtattttattctgtttgaagccattgtgaatgggagttcactcatgatttggctctctgtttgtctgttattggtgtataagaatgcttgtgatttttgcacattgattttgtatcctgagactttgctgaagttggctgtcagcttaaggagattttgggctgagacgatggggttttctagatatacaatcatgtcatctgcaaacagggacaatttgacttcctcttttcctaattgaatgccctttatttccttctcctgcctgattgccctggccagaacttccaacactgtgttgaataggagtggtgagagagggcatccctgtcttgtgccagttttcaaagggaatgcttccagtttttgcccattcagtatgatattggctgtgggtttgtcatagatagctcttattattttgagatacgtcccatcaatacctaatttattgagagttttagcgtgacgcattgttgaattgtgtcaaaggccttttctgcatctcttgagagaatcatatggtttttgtctttggttctgtttatatgctggattatgtttattgatttgtgtatgttgaaccagccttgcatcccagggatgaagctgacttgatcatggtggataagctttttgatgtgctgctggattcggtttgccagtattttattgaggatttttgcatcgatgttcaccagggatattggtctaaaattttctttttttgctgtgtctctgccaggctttggtagcaggatgatgctggcttcataaaatgagttagggaggattctctctttttctattgattggaacagtttcagaaggaatgttaccagctcctccttgtacctctggtagaatttggctgtgaatccatctggtcctggacttttttggttggtaagttattaattattgcctcaatttcagagcctgttattggtctattcagagattcaacttcttcctggtttagtcttgggagggtgtatgtgtcaaagaatttatccatttcttctagattttctagtttatttgtgtagaggtgttgatagtattctctgatggtagtttgtatttctgtgggatcgggggtgatatcccctttatcattttttattgcatctatttgattcttctctcctttcttctttattagtcttgttagtggtctatcaattttgttgatcttttcaaaaaatcagctgctggattcattgatttttttgaagagttttttgtgtctctgtttccttcagttctgctctgatcttagttatttcttgtcttctgctagcttttgaatgtgtttgctcttgcttctctagttcttttaattgcgatgttagggtgtccattttagatctttcctgcttttccttgtgggcatttagtgctataaatttctctctacacactgctttgaatgtgtcccagagattctggtatgttgtgtctttgttctcgttggtttcaaagaacatctttatttctgccttcatttcattatgtacccaatagtcgttcaggagcaggttgttcagtttccatgtagttgagtggttttgagtgagtttcttaatcctgagttctagtttgattgcactgtggtctgagagacagtttgttataatttcttttcttttacatttgctgaggagtgctttacttccaactatgtggtgcattttggagtaagtgcggtgtggtgctgagaataatgtatattctgttgatttggggtggagagttctgtagatgtctattaggtctgcttggtgcagagctgagttcaattcctggatatcctttttaactttctgtctcgtggatctgtctaatgttgacagtgaggtgttaaagtctcccattattattgtgtgggagtctaagtctctttctaggtctctaaggacttactttatgaatctgggtgctcctgtattggttgaatatatatttaggatagttagctcttcttgttgaattgatccctttaccattatgtaatgaccttctttgtctcttttgatctttgttgttttcaagtctgttttatcagagactaggattgcaacccctgcctttttttgttttccatttgcttggtagatcttcctccatccctttatttgagcctatgtgtgtctctgcacgtgagatgggtttcctgaatacagcacactgatgggtcttgactctttatccaatttgccagtctgtgtcttttaattggagcatttagcccatttacatttaaggctaatattgttatgtgtgaatttgatcctgtcattatgatgttagctggttattttgctcattagttgatgcggtttcggtctttacaatttgtcacatttttgcagtggctggtaccggttgttcctttctatgtttactgcttccttcagaagctcttttagggcaggcctggtggtgacaaaatctcttagcatttgcttgtctgttaaggattttatttctccttcacttatgaagcttagtttggctgcatatgaaattctgagttgaaaattcttttctttaagaatgttgaatattggcccccactctcttctggcttatagagcttctgctgagagatcagctgttagtctgatgggcttccctttttgggtaacccgacctttctctctggctgcccttaacattttttccttcatttcaactttggtgaatctgacaattgtgtgtcttggagttgctcttctggaggagtatcttggtggtgttctctgtatttcctgaatttgaatgttggcctgccttgctagattggggaagttctcctggataatatcctgcagagtgtcattctccctgtcactttcagctacaccaatcagaagtagatttggtcttttcacatagtcccatatttcttggaggctttgttcatttctttttattctttttttctctaaacttctcttctcgcttcatttcattcatttaatcttccatcactgataccctttcttccagttgatcgaatcggctactgaggcttctgcattcatcacgtagttctcatgccttggttttcagctccatcaggtcctttaaggacttctctgcattggttattctagttagccatttgtctaattttttttcaaggtttttaacttctttgccatgggtttgaacttcctcctttaggtcagagtagtttgatcatctgaagccttcttctctcaactcgtcaaagtcattctccgtccagctttgttccactgctgttgaggagctgcgttcctttggaggaggagaggtgctctgatttttagagtttccaatttttctgctctgttttttccccatctttgtggttttatctacctttggtctttgatgatggtgacgtacagatggggttttggtgtggatgtcctttctgtttgttagttttccttctaacagtcaggaccctcagctgcaggtctgttggagtttgctggaggtccactccagaccctgtttgcctgggtatcagcagcggaggctgcagaacagcggatattggtgagcagtaaatgttgctgcctgatcgttcctctggaagttttttctcagaggagtacctggctgtgtgaggtgtcagtctgcccctactggggggtgcctcccagttaggcttgggggtcagggacccacttgaggcagtctgtcagttctcagatctccagctgcatgctgggagaaccactactctcttcaaagctgtcagacagggacgtttaagtctgcagaggtttctgctgccttttgtttggctatgccctgcccccagaggtggagtctacagaggcaggcaggcctccttgagc

SEQ ID NO: 10432 - DNA, 11525 bp, Homo sapiens
ttcttttttttttctttctttttttttttttttttttttttttgagacggagtctcgctctgtcgcccaggctggagtgcactggcgggatctcggctcactgcaagctccgcctcccgggttcacgccattctcctgcctcagcctcccaagtagctgggactacaggcgcccgccactacgcccggctaattttttgtatttttagtagagacggggtttcaccgttttagccgggatggtctcgatctcctgacctcgtgatccgcccgcctcggcctcccaaagtgctgggattacaggcgtgagccaccgcgcccggccagatggatattctaaaagcaatagagtctatcagcactctgttcaagacttccagatggatcgtattatcctttgaataaaatcttatgttttataaaaatgattctcaaacattttaatctcagaatccctttcactctgaaaaattattgaggaagggctccaaagagcttttgtttacgtgggctatatctgtaaatatgtaatttatttaaaattataactaagaatatgtaaacatatttatttgttaaatatttttaaaacaacaataaaaacctattatatgttaatgtaaatgacatattttttatatattgggcaatagagtgagaccctgtctcaaatatatatatatttgagcacccatatatatatgggtgctgttgcccaatctagactgcagtggcatgatcatggctcactgcaacctctgcctcctgggctcaggtgatcctcccacctcagcctcctgagtagctgggactataggtgtgcaccaccacacccagttaattaaacaattttttttgtggaggtgggttttgccatgttgaccaggctgctctcaaactcctgggctcaagtgatctgcctgtcttggcctcccaaaatgccgtgattacaggtgtgagccactgcacctggcgtgaaaaaatatatattttcaaaaacaaaaataatacagtgaggagaatgacattgttttacatttttgcaaatctcttgaatatttggtttaataaaagacagctggattttcatattttcttctgcattcaatctgttgcaatatattgttttgattgaactatatgaagaaaattcaacctggtagaaaaaagtatttgggaaaaggaggaccttatggaacccctgaggatatcagggatccctctggttccccagacgacacgttgaaacagctaacctacaaagttcaacatgatctggcccctacctgtctcttggactttatctgtaaccatctctactttctcactctctgttctagctctgttctaacctcctgccagtccttggactcttcaagcaggttcccaccccaaagcctttggtccctgtgcctggaaactctctagtcttgttcttggatccttccttcacctcatacaggtggcaggttagattttatttcacagagaaatttgttggattactttttgaaaataacacctatatcctctcttattctatttttctctgtcactttaccctgctttattttcataaaacttacaaactggatttgattattacattgtatgtcttctgtactagaatttaaactctatgaggtcaagaccttttttttccttgtatgccattgcatttccacacctgagaagtaattttcacaagaaatatttcttgaatgtattaattaataaataagaaaatcaccaatcagcattgagtctcaaaccagatgacttttctcgcatctttagataatgattttaaaaactgggctttgttgagagaaagagaaatttctatgtgatagagctcctcctttgacatatcagaatggatcatagagctttaatcttgagaagtttgaaagtgtgcttttttcctggtctcggagattgtgggaagaggaagggggatgtaggtagggaagatgtgtggctaaatagctgggttatgagttctccctgccactgactttccacaacttgagaatatgttaggtattttcagggatatggtgagagcagactttgttccaggtaacatctgcgacccctaacagtgaatgcttctcaagctgcatcagagtaatggtgtctataagcacagttagtgagagaaaagattcctaactctgatctgtcttggttcctgtgagacatggaatatggaattgggacatggaagttggttgaaagcataactcagaagtagaccagggtgggctatggcagtacaatgaagtgacagcaagtccagactgcagggtggactgcctcagccagcaaccaaataggaatcaaaaccacaatgcaggggcctgtagctataatggggacaaagtcacagagaggaccaccatcccaaatcaagcccaaagccaatggtgcatcagctacaggcactgggagaagcaagcagccaagggagggacatcattgtgcataccaaagtggacagagggcagttcaaggggctgagtaaatacccaatttccaccattccctcttcctgagatcaataaggccttctacctgctgtatacctggatgacaccttggagtgtcagcagagacagggcagaaaatcagagtatttgcccaaaatagcctaaaaggtttttattgcagaaattaatgaagtgtccttagcttactgcatggagtaaatatagacagggaaagcctggaggtctagttcatgaaactctctgctatttcatctcctacctctggaaggtcaaccgttgtgttggagctcgccattgtcattttaatctttggcatgaaatgacatttgacaaaagaagaaacaccagtgggtaataaacatacacatagaatcactttttattatttttacaaaatcactttattacttttataataataaagacaaactaaagaaacaataaggtacctgataaagggccttttatattggcaaatatctgttgaattatattatccaatatagaaaatatgacagtgaaatagacactcatactctgttagtgatgacacatttctggaggataatttgtcaatattcatctacttctagcgattaatctatgaatactggcagggatagttagtgaccatcaactaactaatcaatttcttattttatgcactgtgtttttgctgttataccctagaaatctttgtatagcccaaatcacaaaaattttctccagtttttaaaaagttatatacttttaggttttacagtttatcatccattttgaagtaatttttgtatatggtgcaaggaataattaaaagttcatttgaagactttttttgcatgtggttagtcagttgtgccagcactccttgctgaatagattatcatttctccactggattgcctttgcaactttgtcaaaaatcaattgattacatgtgtgggtctatttctggactttttattctgtttcattgattttttaaatctattttgatgctaataccacattgccttgattactatagacttataataaatctggaaatcaaatagttaaagtttttgactttgctattctttttcaaagttgttttggctattcaaagtcctttgtattttcatatgaattttagaattagcttgttgatttctacaaaacaagctcgctaagactttgcttggcattgcattaattttatagttcaatttgggaagaactgaaaccttaacaatattcaatcttcctattcatgaacagggaatatctctccatttatttacatctttattttttgatcagtactattttatagttttcagagtacagatcttttacttgtcatagttatctctaaatattctcttcatgctaaggggaacggcattattttttaagaatttcactttaatagtgttcatcactagtgtatagaaatgcaattgactttggtacattggtcttgtatcttgcaaccttgctaaactcacatagtagctataccgtagtccccccttattcttcactttgtatggtttcagttacctaaggtcaactgtggttcaaaaatggaaaattacagaaataaagagtttatgaattttgaagtgtgcgctgttctgagtagtgtgataaaatctcttgccatcccactccattctgctcagaagttgaatcattcctttgtccaaatgtattcgctccttacttattagtcacttagtaaccatctcatttacaagatcaactgttgtggtatttcagtagtatcacagttcaagtaacccttattttacttaattgttctattttaacattagctgttgttaatctcttactgtgactaatttataaattaaattttatcttaggtatgtttacactggaaaaaggtagcgtacatgtagtatatatagttcggtaccatctgaggtttcagacatccactggaggtcttaaaatttacccccctgaagatttaaaaaaaaaaaaaaaagaaaagaaaaacaactgtcatggcatttttgtttattctataaaattttctccaaggacagtcatgtctgtaaaaataatttaaattatttcttcataaactgagctaaataatacctcaagctacataagctaaatactacctcagctgcctccaacaaattttgtatgctgtcctttcattctcattcagttcaaaataccttctaattttctttttgatttcttgtttataacatggggtatttagaagtgtgttatttaactttcagatatttgaagattttccagatatgtttctgttgcttattttagaaatttaattctgttgtaaacagagaacacacatcatacaatttgagtaatttaaaatctattgagacttgttatatggcccagaatatatcttggtaaatgttctgtatgcacttgaaaaaaacgtctattctgttgatgataggtgcagtattatacaaatgtcaattagataaaattggtttgtagtgttgttcgaatctttagctgtaattgtggatttctctatccttgattttttttcaagtattttggaactctattattagtgtgtaattatttaggattgtattctcttaaactaaccacttaactaatatgaaatgaccctctttatctcaggtaataatctgtgctctgaaatctactttgatattaatatagcctctccagctatcttttgactatgttaacatggtgtatcttttcccatctttttactgttaagctatttgtgtctctatatttaaagcgtgtttcttttaggcagcatatacttgcatttttctgttttaatccaatctgaaatctctgcctttcatttttaattattattattattatgatactttaagttttagggtacatgtgcacaatgtgcaggtttgttacatatgtatacatgtgccatgttgatgtgctacacccattaactcgtcatttagcattaggtatatctcctaatgccatccctcccccctccccccaccccacaactttccctggagtgtgatgttccccttcctgtgtccatgtgtcctcattgttcaattcccacctatgagtgagaacatgcggtgtttggttttttgtccttgcaatagtttgctgagaatgatgattttaaatttcatgcatgtccctacaaaggacatgaactcatcattttttatggctgcatagtattccatggtgtatatgtgccacattttcttaatccagtctatcgttgttggacatttgggttggttccaagtctttgctattgtgaatagtgcctcaataaacataagtgtgcatgtgtctttatagcagcatgatttatagtcctttgagtatatatgcagtaatgggatggctgggtcaaatggtatttctagttctagatccctgaggaatcgccacactgacttccacaatggttgaactatattacagtcccaccaacagtgtaaaagtgttcctatttctacacatcctctccagcacctgttgtttcctgactttttaatgattgccattctaactggtgtgagatggtatctcactgtggttttgatttgcatttctctgatggccagtgatgacgagcattttttcatgtgttttttggctgcataaatgtcttcttttgagaagtgtctgttcatatcctttgcccactttttgacagggttgtttgtttttttcttgtaaatttgtttgagttcattgtagcttctggatattagccctttgtcagattagtaagttgtgaaaattttctcccattctgtaggttgcctgttcactctgatggtagtttcttttgctgtgcagaagctctttagttgaattagatcccatttgtcaattttggcttttgttgccattgcttttggtgttttagacatgaagtccttgcccatgcctgtgtcctgaatggtattgcctaggttttcttctagggtttttatggttttaggtctaacatttcagtctttaatccatcttgaattaatttttgtataaggtataaggaagggatccagtttcagctttctacatatggctagccagttttcccagcaccatttattaaatagggaatcctttccccgttgcttgtttttctcaggtttgtcaaagatcaggtagttgtagatatgcggcattatttctgtgggctctgttctgttccattgatctatatctctgttttggtaccagtaccatgctgttttggttactgtagccttgtagtatagtttgaagtcaggtagcatgatacctctggcttttttcttttggcttaggattgacctggtgatgtgggctcttttttggttccatatgaactttaaagtagttttttccaattctgtgaagaaagtcattggtagcttgatgggagtgtcattgaatctataaattaccttggacagtatgaccattttcacgatattgattcttccaacccatgagcatgggatgtttttccatttgtttgtatcctcttttatttccttgagcagtggtttgtagttctccttgaagaggtccttcacatcccttgtaagttggattcctaggtattttattctctttgaagcaattgtgaatgggagttcactcatgatttggctctctgtttgtctgttattggtgtataagaatgcttgtgatttttgtacattgattttgtatcctgagaatttgctgaagttgcttatcagcttgaggagattttggcctgagacgatggggttttctagatatacaatcatgtcatctgcaaacagggacaatttgactccctcttttcctaattgaataccctttatttccttctcctgcctgattgccctggccagaacttccaacactatgttgaataggagtggtgagagagggcatccttgtcttgtgccagttttcaaagggaatgcttccagtttttgcccattcagtatgatattggctgtgggtttgtcataaatagctcttattattttgagatatgtcccatcaatacctaatttattgagagtttttagcatgaagagttgttgaattttgtcaaaggccttttctgcatctattgagataatcatgtggtttttgtctttggttctgttatatgctggattacatttattgatttgcgtatgttgaaccagccttgcatcccagggatgaagcccacttgatcatggtgaataagctttttgatgtgctgctggatttggtttgccagtattttattgaggatttttgcatcaaggttcatcaaggatattggtctaaaattctgtttttttgttgtgtctctgccaggctttgctatgaggatgatgctggcctcatagaatgagttagggaggattccctctttttctattgattggaatagtttcagaaggaatggtaccagctcctccttgtacctctggtagaattcggctgtgaatccgtctggtcctggactctttttggttggtaaactattgattattgcttcaatttcagagcctgttattggtctattcagagattcaacttcttcctggtttagtcttgggagggtgtatgtgtcgaggaatttatccatttcttctagattttctagtttatttgcatagaggtgtttgtagtattctctgacggtagtttgtatttctgtgggattggtgtgatatctgctttatcattttttattgtgtctatttgattcttctctcttttcttctttattagtcttgctagcggtctatcaattttgttgatcttttcaagaaaccagctcctggattcattaattttttgaacggttttttgtgtctctatttccttcagttctgctctgattttagttatttcttgccttctgctagcttttgaatgtgtttgctcttgcttttctagttcttttaattgtgatgttagggtgtcaattttggatatttcctgctgtctcttgtgggcatttagtgctataaatttccctctacacactgctttgaacgtgtcccagatattctggtatgttgtgtctttgttctcgttggtttcaaagaacatctttatttctgccttcatttcattatgtacccagtagtcattcaggagcaggttgttcagtttccatgtagttgcgtggttttgagtgagtttcttaatcctgagttctagtttgattgcactgtggtctgagagacagtttgttataatttctgttcttttacatttgctgaagagtgctttaattccaactatgtggtcaattttggaataggtgtggtgtggtgctgaaaaaaatgtatattctattgatttgggatggagagttctgtagatgtctattaggtctgcttggtgcagagctgagttcaattcctgggtatccttgttaactttctgtctcgttgatctgtctaatgttgacagtggggtgttaaagtctaccattattaatgtgtgggagtctaagtctctttgtaggtcactcaggacttgctttatgaatctgggtgctcctgttttgggtgcatatatatttaggatagttagcccttcttgttgaattgatccctttaccattatgtaatggcctctttgtctcttttgatctttgttagtttaaagtctgttttatcagaaactaggattgcaacccctgcctttttttgttttccatttgcttggtagatcttcctccatccctgtattttgagcccatgtgtgtctctgcatgtgagatgggtttcctgaatacaacacactgatgggtcttgactctttatccaattccccagtctatgtcttttagttggagcatttagcccatttacatttaaagttaatattgttatgtgtgaatttgatcctgtcattatgatgttagctggctattttgctcgttagttgatgcagtttcttcctagccttgatggcctttacaatttgacatgtttttgcagtggctggtactggttgttcctttccatgtttagtgcttccttcaggagctcttttagggcaggcctggtgttgacaaaatctctcagcatttgcttgtctgtaaagtattttatttctccttcatttatgaagcttagtttgggtggatatgaaattctggattgaaaattcttttctttaagaatgttgaatattggcctccactctcttctggcttgtagagtttctgccgagagatcagctgttagtctgatgggcttccatttgtgggtaacacaacctttctctctggctgcccttaacattttttccttcatttcaactttggtgaatctgacaattatgtgtcttggagttgctcttcttgaggagtatctttgtggcgttctctgtatttcctgaatctgaatgttggcctgccttgctagattggggaagttctcctggataatatcctgcagagtgttttccaccttggttccattctccccatcactttcaggtacaccaatcagacgtagatttggtcttttcacatagccccatatttcttggagactttgttcatttctttttattcttttttctctaaacttcccttctcgcttcatttcattcatttcatcttccatcactgataccctttcttccagttgatcgcatcggctcctgaggcctctgcattcttcacgtagttctcgagccttggctttcagctccatcagctcctttaagcacttctctgcattggttattctagttattcatttgtctaattttttttcaaagtttttaacttttttgccattggtttgaatttcctcctgtagcttggagtagtttgatcgtctgaagccttcttctctcaactaatcaaagtcactctccatccagctttgttccattgctggtgaggaactgcattcctttggagtaggagaggtgctctgatttttggagtttccagtttttctgctctgttttttccccatctttgtggttttatctagtttttgtctctgatgatggtgatgtacagatgggtttttggtgtagatgtcctttctgtttgttagttttccttctaacagtcaggaccctcagctgcaggtctgttggagtttgctagaggtccactccagaccctatttgcctgggtatcagcagcagtggctgcaaaacagcgatggctgtagaacagcagattttcatgaaccgcaaatgctgctatcaggaagttttgtctcagaggggtacctggccgtgtgaggtgtcagtctgcccctactggggggtgcctcccagttaggcagctcgggggtcagggacccacttcaggaggcagtctgcccgttctcagatctccagcttcgtgctgggagaaccactactctcctcagagctgtcagacagagacatttaagtctgtagaggttactgctgtctttttgtttgtctgtgccctgcccccagaggtggagcctacagaggcaggcaggcctccttgagctgtgctgggctccacccagtttgagcttccccccgctttgtttacctaagcacgcctgggcaatggcaggtgcccctcccccagcctcgctgctgccttgcagtttgatctcagactgctgtgctagcaatcagggagactctgtgggcgtaggaccctctgagccatgtgcgggatataatctcctggtgtgccatttgttaagcctattggaaaagcacagtattagggtgggagtgacctgattttccaggtgccgtcttgtcacccctttctttgactaggaaagggaactccctgaccccttgcacttcccgagtgaggcattgcctcactctgtttcagctcatgcacggtgcgctgcacccactgtcctgcacccactgtctggcactccctagtgagatgaacctggtacctcagatggaaatgcagaaatcacccatcttctgtgtcgctcacgctgggagctgtagactggagctgttcctattcggccatcttggctccacc

SEQ ID NO: 10433 - DNA, 6070 bp, Homo sapiens
agaaatttagattttattcttttttttttttttttttttttttattatactctaagttttagggtacatgtgcacattgtgcaggttagttacatatgtatacatgtgccatgctggtgcgctgcacccactaatgtgtcatctagcattaggtatatctcccaatgctatccctcccccctcccccgaccccaccacagtccccagagtgtgatattccccttcctgtgtccatgtgatctcattgttcaattcccacctatgagtgagaatatgcggtgtttggttttttgttcttgcgatagtttactgagaatgatggtttccaatttcatccatgtccctacaaaggatatgaactcataattttttatggctgcatagtattccatggtgtatatgtgccacattttcttaatccagtctatcattgttggacatttgggttggttccaagtctttgctattgtgaatagtgccgcaataaacatacgtgtgcatgtgtctttatagcagcatgatttatactcatttgggtatatacccagtaatgggatggctaggtcaaatggtatttctagttctagatccctgaggaatcgccacactgacttccacaatggttgaactagtttacagtcccaccaacagtgtaaaagtgttcctatttctccacatcctctccagcacctgttgtttcctgactttttaatgattgccattctaactggtgtgagatgatatctcatagtggttttgatttgcatttctctgatggccagtgatgatgagcatttcttcatgtgttttttggctgcataaatgtcttcttttgagaagtgtctgttcatgtccttcgcccactttttgatggggttgtttgtttttttcttgtaaatttgtttgagttcattgtagattctggatattagccctttgtcagatgagtaggttgcgaaaattttctcccatgttgtaggttgcctgttcactctgatggtagtttcttttgctgtgcagaagctctttagtttaattagatcccatttgtcaattttgtcttttgttgccattgcttttggtgttttggacatgaagtccttgcccatgcctatgtcctgaatggtaatgcctaggttttcttctagggtttttatggttttaggtttaacgtttaaatctttaatccatcttgaattgatttttgtataaggtgtaaggaagggatccagtttcagctttctacatatggctagccagttttcccagcaccatttattaaatagggaatcctttccccattgcttgtttttctcaggtttgtcaaagatcagatagttgtagatatgcggcattatttctgagggctctgttctgttccattgatctatatctctgttttggtaccagtaccatgctgttttggttactgtagccttgtagtatagtttgaagtcaggtagtgtgatgcctccagctttgttcttttggcttaggattgacttggcaatgcgggctcttttttggttccatatgaactttaaagtagttttttccaattctgtgaagaaagtcattggtagcttgatggggatggcattgaatctgtaaattaccttgggcagtatggccattttcacgatattgattcttcctacccatgagcatggaatgttcttccatttgtctcctcttttatttccttgagcagtggtttgtagttctccttgaagaggtccttcacatcccttgtaagttggattcctaggtattttattctctttgaagcaattgtgaatgggagttcacccatgatttggctctctgtttgtctgttgttggtgtataagaatgcttgtgatttttgtacattgattttgtatcctgagactttgctgaagttgcttatcagcttaaggagattttgggctgagacgatggggttttctagataaacaatcatgtcgtctgcaaacagggacaatttgacttcctcttttcctaattgaataccctttatttccttctcctgcctgattgccctggccagaacttccaacactatgttgaataggagcggtgagagagggcatccctgtcttgtgccggttttcaaagggaatgcttccagtttttgcccattcagtatgatattggctgtgggtttgtcatagatagctcttattattttgaaatacgtcccatcaatacctaatttattgagagtttttagcatgaagggttgttgaattttgtcaaaggctttttctgcatctattgagataatcatgtggtttttgtctttggctctgtttatatgctggattacatttattgatttgcgtatattgaaccagccttgcatcccagggatgaagcccacttgatcatggtggataagctttttgatgtgctgctggattcggtttgccagtattttattgaggatttttgcatcaatgttcatcaaggatattggtctaaaattctcttttttggttgtgtctctgcccggctttggtatcagcatgatgctggcctcataaaatgagttagggaggattccctctttttctattgattggaatagtttcagaaggaatggtaccagttcctccatgtacctctggtagaattcggctgtgaatccatctggtcctggactctttttggttggtaaactattgattattgccacaatttcagagcctgttattggtctattcagagattcaacttcttcctggtttagtcttgggagagtgtatgtgtcgaggaatgtatccatttcttctagattttctagtttatttgcgtagaggtgtttgtagtattctctgatggtagtttgtatttctgtgggatcggtggtgatatcccctttatcattttttattgtgtctatttgattcttctctctttttttctttattagtcttgctagcggtctatcaattttgttgatcctttcaaaaaaccagctcctggattcattgattttttgaagggttttttgtgtctctatttccttcagttctgctctgattttagttatttcttgccttctgctagcttttgaatgtgtttgctcttgcttttctagttcttttaattgtgatgttagggtgtcaattttggatctttcctgctttctcttgtaggcatttagtgctataaatttccctctacacactgctttgaatgcgtcccagagattctggtatgtggtgtctttgttctcgttggtttcaaagaacatctttatttctgccttcatttcgttatgtacccagtagtcattcaggagcaggttgttcagtttccatgtagttgagcggctttgagtgagattcttaatcctgagttctagtttgattgcactgtggtctgagagatagtttgttataatttctgttcttttacatttgctgaggagagctttacttccaactatgtggtcaattttggaataggtgtggtgtggtgctgaaaaaaatgtatattctgttgatttggggtggagagttctgtagatgtctattaggtctgcttggtgcagagctgagttcaattcctgggtatccttgttgactttctgtctcgttgatctgtctaatgttgacagtggggtgttaaagtctcccattattaatgtgtgggagtctaagtctctttgtaggtcactgaggacttgctttatgaatctgggtgctcctgtattgggtgcataaatatttaggatagttagctcctcttgttgaattgatccctttaccattatgtaatggccttctttgtctcttttgatctttgttggtttaaagtctgttttatcagagactaggattgcaacccctgcctttttttgttttccattggcttggtagatcttcctccatccttttattttgagcctatgtgtgtctctgcacgtgagatgggtttcctgaatacagcacactgatgggtcttgactctttatccaacttgccagtctgtgtcttttaattgcagaatttagtccatttatatttaaagttaatattgttatgtgtgaatttgatcctgtcattatgatgttagctggtgattttgctcattagttgatgcagtttcttcctagtctcgatggtctttacattttggcatgattttgcagcggctggtaccagttgttcctttccatgtttagcgcttccttcaggagctcttttagggcaggcctggtggtgacaaaatctctcaacatttgcttgtctataaagtattttatttctccttcacttatgaagcttagtttggctggatatgaaattctgggttgaaaattcttttctttaagaatgttgaatattggcccccactctcttctggcttgtagggtttctgccgagagatccgctgttagtctgatgggctttcctttgagggtaacccgacctttctctctggctgcccttaacattttttccttcatttcaactttggtgaatctgacaattatgtgtcttggagttgctcttctcgaggagtatctttgtggcgttctctgtatttcctgaatctgaacgttggcctgccttgctagattggggaagttctcctggataatatcctgcagagtgttttccaacttggttccattctccacatcactttcaggtacaccaatcagacgtagatttggtcttttcacatagtcccacatttcttggaggctttgctcatttctttttattcttttttctctaaacttcccttctcgcttcatttcattcatttcatcttccattggtgataccctttcttccagttgatcgcatcggctcctgaggcttctgcattcttcacgtagttctcgagccttggttttcagctccatcagctcctttaagcacttctctgtattggttattctagttatacattcttctaaatttttttcaaagttttcaacttctttgcctttggtttgaatgtcctcccgtagctcagagtaatttgatcgtctgaagccttcttctctcagctcgtcaaaatcattctccatccagctttgttctgttgctggtgaggaactgcgttcctttggaggaggagaggcgctctgcgttttagagtttccagtttttctgttctgttttttccccatctttgtggttttatctacttttggtctttgatgatggtgatgtacagatgggttttcggtgtagatgtcctttctggttgttagttttccttctaacagacaggaccctcagctgcaggtctgttggaataccctgccgtgtgaggtgtcagtgtgcccctgctggggggtgcctcccagttaggctgctcgggggtcaggagtcagggacccacttgaggaggcagactgcccgttctcagatctccagctgcgtgctgggagaaccactgctctcttcaaagctgtcagacagggacacttaagtctgcagaggttactgctgtctttttgtttgtctgtgccctgcccccagaggtggagcctacagaggcaggcaggcctccttgagctgtggtgggctccacccagttcgagcttcccggctgctttgtttacctaagcaagcctgggcaatggcgggcgcccctcccccagcctcgttgccgccttgcagtttgatctcagactgctgtgctagcaatcagcgagattccgtgggcgtaggaccctccgagccaggtgtgggatatagtctcgtcgtgcgccgtttcttaagccggtctgaaaagcgcaatattcgggtgggagtgacccgattttccaggtgcgtccgtcacccctttctttgactcggaaagggaactccctgaccccttgcgcttcccaggtgaggcaatgcctcgccctgcttcggctcgcgcacggtgcgcacacacactggcctgcgcccactgtctggcactccctagtgagatgaacccggtacctcagatggaaatgcagaaatcaccgtcttctgcgtcgctcacgctgggagctgtagaccggagctgttcctattcggccatcttggctcctcccgctttgttttctttt

SEQ ID NO: 10434 - DNA, 10827 bp, Homo sapiens
tttaaattttttttattatgctttaagttttagggtacatgtgcacattgtgcatgttagttacatatgtatacatgtgccatgctggtgcgctgcacccactaactcatcatctagcattaggtatatctcccaatgctatccctcccccctcccccctccccccaccccaccacagtccccagagtgtgatattccccttcctgtgtccatgtgatctcattgttcaattcccacctatgagtgagaatatgcggtgtttggttttttgttcttgtgatagtttactcagaatgatgacttccaatttcatccatgtccctacaaaggacatgaacccatcattttttatggctgcatagtattccacggtgtatatgtgtcacattttcttaatccagtctatcattgttggacatttgggttggttccaagtctttgctattgtgaataatgccgcaataaacatatgtgtgcatgtgtctttatagcagcacgatttatagtcctttgggtatatacccagtaatgggatggctgggtcaaatggtatttctagttctagatccctgaggaatcgccacactgacttccacaatggttgaactagtttacggttccaccaacagtgtaaaagtgttcctatttctccacatcctctccagcacctgttgtttcctgactttttaatgattgccattctaactggtgtgagatggtatctcattgtggttttgatttgcatttctctgatggccagtgatgatgagcgttttttcatgtgttttttggctgcataaatgtcttcttttgagaagtgtctgttcatgtccttcgcccactttttgatggggttgtttgtttttttcttgtaaatttgtttgagttcattgtagattctggatattagccctttctcagatgagtaggttgcgaaaattttctcccattttgtaggttgtctgttcactctgatggtagtttcttttgctgtgcagaagctctttagtttaattagatcccatttgtcaattctggcttttgctgccattgcttttggtgttttggacatgaagtccttgcccatgcctatgtcctgaatggtaatgcctaggttttcttctagggtttttatggttttaggtctaacgtttaagtctttaatccatcttgaattgatttttgtataaggtgtaaggaagggatccagtttcagctttctacatatggctagccagttttcccagcaccatttattaaatagggaatcctttccccattgcttgtttttctcaggtttgtcaaacatcagatagttgtagatatgcggcattatttctgagggctctgttctgttccattgatctatatctctgttttggtaccagtaccatgctgttttggttactgtagccttgtagtatagtttgaagtcaggtagtgtgatgcctccagctttgttcttttggcttaggattgccttggcggtgtgggctcttttttggttccatatgaactttaaagtagttttttccaattctgtgaagaaagtcattggtagcttgatggggatggcattcaatctgtaaattgccttgggcagtatggccattatcacgattttgattcttcctacccatgagcatggaatgttcttccatttgtttgtatcctcttttatttccttgaggagtggtttgtagttctcctcgaagaggtccttcacatcccttgtaagttggattcctaggtattttattctctttgaagcaattgtaaatgggagttcactcatgatttggctctctgtttgtctgttattggtgtataagaatgcttgtgatttttgtacattgattttgtatcctgagactttgctgaagttgcttatcagcttaaggagattttgggctgagacaatggggttttctagatatacaatcatgtcatctgcaaacagggacaatttgacttcctcttttcctaattgaataccctttatttccttcccctgcctaattgccctggccagaacttccaacactatgttgaataggagtggtgagagagggcatccctgtcttgtgccagttttcaaagggaatgcttccagtttttgcccattcagtatgatattggctgtgggtttgtcatagatagctcttattattttgaaatacgtcccatcagtacctaatttattgagagtttttagcatgaacggttgttgaattttgtcaaaggctttttctgcatctattgagataatcatgtggtttttgtctttggctctgtttatatgatggattacatttattgatttgcatatattgaaccagccttgcatcccagggatgaagcccacttgatcatggtggataagctttttgatgtgctgctggattcggtttgccagtattttattgaggatttttgcatcaatgttcatcaaggatattggtctaaaattctctttttttgttgtgtctctgcccggctttggtatcagaatgatgctggcctcataaaatgagttacagaggattccctctttttctattgattggaatagtttcagaaggaatggtaccagttcctccttgtacctctggtagaattcggctgtgaatccatctggtcctggactctttttggttggtaaactattaattattgccacaatttcagctcctgttattggtctattcagagattcaacttcttcctggtttagtcttgggagagtgtatatgtcgaggaatttatccatttcttctagattttctagtttatttgcgtagaggtgtttgtagtattctctgatgttagttcgtatttctgagggatcggtggtgatatcccctttatcattttttattgcgtctatttgattcttctctctttttttctttattagtcttgctagcagtctatcaatcttgttgatcctttcaaaaaaccagctcctgggttcattaattttttgaagggttttttgtgtctctatttccttcagttctgctctgattttagttatttcttgctttctgctagcttttgaatgtgtttgctcttgcttttctagttcttttaattgtgatgttagggtgtcaattttggatctttcctgctttctcttgtgggcatttagtgctataaatttccctctacacactgctttgaatgcgtcccagagattctggtacattgtgtctttgttctcgttggtttcaaagaacatctttatttctgccttcatttcgttatgtatccagtagtcattcaggagcaggttgttcagtttccatgtagttgagcggttttgagtgagcttctgaatcctgagttctagtttgattgcactgtggtctgagagatagtttgttataatctctgttcttttacatttgctgaggagagctttacttccatgtatgtggtcaattttggaataggtgtggtgtggtgctgaaaaaaatgtatattctgttgatttggggtggagagttctgtagatgtctattaggtccacttggtgcagagctgagttcaattcctgggtatccttgttgactttctgtctcgtttatctgtctaatgttgacagtggggtgttaaagtctcccattattaatatgtgggaatctaagtctctttgcagttcacccaggacttgctttatgattctgggtgctcctgtgttgggtgcatatatatttaggatagttagctcttcttgttgaattgatccctttaccattatgtaatggccttctttgtctcttttgatctttgttggtttaaagtctcttttatcagagactaggattgcaacccctgcctttttttgttttccatttgcttggtagatcttcctccatccttttattttgagcctatgtgtgtctctgcacgtgagatgggtttcctgaatacggcacactgatgggtcttgactctttatccaatttgccagtctgtgtcttttaattggagcatttagtgcatttacatttaaagttaatattgttatgtgtgaatttgatcctgtcattatgatgttagctggttattttgcttgttagttgatgcagtttcttcctagtctcgatggtctttacattttggcatgattttgcagcggctggtaccggttgttcctttccatgtttagtgcttccttcaggagctcttttagggcaggcctggtggtgacaaaatctctcagcatttgcttgtctgtaaaggattttatttctccttcacttatgaagcttagtttggctggatatgaaattctgggttgaaaattcttttctttaagaatgttgaatattggcccccactctcttctgtcttgtagggtttctgccaagagattcgctgttagtctgaggggcttccctttgagggtaacctgacctttctctctggctgcccttaacgttttttccttcatttcaactttggtgaatctgacaattatgtgtcttggagttgctcttctcgaggagtatctttgtggcgttctctgtatttcctgaatctgaacgttggcctgccttgctagattggggaagttctcctggataatatcctgcagagtgttttccaacttggttccattctccccatcactttcaggtacaccaatgagatgtagatttggtcttttcacataatcccatacttcttggaggctttgctcatttcttcttatgcttttttctctaaacttcccttctcgcttcatttcattcatttcatcttccattgctgataccctttcttccagttgatcgcatcggctcctgaggcttctgcattcctcacgtagttcttgagctttggttttcagctccatcagctcctttaagcacttctctgtattggttattctagttatacattcttctaaatttttttcaaagttttcaacttctttgcctttggtttgaatgtcctcccgtagctcagagtaatttgatcatctgaagccttcttctctcagctcgtcaaagtcattctccatccagctttgttcccttgctggtgaggaactgcgttcctttggaggaggagaggtgctctgcgttttagagtttccagtttttctgttctgttttttccccatctttgtggttttatctacttttggtctttgatgatggtgatgtacagatgggtttttggtgtggatgtcctttctgtttgttagttttccttctaacagacaggaacctcagctgcaggtctgttggaataccctgccgtgtgaggtgtcagtgtgcccctgctggagggtgcctcccagttaggctgctcaggggtcaggggtcagggacccacttgaggaggcagtctgccggttctcagatctccagctgcatgctgggagaacaactgctctcttcaaactgtcagacagggacatttaagtctgcagaggttactgctgtctttttgtttgtctgtgccctgcccccagaggtggagcctacagaggcaggcaggcctacttgagctgtggtgggctccacccagttagagcttccaggctgctttgtttacctaagcaagcccgggcaatggcgggcgcccctccccaagcctcgctgccgccttgcagtttgatctcaaactgctgtgctagcaatcagcgagactccgtgggcataggaccctctgagccaggtgcggggtataatctcgtggtgcgccattttttaagccggtccgaaaagcgcaatattcaggtgggagtgacccgattttccaggtgagtccgtcacccctttctttgactcggaaagggaaccccctgaccccttatgcttcgcgagtgaggcaatgcctcgccctgcttcggctcgcgcacggtgcgtgcacccactgacctgtgcacactgtctggcactccctagtgagatgaacccggtacctcagatggaaatgcagaaatcacccgtcttctgcgtcgctcaccttgggagctgtagaccggagctgttctagaaatttctttaaaaactaaaaatattgctataaatttccctctacacactgcttttaatgcgtcccagagattctggtatgttgtgtcgttttcgttggtttcaaaggacatctttatttctgccttcattttgttatgtacccagtagtcattcaggagcaggttgttcagtttccatgtagttgagtggttttgagtgagattcttaatcctgagttctagtttgattgcactgtggtctgagagatagtttgttataatttctgttcttttacatttgctgaggagagctttacttccaactatgtagtcaattttggaatagatgtggtgtggtgctgaaaaaatgtatattctgttgatttggggtagagagttctgtagatgtctattaggtccgcttggtgcagagctgagttcaatttctgggtatccttgttgactttctgtctcgtttatctgtctaatgttgacagtggggtgttaaagtctcccattattaatatgtgggagtctaagtctctttgcagttcacccaggacttgctttatgaatctgggtgctcctgtgttgggtgcatatatatttaggatagttagctcttcttgttgaattgatccctttaccattatgtaatggccttctttgtctcttttgatctttgttggtttaaagtctcttttatcagagactaggattgcaacccctgccttttttttgttttccatttgcttggtagatcttcctccatccttttattttgagcctatgtgtgtctctgcacgtgagatgggtttcctgaatacggcacactgatgggtcttgactctttatccaatttgccagtctgtgtcttttaattggagcatttagtgcatttacatttaaagttaatattgttatgtgtgaatttgatcctgtcattatgatgttagctggttattttgctcgttagttgatgcagtttcttcctagtctcgatggtctttacattttggcatgattttgcagcggctggtaccggttgttcctttccatgtttagtgcttccttcaggagctcttttaggacaggtctggtggtgacaaaatctctcagcatttgcttgtctgtaaaggattttatttctccttcacgtatgaagcttagtttggctggatatgaaattctgggttgaaaattcttttctttaagaatgttgaatattggcccccactctcttctgtcttgtagagtttctgctgagagatctactgttagtctgaggggcttccctttgagggtaacctgacctttctctctggctacccttaacattttttccttcatttcaactttggtgaatctgacaattatgtgtcttggagttgctcttctcgaggagcacctttgtggcgttctctgtatttcctgaatctgaatgtttgcctgtcttgctagattggggaagttctcctggataatatcctgcagagtgttttccaacttggttccattctctccatcacattcaggtacaccgatcagacgtagatttggtcttttcacatagtcccacatttcttggaggctttgctcgtttctttttcttcttttttctctaaacttcccttcttgcttcatttcattcatttcatcttcgatcactgataccctttctaaatacccacaagagaaagcaggaaagatccaaaattgacaccctaacatcacaattaaaagaactagaaaagcaagagcagacacattcaaaagctagcagaaggcaagaaataacgaaaatcagagcagaactgaaggaaatagagacacaaaaaacccttcaaaaaattaatgaatccaggagctggttttttgaaaggatcaacaaaattgatagaccactagcaagactaataaagaaaaaaagacagaagaatcaaatagacgcaaaaaaaatgataaaggggatatcatcactgatcccacagaaatacgaactaccatcagagaatactacaaacacctctatgcaaataaactagaaaatctagaagaaatggataaattcctcgacacatacactctcccaagactaaaccaggaagaagttgaatctctgaatagaccaataacaggctctgaaattgtggcaataatcaatagcttaccaacaaaaaagagtccaggaccagatggattcacagccgaattctatcagagttacaaggaggaactggtaccattccttctgaaactatcccaatcaataaaaaaagagggaatcctccctaactcattttatgaggccagcatcatcctgatacaaaagccaggcagagacacaaccaagaaagagaattttagaccaatatccttgatgaacattgatgcaaaaatcctcaatataagaccggcaagcagaatccagcagcacatcaaaaagcttatccaccatgatcaagtgagcttcatccctgggatgcaaggctggttcaatatatgcaaatcaataaatgtattccagcatataaacagaaccaaagacaaaaaccacatgattatctcaatagatgcagaaaaggcctttgaaaaaattcaacaactcttcatgctaaaaactctcaataaattaggtattgatgggatgtatttcaaaataataagagctatctatgacaaacccacagccaatatcatactgaatgggcaaaaactggaagcgttccctttgaacactggcacaagagagggatgccctctctcaccactcctattcaacatagtgttggaagttctggccagggcaattaggcaggagaaggaaataaagggtattcaattaggaaaagaggaagtcaaattgtccctgtttgcagatgacatgattgtatatctagaaaaccccattgtctcagcccaaaatctccttaagctgataagcaacttcagcaaagtctcaggatacaaaatcaatgtacaaaaatcacaagcattcttatacaccaacaacagacaaacagagagccaaatcttgagtgaactcccattcacaattgcttcaaagagaataaaatacctaggaatccaacttacaagggatgtgaaggacctcttcaaggagaactacaaaccactgctcaaggaaataaaagaggatacaaacaaatggaagaacattccatgctcatgggtaggaagaatcagtatcatgaaaatggccatactgcccaaggtaatttatagattcaatgccatccccatcaagctaccaatgactttcttcacagaattggaaaaaactactttaaagctcatatggaaccaaaaaagagtccgcatcgcgaagtcaatcctaagccaaaagaacaaagctggaggcatcacactacctgtcttcaaactatgctacaaggctacagtaaccaaaacagcatggtactggtaccaaaacagagatatagatcaatggaacagaacagagccctcagaaataacgccgcatatctacaactatctgatctttgacaaacctgagaaaaacaagcaatggggaaaggattccctatttaataaatggtgctgggaaaactggctagccatatgtagaaagctgaaactggatcccttccttacaccttatacaaaaatcaattcaagatggattaaagacttaaacgttagacctaaaaccataaaaaccctagaagaaaacctaggcattaccattcaggacataggcatgggcacgggcttcatgtctaaaacaccaaaagcaatggcaacaaaagccagaattgacaaatgggatctaattaaactaaagagcttctgcacagcaaaagaaactaccatcagagtgaacagacaacctacaaaatgggagaaaattttcgcaacctactcatctgagaaagggctaatatccagaatctacaatgaactcaaacaaatttacaagaaaaaaacaaacaacaccatcaaaaagtgggcgaaggacatgaacagacacttctcaaaagaagacatttatgcagccaaaaaacacatgaaaaaacgctcatcatcactggccatcagagaaatgcaaatcaaaaccacaatgagataccatctcacaccagttagaatggcaatcattaaaaagtcaggaaacaacaggtgctggagaggacgtggagaaataggaacagttttacactgttggtgggaccgtaaactagttcaaccattgtggaagtcagtgtggtgattcctcagggatctagagctagaaataccatttgacccagccatcccattagtgggtatatacccaaaggactataaatcatgctgctataaagacacatgcacacgtatgtttattgcggcactattcacagtagcaaaaacttggaaccaacgcaaatgtccaacaatgatagactggattaagaaaatgtggcacatatacaccgtggaatactatgcagccataaaaaaggatgacttcatgtcctttgtagggacatggatgaaattggaaatcatcattctcagtaaactattgcaagaacaagaaaccaaacaccgcatattctcagtcatagatgggaattgaacaatgagaacacatggacacaggaaggggaacatcacactctggggactgttgtggggttgggggagggtggagggatagcattgggagagatacccaatgctagatgatgggttagtgggtgcagcgcaccagcatggcacatgtatatatatgtaactaacctacacattgtgcacatgtaccctaaaacttaaagtataataaaaaaaaagatattagaaaaaaa

SEQ ID NO: 10435 - DNA, 6054 bp, Homo sapiens
tttttttttttttaactcattttttttattatactttaagttttagggtacatgtgcacattgtgcaggttagttacatatgtatacatgtgccacgctggtgcgctgcacccactaactcgtcatctagcattaggtatatctcccaatgctatccctcccccctccccccaccccaccacagtccccagagtgtgatattccccttcctgtgtccatgtgatctcattgttcaattcccacctatgagtgagaatatgcggtgtttggttttttgttcttgcgatagtttactgagaatgatgatttccaatttcatccatgtccctacaaaggacatgaactcatcattttttatggctgcatagtattccatggtgtatatgtgccacattttcttaatccagtctatcattgttggacatttgggttggttccaagtctttgctattgtgaataatgtggcaataaacatacgtgtgcatgtgtctttatagcagcatgatttatagtcctttgggtatatacccagtaatgggatggctgggtcaaatggtatttctagttctagatccctgaggaatcgccacactgacttccacaatggttgaactagtttacagtcccaccaacagtgtaaaagtgttcctgtttctccacatcctctccagcacctgttgtttcctgactttttaatgattgccattctaactggtgtgagatagtatctcattgtggttttgatttgcatttctctgatggccagtgatgatgagcattttttcatgtgttttttggctgcataaatgtcttcttttgagaagtgtctgttcatgtccttcgcccactttttcatggggttgattgtttttttcttgtaaatttgtttgagttcattgtagattctggatattagccctttgtcagatgagtaggttgcaaaaattttctcccattttgtaggttgcctgttcactctgatggtagtttcttttgctgtgcagaagctctttcgtttaattagatcccatttgtcaattttggcttttgttgccattgcttttggtgttttagacatgaagtccttgcccatgcctatgtcctgaatggtaatgcctaggttttcttctagggtttttatggttttaggtctaacgtttaagtctttaatccatcttgaattgatttttgtataaggtgtaaggaagggacccagtttcagctttctacatatggctagccagttttcccagcaccatttattaaatagggaatcctttccccattgcttgtttttgtcaggtttgtcaaagatcagatagttgtagatatgcagcgttatttctgagggctctgttctgttccattgatctatatctctgttttggtaccagtaccatgctgttttggttactgtagccttgtagtatagtttgaagtcaggtagtgtgatggctccagctttgttcttttggcttaggattgccttggcaatgcgggctcttttttggttccatatgaactttaaagtagttttttccaatgctgtgaagaaagtcattggtagctttatggggatagcactgaatctgtaaattaccttgggcagtgtggccattttcacaatattgattcttcctacccatgagcatggaatgttcttccatttgtttgtatcctcttttatttccttgagcagtggtttgtagttctccttgaagaggtccttcacatcccttgtaagctggattcctaggtattttattctctttgaagcaattgtgaatgggagttcactcatgatttggctctctgtttgtctgttgttggtgtataagaacgcttgtgatttttgtacattgattttgtattctgagactttgctgaagttgcttatcagcttaaggagattttgggctgagacaatggggttttctagatatacaatcatgtcgtctgcaaacagggacaatttgacttcctcttttcctaattgaataccctttatttccttctcctgcctgattgccctggccagaacttccaacactatattgaataggagtggtaagagaaggcattcctgtcttgtgccagttttcaaagggaatgcttccagtttttgcccattcagtatgatattggctgtgggtttgtcatagatagctcttattattttgaaatacgtcccatcaatacctaatttattgagagtttttagcatgaagggttgttgaattttgtcaaaggctttttctgcatctattgagataatcatgtggtttttgtctttggctctgtttatatgctggattacatttattgatttgcatatattgaaccagccttgcatcccagggatgaagcccacttgatcatggtggataagctttttgatgtgctgctggattcggtttgccagtattttattgaggatttttgcatcaatgttcatcaaggatattggtctaaaattctcttttttggttgtgtctctgcctggctttggtatcagaatgatgctggcctcataaaatgagttagggaggattccctctttttctgttgattggaatagtttcagaaggaatggtaccagctcctccttgtacctctggtagaattcggctgtgaatccatctggtcctggactctttttggttggtaaactattgattattgccacaatttcagctcctgttattggtctattcagagattcaacttcttcctggtttagtcttgggagagtgtatgtgtcgaggaatttatccatttcttctagattttctagtttatttgcgtagaggtgtttgtagtattctcttatggtagtttgtatttctgtgggatcagtggtgatatcccctttatcattttttattgtgtctatttgattcttctctctttttttctttattagtcttgctagtggtctatcaattttgttgatcctttcaaaaaaccagctcctggattcattaattttttgaaggcttttttgtgtctctatttccttcagttctgctctgattttagttatttcttgccttctgctagcttttgaatgtgtttgctcttgcttttctagttcttttaattgtgatgttagggtgtcaattttggatctttcctgctttctcttgtgggcatttagtgctataaatttccctctacacactgctttgaatgcgtcccagagattctggtatgttgtgtctttgttctcgttgttttcaaagaacatctttatttctgccttcatttcgttatgtacccagtagtcattcaggagcaggttgttctgtttccatgtagttgagcagttttgagtgagattcttaatcctgagttctagtttgattgcactgtggtctgagagatagtttgttataatctctgttcttttacatttgctgaggagagctttacttccaagtatgtggtcaattttggaataggtgtggtgtggtgctgaaaaaaatgtatgttctgttgatttggggtggagagttctgtagatgtctattaggtccgcttggtgcagagctgagttcaattcctgggtatccttgttgactttctgtctcgttgatctgtctaatgttgacagtggagtgttaaagtctcccattattaatgtgtgggagtctaagtctctttgtaggtcactcaggacttgctttatgaatctgggtgctcctgtattgggtgcatatatatttaggatagttagctcttcttgttgaattcatccctttaccattatgtaatggccttctttgtctcttttgatctttgttggtttaaattctgttttatccaagactagtattgcaacccctgcctttttttgttttccatttgcttggtagatcttcctccatccttttattttgagcctatgtgtgtctctgcccgtgagatgtgtttcctgaatacagcacactgatgggtcttgactctttatccagtttgctagtctgtgtcttttaattggagcatttagtccatttacatttaaagttaatattgttatgtatgaatttgatcctgtcattatgatgttagctggtggttttgcttgttagttgatgcagtttcttcctagtctcgatggtctttacattttggcatgattttgcagcggctggtaccggttgttcctttccatgtttagtgcttccttcaggagctcttttagggcaggcctggtggtgacaaaatctctcagcatttgcttgtctgtaaagtattttatttctccttcacttatgaagcttagtttggctggatatgaaattctgggttgaaaattcttttctttaagaatgttgaatattggcccccactctcttctggcttgtagggtttctgccaagagatccgctgttagtctgatgggcttccctttgtgggtaacccgacctttctctctggctgcccttaacattttttccttcatttcaactttggtgaatctgacaattatgtgtcttggagttgctcttctcgaggagtatctttgtggcattctctgtatttcctgaatctgatcgttggcctgccttgctagattggggaagttctcctggataatatcctgcagagtgttttccaacttggttccattctccccatcactttcaggtacaccaatcagacgtagatttggtcttttcacatagtcccatatttcttggaggctttgctcatttctttttattcttttttctctaaacttcccttctcgcttcatttcattcatttcatcttccaccactaataccctttcttccagttgatcgcatcggctcctgaggcttctgcattcttcacgtggttctcgagccttggttttcagctccatgagctcctttaagcacttgtctctattggttattctagttatacattcttctaaatttttttcaaagttttcaacttctttgcctttggtttgaatgtcctcccgtagctcagagtaatttgatcgtctgaagccttcttctctcagctcgtcaaagtcattctccatccagctttgttccgttgctggtgaggaactgcgttcctttggaggaggagaggcgctctgcgttttagagtttccagtttttctgttctgtttttttcccatctttttggttttatctacttttggtctttgatgatggtgatgtacagatgggtttttggtgtggatgtcctttctgtttgttagttttccttctaacagataggaccctcagctgcaggtctgttggaataccctgccatgtgaggtgtcagtgtgcccctgctggggggtgcctcccagttaggctgctcaggggtcaggggtcagggacccacttgaggaggcagtctgcccgttctcagatctccagctgtgtgctgggagaaccactgctctcttcaaagctgtcagacagggacatttaagtctgcagaggttactgctgtctttttgtttgtctgtgccctgcccccattggtggagcctacagaggcaggcaggcctccttgagctgtggtgggctccacccagttcgagcttcccggctgctttgtttacctaagcaagcctgggcaatggcgggcgcccctcccccagcctcgctgccgccttgcagtttgatctcagactgctgtgctagcaatcagccagactccgtgggcgtaggaccctccgagccatgtgcgggatataatctcgtggtgcgcggttttttaagccggtcggaaaagcacaatattcgggtgggagtgacccgattttccaggtgcgtccatcacccctttctttgactcggaaagggaactccctgaccccttgcgcttcccaagtgaggcaatgcctcgccctgcttcagctcacgcacggtgcacgcacccactgacctgcgcccactgtctggcaatccctagtgagatgaacctggtacctcagatggaaatgcagaaatcacccgtcttctgcgtcgctcacgctgggagctgtataccggagctgttcctattcagccatcttggctcctccgatgaaaaatt

SEQ ID NO: 10436 - DNA, 6075 bp, Homo sapiens
tttttttttttcagtcattatttgtttgtacagctgtgtgaattttttttttttttattatactctaagttttagggtacatgtgcacattgtgcaggttagttacatatgtatacatgtgccatgctggtgcgctgcacccactaatgtgtcatctagcattaggtatatctcccaatgctatccctcccccctcccccgaccccaccacagtccccagagtgtgatattccccttcctgtgtccatgtgatctcattgttcaattcccacctatgagtgagaatatgcggtgtttggttttttgttcttgcgatagtttactgagaatgatggtttccaatttcatccatgtccctacaaaggatatgaactcatcattttttatggctgcatagtattccatggtgtatatgtgccacattttcttaatccagtctatcattgttggacatttgggttggttccaagtctttgctattgtgaatagtgccgcaataaacatacgtgtgcatgtgtctttatagcagcatgatttatagtcctttgggtatatacccagtaatgcgatggctgggtcaaatggcatttctagttctagatccctgaggaatcgccacactgacttccacaatggttgaactagtttacagtcccaccaacagtgtaaaagtgttcctatttctccacatcctctccagcacctgttgtttcctgactttttaatgattgcctttctaactggtgtgagatgatatctcatagtggttttgatttgcatttctctgatggccagtgatgatgagcatttcttcatgtgttttttggctgcataaatgtcttcttttgagaagtgtctgttcatgtccttcgcccactttttgatggggttgtttgtttttttgttgtaaatttgtttgagttcattgtagattctggatattagccctttgtcagatgagtaggttacgaaaattttctcccatgttgtaggttgcctgttcactctgatggtagtttcttttgctgtgcagaagctctttagtttaattagatcccatttgtcaattttggcttttgttgccattgcttttggtgttttggacatgaagtccttgcccacgcctatgtcctgaatggtaatgcctaggttttcttctagggtttttatggttttaggtctaacgtttaaatctttaatccatcttgaattgatttttgtataaggtgtaaggaagggatccagtttcagctttctacatatggctagccagttttcccagcaccatttattaaatagggaatcctttccccattgcttgtttttctcaggtttgtcaaagatcagatagttgtagatatgcggcattatttctgagggctctgttctgttccattgatctatatctctgttttggtaccagtaccatgctgttttggttactgtagccttgtagtatagtttgaagtcaggtagtgtgatgcctccagctttgttcttttggcttaggattgacttggcaatgcgggctcttttttggttccatatgaactttaaagtagttttttccaattctgtgaagaaagtcattggtagcttgatggggatggcattgaatctgtaaattaccttgggcagtatggccattttcacgatattgattcttcctacccatgagcatggaatgttcttccatttgtttgtgtcctcttttatttccttgagcagtggtttgtagttctccttgaagaggtccttcacatcccttgtaagttggattcctaggtattttattctctttgaagcaattgtgaatgggagttcacccatgatttggctctctgtttgtctgttgttggtgtataagaatgcttgtgatttttgtacattgattttgtatcctgagactttgctgaagttgcttatcagtttaaggagattttgggctgagacgatggggttttctagataaacaatcatgtcgtctgcaaacagggacaatttgacttcctcttttcctaattgaataccctttatttccttctcctgcctgattgccctggccagaacttccaacactatgttgaataggagtggtgagagagggcatccctgtcttgtgccagttttcaaagggaatgcttccagtttttgcccattcagtatgatattggctgtgggtttgtcatagatagctcttattattttgaaatacgtcccatcaatacctaatttattgagagtttttagcatgaagggttgttgaaatttgtcaaaggttttttctgcatctattgagataatcatgtggtttttgtctttggctctgtttatatgctggattacatttattgatttgcgtatattgaaccagccttgcatcccagggatgaagcccacttgatcatggtggataagctttttgatgtgctgctggattcggtttgccagtattttattgaggatttttgcatcaatgttcatcaaggatattggtctaaaattctcttttttggttgtgtctctgcccggctttggtatcagaatgatgctggcctcataaaatgagttagggaggattccctctttttctattgattggaatagtttcagaaggaatggtaccagttcctccttgtacctctggtagaattcggctgtgaatccatctggtcctggactctttttggttggtaaactattgattattgccacaatttcagagcctgttattggtctattcagagattcaacttcttcctggtttagtcttgggagagtgtatgtgtcgaggaatgtatccatttcttctagattttctagtttatttgcgtagaggtgtttgtagtattctctgatggtagtttgtatttctgtgggatcggtggtgatatcccctttatcattttttattgtgtctatttgattcttctctctttttttctttattagtcttgctagcggtctatcaattttgttgatcctttcaaaaaaccagctcctggattcattgattttttgaagggttttttgtgtctctatttccttgagttctgctctgattttagttatttcttgccttctgctagcttttgaatgtgtttgctcttgcttttctagttcttttaattgtgatgttagggtgtcaattttggatctttcctgctttctcttgtggtcatttagtgctataaatttccctctacacactgctttgaatgcgtcccagagattctggtatgtggtgtctttgttctcgttggtttcaaagaacatctttatttctgccttcatttcgttatgtacccagtagtcattcaggagcaggttgttcagtttccatgtagttgagcggctttgagtgagattcttaatcctgagttctagtttgattgcactgtggtctgagagatagtttgttataatttctgttcttttacatttgctgaggagagctttacttccaactatgtggtcaattttggaataggtgtggtgtggtgctgaaaaaaatgtatattctgttgatttggggtggagagttctgtagatgtctattaggtctgcttggtgcagagctgagttcaattcctgggtatccttgttgactttctgtcttgttgatctgtctaatgttgacagtggggtgttaaagtctcccattattaatgtgtgggagtctaagtctctttgtaggtcactgaagacttgctttatgaatctgggtgctcctgtattgggtgcataaatatttaggatagttagctcctcttgttgaattgatccctttaccattatgtaatggccttctttgtctcttttgatctttgttggtttaaagtctgttttatccgagactaggattgcaacccctgcctttttttgttttccattggcttggtagatcttcctccatccttttattttgagcctatgtgtgtctctgcacgtgagatgggtttcctgaatacagcacactgatgggtcttgactctttatccaacttgccagtctgtgtcttttaattgcagaatttagtccatttatatttaaagttaatattgttatgtgtgaatttgatcctgtcattatgatgttagctggtgattttgctcattagttgatgcagtttcttcctagtcttgatggtctttacagtttggcatgattttgcagcggctggtaccggttgttcctttccatgtttagcgcttccttcaggagctcttttagggcaggcctggtggtgacaaaatctctcagcatttgcttgtctataaagtattttatttctccttcacttatgaagcttagtttggctggatatgaaattctgggttgaaaattcttttctttaagaacgttgaatattggcccccactctcttctggcttgtagggtttctgccgagagatccgctgttagtctgatgggctttcctttgagggtaacccgacctttctctctggctgcccttaacattttttccttcatttcaactttggtgaatctgacaattatgtgtcttggagttgctcttctcgaggagtatctttgtggcgttctctgtatttcctgaatctgaacgttggcctgccttgctagattggggaagttctccttgataatatcctgcagagtgttttccaacttggttccattctccccatcactttcaggtacaccaatcagatgtagatttggtcttttcacatagtcccatatttcttggaggctttgctcatttctttttattcttttttctctaaacttcccttctcacttcatttcattcatttcatcttccattgctgataccctttcttccagttgatcgcatcggctcctgaggcttctgcattcttcacgtagttctcgagccttggttttcagctccatcagctcctttaagcacttctctgtattggttattctagttatacattcttctaaatttttttcaaagttttcaacttctttgcctttggtttgaatgtcctcccgtagctcagagtaatttgatcgtctgaagccttctctcagctcgtcaaaatcattctccatccagctttgttctgttgctggtgaggaactgctttcctttggaggaggagaggcgctctgcgttttagagtttccagtttttctgttctgtttttttccccatctttgtggttttatctacttttggtctttgatgatggtgatgtacagatgggttttcggtgtagatgtcctttctggttgttagttttccttctaacagacaggaccctcagctgcaggtctgttggaataccctgccgtgtgaggtgtcagtgtgcccctgctggggggtgcctcccagttaggctgctcgggggtcaggggtcagggacccacttgaggaggcagtctgccggttctcagatctccagctgcgtgctgggagaaccactgctctcttcaaagctgtcagacagggacacttaagtctgcagaggttactgctgtctttttgtttgtctgtgccctgcccccagaggtggagcctacagaggcaggcaggcctccttgagctgtggtgggctccacccagttcgagcttcccggctgctttgtttacctaagcaagcctgggcaatggcgggtgcccctcccccagcctcgttgccgccttgcagtttgatctcagactgctgtgctagcaatcagcgagattccgtgggcgtaggaccctctgagccaggtgtgggatatagtctcgtggtgcgccgtttcttaagccggtctgaaaagcgcaatattcgggtgggagtgacccgattttccaggtgcgtcagtcacccctttctttgactcagaaagggaactccctgaccccttgcgcttcccaggtgaggcaatgcctcgccctgcttaggctcgcgcacggtgcgcacacacactggcctgcgcccactgtctggcactccctagtgagatgaacccggtacctcagatggaaatgcagaaatcacctgtcttctgcgtcgctcacgctgggagctgtagtccggagctgttcctattcggccatcttggctcctcctccta

SEQ ID NO: 10437 - DNA, 10367 bp, Homo sapiens
cccagtacttctttttttttttttttttttttgagatggtgtctcgctctgtcacccaggctggagtgcagtggtgcgatctcggctcactgcaagctccacctcccaggttcacaccattctcctgcctcagcctcccgagtagctgggactacaggcgcccgccaccacgcccagctatttttttgtattttttagtaaagacggggtttcaccgtgttagccaggatggtctcgatctcctgacctcgtgatctgcccacctcggcctcccaaagtgctgggacccagtacttctttaagagagcactgaccttatattgctcccagtacctcgttagggcactgaccttatatctgctgccagtggactcatcccagtgtccccattcgtcttgtcaatttcagcttctctgcttcagcagaccttcttcgttcatgtcctcagagtccctgttctggggtgccactttgatgcgtgaatggaccttggtggactgaacaaagggggacgaatgcgagaataaagataaagacaaaaaagcatatttggaagacatggtcgggggctccttgcttctagtgaacaagggccctgagctttagagccctttgtatttattgggtaaaggagatagggagaagggtggggggtggttggtggtcagcagcttgatttacagcaggcttgcaagactgcattatttgaacagtaggctctggatgtcccagtagataacctcaaggcatacagtgccggggagtgattgccctcagcaaaccttctggtggctggagcagaagcaagtttgctcacattctgcattcatgataaacagtttgctgtttgatcatatagcctcagtggaatgctgagttggtcacgacccacgggcattcagctctctatgaaaaggagcctggcatctctcttgctccctcctgccatcggatatgccagctccccctttgccttctgacaggctttctaagcttcctgaggcttcaccggaaacagaacagatgctagtgctgtgcttgtacagcctgcagaaccatgagccaaatcaatctcgtttctttataaattactctgcttcacagctgggcatggtggctcacatctgtaatcccagcactttgggaggccgaggtaggtggattactgaggtcaagagttcgagaccagcctgaccaacatggtgtaaccccatctctaataaaaatacaaaaattagccaggcatggtagggcatgcctgtaatcccagctacccaggaggctgaggcatgagaattgcttgaacccaggaagcagaggttgcagtgggccaagatcgtgccactgcattccagcctaggcaacagagccagaccctgtctcaaaaaaataaaaataaaaaattacccagcttcaggtattcttttatagcaatgcaaaacagactaacacactgtctttttttctcagctgtaaagtgagaataatcattgtgaaatgagatattaaaattctttggaatcatgcctcctcagcagctttacaaggctaccatgtggagttgttcagtgggtatagagtttcagttttgcaacatgaaaaagttcttgagactggctgcacaacagtgtggatatacttaacgttactgaattgtactcttagaaatcgttaggatgaagctgggcacggtggcttatgcctgtaatcccagtactttgggaggcagaggagggtggatcatctgaggtcaggagtttgagaccagcctggtcaacatggtgaaatcccgtctctactaaaaatacaaaaaattacttgggcatggtggtgggtgcctgtaatcccagctactcaggaggctgaggcaggagaatcgcttgaacccaggaggcggaggttgcagtgagccgagattgcaccattgcacgccagcctaggtgacagagcaagactccatctcaaagaaaaaagaaatggttaggctggtacattttatgctatgcattgtttctcagaataacaaaatttttaaggaaatgaccaccacgtgagatacctaaaaagctgtcccaggagagggatgatatttattctgtgagctctgagaggggagacaggagccagttagcaaccactgagtactccagccggcccacaaagccccagcatggatgctgcacctgagtgaggctggccttggagacctctgggccccttccagctcagaggtctgaaggatttgagctgagtcaggtcagcagatgctagaactttccattcacagactgtccagttttgctatatttgaggaacagaaacaggtcagaaagcagggcatgctctcatactactaggaaaacataatgtgatgcaacctttattattatcatttatagtattatttttaaattttgttatttatttattattttatttatttttttttgagatggattttccctcttgttgccccagctggagtgcacttgcacaatctcggctcactgcaacctctgcctcccagtttcaaatgattctcctgcctcagcctcctgagtagctgggactacaggcgtgtaccaccatgcccagctaatttttgtatttttagtagagaccgggtttctgcatgttggccaggctggtctcaaactcctgacctcaggtgatccgcccgcctcagcctcccaaagtgctgggattacaagtgtgagccaccgtgcccaatctttttatttattttattgagataaggtcttgctgtgttactcaggctggtcttgaactcctggccttccagagtgccaagattacaggtgtgagccaaggtgcccagaaggcacaacctttctggcaggcattcacaactaagaacttaatccaagagcacaattggccaagcgtgtgacgttagagaagagcactgttgttgtgaacttcaaccaatgaagatggcctgagaaaaacctgtgacagcttggcagaattcagaaggatgagacatcactccaactgagccacgaaaatatggtctggaggcagggaacataagcccaattcacacttcagctatgacagaaaatatcctctccatttacatagggcgtacaccgagtaaatgactttgtaactttacttcattctcttcttttacatagggtgtacactgagtaaatgaccttgtaactttacttcatcctctttatttacatatggcgtacaccaagtaaatgactttgtagctctacttcatcctcttcatttatgtaggacatataccaaggaactgatggaaacttctagagggtatttaaaccccaaaacattctgtaatggggcccttgagcccctatgctcagcctgctaccacactgtggagtatactttcattttcaataattttcttcatttctttccttgctttgtgcgttttgtccaattttttgttcaagacaccaagaacctggacaccctccaccggtgacacaaccatcaggcaataggggtacacctgggaaggacaagggacagttagtgcagtgaggaatgggaggcagggccgagtctctctgagctgggaggctgctccttctggcctctccaaagcctcactgcttccatttcccgaggcagataaggactgcctcagcctgggacaaaacgacctctctgtgtccacagccacccacaattggcataatgttccagtctcacttcccaggagcctctgaagggcccagcttgggtcagatggccattcctgggccagtcagctatggccaggggatggggtcacatggcacccacatgaagcaaggcctatcccttaagtaggggctgttgagtgacaggaaccgtggaggtgttgacagccgctcctcaaagtatggtcctagactgagcagcagcacttacatcactcggcagcttcttagcaatacagaatctcaggccccaccccacacctaaggaatcagaatctgcttatttatttatttattttgatgataggtgcatgccaccacacttggctaatttttgtatttttagtggagtcagggtttctccatgttggccaagctgatctcaaactcctgacctcaagtgatccacccgcctcagcctgccaaagtgctggaattacaggcgtgagccaccgcacccagcctgtagcccacatattgatcctgtctgttctttttttctttttattattattattattattatactttaagttttagggtacatgtgcacaatgtgcaggttagttacatatgtatacatgtgccatgctggtgtgctgcacccattaactcatcatttagcatcaggtatatctcctaatgctatccctcccccctcccccaccccacaacagtccccagagtgtgatgttccccttcctgtgtccatgtgttctcattgttcaattcccatctatgagtgagaacatgcggtgtttggttttttgtccttgcgatagtttactgagaatgatgatttccaatttcatccatgtccctacaaaggacatgaactcatcattttttatggctgcatagtattccatggtgtatatgtgccacattttcttaatccagtctatcattgttggacatttgggttggttccaagtctttgctattgtgaatagtgccacaataaacatacttgtgcatgtgtctttatagcagcatgatttatagtcctttgcgtatatacccagtaatgggatggctgggtcaaatggtatttctagttctagatccctgaggaatcgccacactgacttccacaatgcttgaactagtttacagtcccatcaacagtgtaaacatgttcctgtttctccacatcctctccagcacctgttgtttcctgactttttaatgattgacattttaactggtgtgagatggtatctcgttgtggttttgatttgcatttctctgatggccagtgatgatgagcattttttcatgtgtctgttggctgcataaatgtcttcttttgagaagtgtctgttcatatcctttgcccactttttgatgggattgtttgtttttttcttgtaaatttgtttgagttcattgtagattctggatattagtcttttgtcagatgagtaggttgcgaaaattttctcccattttgtaggttgcctgttcactctgatggtagtttcttttgctgtgcagaagctctttagtttaattagatcccatttgtcaattttggcttttgttgccattgcttttggtgttttagacatgaagtccttgcccatgcctatgtcctgaatggtaatgcctaggttttcttctagggtttttatggttttaggtctaatgtttaagtctttaacccatcatgaattaatttttgtataaggtgtaaggaagggatccagtttcagctttctacatatggctagccagttttcccagcaccatttattaaataggaaatcctttccccattgcttgtttttctcaggtttgtcaaagatcagatagttgtagatctgtggcattatttctgagagctttgtcctgttccattgatctatatctctgttttggtaccagtaccatgctgttttggttactgtagccttgtagtatagtttgaagtcaggtagcgtgatgcctccagctttgttcttttggcttaggattgacttggcaatgcgggctcttttttggttccatatgaattttaaagtagttttttccaattctgtgaagaaagtcattggtagcttgatggggatggcattgaatctataaattaccttgggcagtatggccattttcacaatattgattcttcctatccatgagcatggaatgttcttccatttgtttgtatcctcttttatttcattgagcagtggtttgtagttctctttgaagaggtccttcacatcccttgtaagttggattcctaagtattttattctctttgaagcaattgtgaatgggagttcactcatgatttggctctctgtttgtctgttactggtgtataacaatgcttgtgatttttgtacattgattttgtatcttgagactttgctgaacttgcttatcagcttaaggagattttgggctgagacaatggggttttctagatatacaatcatgtcgtctgcaaacagggacaatttgacttcctcttttcctaattgaataccctttatttccttctcctgcctaattgccttggccagaacttccaacactatgttgaataggagtggtgagagagggcatccctgtcttttgccagttttcaaggggaatgcttccagtttttgcccattcagtatgatattggctgtgggtttgtcatagatagctcttattattttgagatatgtcccatcaatacctaatttattgagagtttttagcatgaagggttgttgaattttgtcaaaggccttttctgcatctattgagataatcatgtggtttttgtctttagttctgtttatctgctggattacatttattgatttgcatatattgaaccagccttgcatcccagggatgaagcccacttgatcatggtggataagctttttgatgtgctgctggatttggtttgccagtattttattgaggatttttgcatcaatgttcatcaaggatattggtctaaaattctcttttttggttgtgtctctgcccggctttggtatcaggatgatgctggcctcacaaaatgagttagggaggattccctctttttctattgattggaatagtttcagaaggaatggtattagttcctccttgtacctctggtagaattcggctgtgaatccatctggtcctggactctttttggttggtaagctattgattattgccacaatttcagctcctgttattggtctattcagagattcaacttcttcctggtttagtcttgggagagtgtatgtgtcgaggaatgtatccatttcttctagattttctagtttatttgcgtagaggtgtttgtagtattctctgatggtagtttgtatttctgtgggatcggtggtgatatcccctttatcattttttattgcgtctatttgattcttctctctttttttctttattagtcttgctagcggtctatcaattttgttgatcctttcaaaaaaccagctcctggattcattaattttttgaagggtttttgtgtctctatttccttcagttctgctctgattttagttatttcttgccttctgctagcttttgaatgtgtttgctcttgcttttctagttcttttaattgtgatgttagggtgtcaattttggatctttcttgctttctctcgtgggcatttagtgctataaatttccctctacacactgctttgaatgtgtcccagagattctggtatgttgtgtctttgttcttgttggtttcaaagaacatttttatttctgccttcatttcgttatgtactcagtagtcattcaggagcaggttgttcagtttccatgtagttgagcggttttgagtgagtttcttaatcctgaattctagtttgattgcactgtggtctgagagacagtttgttataatttctgttcttttacatttgctgaggggagctttacttccaactatatggtcaattttggaataggtgtggcgtggtgctgaaaaaaatgtatattctgttgatttggggtggagagttctgtagatgtctattaggtccgcttggtgcagagctgagttcaattcctgggtatccttgttaactttctgtcttgttgatctgtctaatgttgacagtgggtgttaaagtctcccattattattgcttgggagtctaagtctctttgtaggtcactcaggacttgctttatgaatctgggtgctcctgtattgggtgcatatatatttaggatagttagctcttcttgttgaattgatccctttaccattatgtaatggccttctttgtctcttttgatctttgttggtttaaagtctgttttatcagagactaggattgcaacccctgcctttttttgttttccatttgtttggtagatctttctccatccttttattttgaccctatatgtgtctctgcacatgagatgggtttcctgaatacagcacactgatgggtcttgactctttatcaaacttgccagtctgtgtcttttaattggagcatttagtccatttacatttaaagttaatattgttatgtgtgaatttgatcctgtcattatgatgttagctggttattttgctcgttagttgatgcagtttcttcctagtctcgatggtctttacattttggcatgattttgcagtggctggtacaagtttttcctttccatgtttagtgcttccttcgggagctcttttagggcaggcctggtggtgatgaaatctctcagcatttgcttgtctgtaaaggattttatttctccttcgcttatgaagcttagtttggctggatatgaaattctgggttgaaaattcttttctttaagaatgttgaatattggcccccactctcttctggcttgtagagtttctgccaagagatccgctgttagtctgatgggcttccctttgtgggtaacccgacctttctctctggctgcccttaacattttttccttcatttcaactttggtgaatctgacaattatgtgtcttggagttgctcttctcgaggagtatctttgtggtgttctctgtatttcctgaatctgaatgttggcctgccttgctagattggggaagttctcctggataatatcctgcagagtgttttccaacttggttccattctccctgtcaatttcaggtacaccaatcagacgcagatttggtcttttcacatagtcccatatttcttggaggctttgttcatttctttttattcttttttctctaaacttcccttctcgcttcgtttcattcatttcatcttccatcactgataccctttcttccagttgatcacatcggctcctgaggcttctgcattcttcacgtagttctcaagccttggctttcagctccatcagctcctttaagcacttctctttattggttattctagttatacattcgtccaaaattttttcaaagttttcaacttctttgcctttggtttgaatttcctcctgtagctcggagtagtttgatcatctgaagccttcttctctcaactcgtcaaagtcattctccatccagctttgttctgttgctggtgaggaactgcgttcctttggaggaggagaggtgctctgctttttagagtttccagtttttctgctctgttttttccccatctttgtggttttatctacttttggtctttgatgatggtgatgtacagatgggtttttggtatggatgtcctttctgtttgttagttttccttctaacagacaggaccctcagctgcaggtctgttggagtttgctagaggtccactccagaccctgtttgcctgggtatcagcagcggtgtctgcagaaccgtggattttcgtgatccgtgaatgctgttgtctgatcgttcctctggaagttttgtctcagaggagtacccggccgtgtgaggtgtcagtctgcccctactggggggtgcctcccagttaggctgcttgggggtcaggggtcagggacccacttgaggaggcagtctgccccttctcagatctccagctgcgtgctgggagaaccactgctctcctcaaagctgtcagacagggacatttaagtctgcagaggttactgctgtctttttgtctgtgccctgcccccagaggtggagcctaccgaggcaggcaggcctccttgagctgtggtgggctccacccagttcgagcttcctggctgctttgtttacctaagtaagcctgggcaatggcgggcacccctcccccagcctccctgctgccttgcagtttgatctcggactgctgtgctagcaatcagcgagactccttgggcataggaccctccgagccaggtgcggggtacaatctcctggtgcgccgtttcctaagcccgtcggaaaagcgcaatattcgggtgggagtggcccgattttccaggcgctgtctgtcacccctttccttgaccaggaaagggaactccctgaccccttgtgcttcctgagtgaggcaatgcctcaccctgcttcggctggcgcatggtgcactacacccactgtcctgcgcccactgtctggcactccctagtgagatgaacccagtatctcagatggaaatgcagaaatcactcgtcttctgcggtgctcatgctgggagctgtagaccggagctgttcctattcggccatcttggctcctcc

SEQ ID NO: 10438 - DNA, 6071 bp, Homo sapiens
caaaatatactttttatttttatttttttattttttttaattttattattatactttaagttttagggtacatgtgcacaatgtgcaggttagttacatatgtatacatgtgccatgctggtgtgctgcacccactaactcgtcatctagcattaggtatatctaccaatgctatccctcccccctccccccaccccacaacagtccccagagtgtgatgttccccttcctgtgtccatgtgttctcattgttcaattcccacctatgagtgagaatacgcggtgtttggttttttgttcttgcgatagtttactgagaatgatgatttccaatttcctccatgtccctacaaaggacacgaactcatcattttttatggtggcatagtattccatggtgtatatgtgccacattttgttaattcagtctatcattgttggacattttggttggttccaagtctttgctattgtgaataatgccgcaataaacatacgtgtgcatgtgtctttatagcagcatgatttatagtcctttgggtatatacccagtaatgggatggctgggtcaaatggtatttctagttctagatccctgaggaatcgccacactgacttccacaatggttgaactagtttacagtcccaccaacagtgtaaaagtgttcctatttctccacatcctctccagcacctgttgtttcctgactttttaatgatcgccattctaactggtgtgagatggtatctcattgtggttttgatttgcatttctctgatggccagtgatgatgagcattttttcatgtgttttttggctgcataaatgtcttcttttgagaagtgtctgttcatgtccttcgcccactttttgatggggttgtttgtttttttcttgtaaatttgtttgagttcattgtagattctggatattagccctttgtcagatgagtaggttgtgaaaattttctcccattttgtaggttgcctgttcactctgatggtagtttcttttgctgtacagaagctcttaagtttaattagatcccatttgtcaattttgtcttttgttgccattgcttttggtgttttagacatgaagtccttgcccatgcctatgtcctgaatggtattgcctaggttttcttctagggtttttatggttttaggtctaacgtttaagtctttaatccatcttgaattgatttttgtataaggtgtaaggaagggatccagtttcagctttctacatatggccagccagttttcccagcaccatttattaaatagggaatcctttccccattgcttgtttttctcaggtttgtcaaagatcagatagttgtagatatgcggcgttatttctgagggctctgttctgttccactgatctatatctctcttttggtaccagtaccatgctgttttggttactgtagccttgtagtatggtttgaagtcaggtagcgtgatgcctccagctttgttcttttggctcaggattgacttggcgatgcgggctcttttttggttccatatgaactttaaagtagttttttccaattctgtgaagaaaggcattggtagcttgatggggatggcattgaatctgtaaattaccttgggcagtatggccattttcacgatattgattcttcctacccatgagcatggaatgttcttgcatttgtttgtatcctcttttatttccttgagcagtggtttgtagttctccttgaagaggtccttcacatcccttgtaagttggattcctaggtattttattctctttgaagcaattgtgaatgggagttcactcatgatttggctctctgtttgtctgttgttggtgtataagaatgcttgtgatttttgtacattgattttgtatcctgagactttgctgaagttgcttatcagcttaaggagattttgggctgagacaatggggttttctagatatacaatcatgtcgtctgcaaacagggaaaatttgacttcctcttttcctaattgaataccctttatttccttctcctgcctaattgccctggccagaacttccaacactatgttgaataggagtggtgagagaggtcatccctgtcttgtgccagttttcaaagggaatgcttccagtttttgcccattcagtatgatattggctgtgggtttgtcatagatagctcttaatattttgagatacatcccatcaatacctaatttattgagagtttttagcatgaagggttgttgaattttgtcaaaggccttttctgcatctattgagataatcatgtggtttttgtctttggctctgtttatatgctggattacatttattgatttgcatatattgaaccagccttgcattccagggatgaagcccacttgatcatggtggataagctttttgatgtgctgctggattcattttgccagtattttattgaggatttttgcatcaatgttcatcaaggatattggtctaaaattctcttttttggttatgtctctgccaggctttggtatcagaatgatgctggcctcataaaatgagttacggaggattccctctttttctattgattggaatagtttcagaaggaatggtaccagttcctccttgtacctctggtagaattcggctgtgaatccatctggtcctggactctttttggttggtaagctattgattattgccacaatttcagatcctgttattggtctattcagagattcaacttcttcctggtttagtcttgggagagtgtatgtgtcaaggaatttatccatttcttctagattttctagtttatttgcgtagaggtgtttgtagtattctctgatggtagtttgtatttctgtgggattggtggtgatatcccctttatcattttttattgtatctatttgattcttctctctttttttctttattagtcttgctagcggtctatctattttgttgatcctttcaaaaaaccagctcctggattcattaattttttgaagggttttttgtgtctctatttccttcagttctgctctgattttagttatttcttgccttctgctagcttttgaatgtgtttgctcttgcttttctagttcttttaattgtgatgttagggtgtcaattttggatctttcctgctttctcttgtgggcatttagtgctataaatttccctctacacactgctttgaatgcgtcccagagattctggtatgttgtgtctttgttctcgttggtttcaaagaacatctttatttctgccttcatttcgttaggtacccagtagtcattcaggagcaggttgttcagtttccatgtagttgagcggttttgagtgagattcttaatcctgagttctagtttgattgcactgccgtctgagagatagtttgttataatttctgttcttttacatttgctgaggagagctttacttccaagtatgtggtcaattttggaataggtgtggtgtggtgctgaaaaaaatgtatattctgttgatttggggtggagagttctgtagatgtctattaggtctgcttggtgcagagctgagttcaattcctgggtatcctttttgactttctgtctcattgatctgtctaatgttgacagtggggtgttaaagtctcccattattaatgtgtgggagtctaagtctctttgtaggtcactcaggacttgctttatgaatctgggtgctcctgtattgggtgcatatatatttaggatagttagctcttcttgttgaattgatccctttaccattatgtaatggccttctttgtctctcttgatctttgttggtttaaagtctgttttatcagagactaggattgcaacccctgcctttttttgttttccatttgcttggtagatcttcctccatccttttattttgagcctatgtgtgtctctgcacatgagatgggcttcctgaatacagcacactgatgggtcttgactctttatccaatttgccagtctgtgtcttttaattggagcatttagtccatttacatttaaagttaatattgttatgtgtgaatttgatcctgtcatgatgatgttagctggtgattttgctcgttagttgatgcagtttcttcctagtctcgatggtctttacattttggcatgattttgcagcggctggtactggttgttcctttccatgtttagcgcttccttcaggagctcttttagggcaggcctggtggtgacaaaatctctcagcgtttgcttgtctgtaaagtattttatttctccttcacttatgaagcttagtttggctggatatgaaattctgggttgaaaattcttttctttaagaatgttgaatattggcccccactctcttctgtcttgtagggtttctgccgagagatctgctgttagtctgatgggcttccctttgagggtaacccgacctttctctctggctgcccttaacattttttccttcatttcaactttggtgaatctgacaattatgtgtcttggagttgctcttctcgaggagtatctttgtggcattctctgtatttcctgaatctgaacgttggcctgccttgctagattggggaagttctcctggataacatcctgcagagtgttttccaacttggttccgttctccccgtcactttcaggtacaccagtcagacgtagatttggtcttttcacatagtcccatatttcttggaggctttgctcatttctttttattcttttttctctaaacttcccttcttgcttcatttcattcatttcatcttccattgctgataccctttcttcgagttgatcgcatcggctcctgaggcttgtacattcgtcacgtagttctcgagccttggttttcagctccatcagctcctttaagcacttgtctgtattggttattctagttatacattcttctaaatttttttcaaagttttcaacatctttgcctttggtttgaatgtcctcccgtagctcagagtaatttgatcgtctgaagccttcttctctcagcttgtcaaagtcgttctccatccagctttgttccgttgctggtgaggaactgcgttcctttggaggaggagaggcgctctgctttttagagtttccagtttttctgttctgttttttccccatctttgtggttttatctacttttggtctttgatgatggtgacgtacagatgggtttttggtgtggatgtcctttctgtttgttagttttccttctaacagacaggaccctcagctgcaggtctgttggagtaccctgccgtgtgaagtgtcagtgtgcccctgctggggggtgcctcccagttaggctgcttgggggtcaggggtcagggacccacttgaggaggcagtctccccgttctcagatctccagctgcgtgctgggagaaccactgctctcttcaaagctgtcagacagggacatttaagtttgcagaggttactgctgtctttttgtttgtctgtgccctgcccccagaggtggagcctacagaggcaggcaggcctccttgagctgtggtgggctccacccagttcgagcgtcctggctgctttgtttacctaagcaagcttgggcaatggcgggtgcccctcccccagcctcgctgccgccttgcagtttgatctcagactgctgtgctagcaatcagggagactccatgggcgtaggaccctctgagccaggtgcgggatataatctcgtggtgcaccgttttttaagccggttggaaaagcgcagtattcgggtgggagtgacccgattttccaggtgcgtccatcacccctttctttgactaggaaagggaactccctgaccccttgcgcttcccaagtgaggcaatgcctcaccctgcttcggctcgcacacggtgcgcgcacccactgacctgcgcccactgtctggcacttcctagtgagatgaacccggtacctcagatggaaatgcagacatcacccgtcttctgcgttgctcacgctgggagctgtagaccggagctgttcctattcggccatcttggctcctccctcgaaaa

SEQ ID NO: 10439 - DNA, 5722 bp, Homo sapiens
atgtgaaaattctttttttttaattatactttaacttttagggtacatgtgcacaatgtgcaggttggttacatatgtatacatgtgccatgttggtgtgctgcacccattaactcatcatttaacattaggaatatctcctaatgctatccctcccgcctccccccaccccacaacaggccccggcgtgtgatgttccccttcctgtgtccatgtgttctcattgttcaattcccacctatgagtgagaacatgcagtgtttggttttttgtctttgcgatagtttgctgagaatgatggtttccagcttcatccatgtccctacaaaggacgtgaactcatcattttttatggctgcatagtattccatgctatatatgtgccacattttcttaatccagtctatcattgttggacatttgggttggttccaagtctttgctattgtgaatagtgccacaataaacatacgtgtgtacgtgtctttatagcagcatgatttatagtcctttgggtatatacccagtaatgggatggctgggtcaaatggtatttctagttccagatccctgaggaattgccacactgacttccacaatggttaaactagtttacagtcccaccaacagtgtaaaagtgttcctatttctccacatcctctccagcacctgttgtttcctgactttttagtgattgccattctaactggtgtgagatggtatctcattgtggttttgatttgcatttctctgatggccagtgatgatgagcattttttcatgtgccttttggctgcataaatgtcttcttttgagaagtgtctgttcatatccttcgcccacttgttgatggggttgtttttttcttgtaaatttgtttgagttcattgtagattctggatattagccctttgtcagatgagtagattgcaaaaattttctccgatgctgtaggttgcctgttcactctgatgggagtttcttttgctgtgcagaagctctttagtttaattagatcccatttgtcaattttggcttttgttgccattgcttttggtgttttagacatgaagtccttgcccatgcctatgtcctgaatggtattgcctaggttttcttctggggtttttatggttttaggtctaatggttaagtctttaatccatcttgaattaatttttgtataaggtataaggaagggatccattttcagctttctacatatggctagccagttttcccaacaccatttattaaatagggaatcctttccccatttcttctttttgtcaggtttgtcaaagatcagatagttgtagatatgcgacattatttctgagggctctgttctgttccattggtctatatctctgttttggtaccaataccatgctgttttggttactgtagccttgtagtatagtttgaagtcaggtagcgtgatgcctccagctttgttcttttggcttaggattgacttggcaatgagggctcttttttggttccatatgaactttaaagtagttttatccaattctgtgaagaaagtcattggtagcttgatggggatggcattgaatctataaattaccttgggcagtatggccattttcacgatattgattcttcctacccatgagcatggaatgttcttccatttgtttgtatcctcttttatttcgttgagcagtggtttgtagttctccttgaagaggtccttcacatcccttgtaaattggattcctagatattttattctctttgaagcaattgtgaatgggagttcactcatgatttggctttctgtttgtctgttgttggtgtataagaatgcttctgatttttgcacattgattttgtatcctgagactttgctgaagttgcttatcagcttaaggagattttgggctgagacgatggggttttctagatatacaatcatgtcatctgcaaacagggacaatttggcttcctcttttcctaattgaataccctttatttccttcccctgcctgattgccctggccagaacttccaacactatgttgaataggagtggtgagagagggcatccctgtcttgtgccagttttcaaagggaatgcttccagtttttgcccattcagtatgatattggctgtgggtttgtcatagatagcttattattttgagacacatcccatcaatacctaatttattgagagtttttagcatgaaggttgttgaattttgtcaaaggctttttctgcatctattgagataatcatgtggtttttgtcattggttctgtttatatgctggattacatttattgatttgcatatgttgaaccagccttgcatcccagggatgaagcccacttgatcatgatggataagctttttgatgtgctgctggattcagtttgccagtattttattgaggatttttgcatcaatgtttatcacggatattggtctaaaattctctttttttgttgtgtctctgcccggctttggtatcaggatgatgctggcctcataaaatgagttagggaggatttcctctttttctattgattggagtagcttcagaaggaatggtaccagctcctccttgtacctctggtagaattcgactatgagtccgtctggtcctggacttgttttggttggtaagctattaattattacttcaatttcagagcctgttattggtctattcagagattcaacttcttcctggtttagtcttgggagggtgtgtgtgtctaggaatttatccatttcttctagattttctaatttatttacatagaggtgtttgtagtattctctgatggtagtttgtatttctgtgggatcggtggtgatatcccctttaacattttttattgcatctatttgattcttctctcttttcttctttattagtcttgctagcggtctatcaattttgttgatcttttcaaaaaaccagctcctggattcattgattttttgaagggttttttgtgtctctatttccttcagttctgctctgatcttagttatttcttgccttctgctagcttttgaatgtgcttgctcttgcttctctagttcttttaattgtgatgttagggtgtcaattttagatctttcctactttctcttgtgggcatttagtgctataaatttccctctacacactgctttgaatgtgtcccagagattctggtatgtggtgtctttgttctcattggtttcaaagaacatctttatttctgccttcatttcgttatgtacccagtagtcattcaggagcaggttgttcagtttccatgtagttgagcggttttgagtgagtttctgaatcctgagttctagtttgattgcactgtggtctgagagacagtttgttataatttctgttcttttacatttgctgaggagtgctttacttccaagtatgtggtcaattttggaataggtgtggtgtggtgctgaaaagaatgtgtattctgttgatttggggtggagagttctgtagatgtctattaggtctgcttggtgcagagctgagttcaattcctgggtatccttgttaactttctgtctcgtggatctgtctaatgttgaaagtcgggtgctaaagtctcccattattattgtgtgggagtctaagtgtctttgtaggtcctaaggacttgctttatgaatctgggtgctccttattgggtgcatatatatttaggatagttagctcttcttgttgaattgatccctttaccattatgtaatggccttgtctcttttgatctttgttggtttaaagtctgttttatccgaggctaggattgcaacccctgcctttttttttttttccatttgcttggtagatcttcctctatccctttattttgagcctatgtgtgtctctgcccgtgagatgggtttcctgaatacagcacactaatgggtcttgactctttatctaatttggcagtctgtgtcttttaattggagcatctagcccatttacatttaaggttaatattgttatgtgtgaatttgatcctgtcattatgatgttagctggtgattttgcgcgttagttgatgcagtttcttcctagcctcgatggtctttacaatttggcatgtttttgcagtggctggtaccgattgttcctttccatgtttctgcttccttcaggagctcttttagggcaggcctggtggtgacaaaatctctcagcatttgcctttctgtaaagtattttatttctccttcacttatgaaacttagtttggctggatatgaaattctggtttgaaaattcttttctttaagaatgttgaacattggcccccactgtcttctggcttgtagagtttctgccgagagatcagctgttagtatgatgggcttccctttgtgggtaacccgacctttctctctggctgcccttaacattttttccttcattttaacttttgtgaatctgacaattatgtgtcttggagttgctcttctcaagaagtatctttgtggcattctctgtatttcctgagtctgaattttggcctgccttgctagattggggaagttctcctggataatatcctgaggagtgttttccaacttggttccattctccccatcactttcaggtacaccagtcagatgtacatttgatcttttcacatagtcacatatttcttggaggctttgttcatttctttgtattcttttttctctaaacttctcttcttgcctcatttcattcatttgatcttcagtcactgataccctttcttccagttgatcgaatcggctactgaggcttgtgcattcgtcatgtagttcttgtgccatggttttcagctccatcaggtcctttaaggacttctctgcattggttattctagttagccattcatctaatcttttttcaaggcttttaacttgtttgccgtgggttcgaactacctctttgagctcagagtagtttgatcgtctgaagccttcttctctcaattcgtcaaagtcattctccatccagctttgttccgttgctggtgaggaactgcgttcctttggaggaggagaggcactctgatttttaaaattttcagtttttctgctctgttttttccccatctttgtggttttatctacctttggtctttgatgacgatgacgtacagatggagttttggtgtgggtgtcctttctgttcattagttttccttctaacagtcaggaccctcagctgcaggtctgttgaggtttgctggaggtccactccagaccctgtttgcctgggtatcagcagcagaggctgcagaacagcggatattggtgaatagcaaatgttgctgcctgatcgttcctctggaagttttgtctcagaggagtacccggccttgtgaggtgtcagtctgcccctactcgggggtgcctcccagttaggctacttgggggtcagggacccacttgaggaggcagtctgtccattctcagatctcaagctgcaggctgagagaaccactactctcttcaaagctgtcagacaaggacatttaagtctgtagaggtttctgctgccttttgtttggctatgccatgcccccagaggtggagactacagaggcaggcaggcctccttgagctgcgatgggctccacccagttcgagcttcctggctgctttgtttacctactcaagcctcggcaatggtgggcacccctcccccagcct

SEQ ID NO: 10440 - DNA, 6600 bp, Homo sapiens
tattcttttattttattttattttattattattatactttaagttttagggtacatgtgcacaatgtgcaggtttgttacatatgtatacatgtgccatgttggtgtgctgcacccattaactcgtcatttagcattaggtatatctcctaatgctttccctcccctcttcccccaccccacaacagtccccggagtgtgatgttccccttcctgtgtccatgtgttctcattgttcagttcccacctatcagtgagaagatatggtgtttggttttttgtccttgcaatagtttgctgagaatgatggtttccagcttcatccatgtccctacaaaggacatgaactcttcattttttatggctgcatagtattccatggtgtatatgtgccacattttcttaatccagtctatcattgttggacatttgggttggttccaagtctttgctattgtgaatagtgccacagtaaacatacgtgtgcatgtgtctttatagcagtgtgatttataatcctttgggtatatacccagtaatgggatggctgggtcaaatggtatttctagttctagatccctgaggaatcgccacactgacttgcacaatggtggaactagtttacagtcccaccaacagtgtaaaagtgttgctatttctccacatcctctccagcacctgttgtttcctgactttttaatgatcgccattctaactggtgtgagatggtatctcattgtggttttgatttgcatttctctgatggccagtgatgatgagcattttttcatgtgtcttttggctgcataaatgtcttcttttgagaagtgtctgttcatatcctttgcccactttttgatggggttgtctgtttttttcttgtaaatttgtttgagttcattgtagattctggatattagccctttgtcagatgagtaggttgcaaaaattttctcccattttgtaggttgcctgttcactctgatggtagtttcttttgctgtgtagaagctctttagtttaattagatcccatttgtcaattttgtcttttgttgccattgcttttggtgttttagacatgaagtccttgcccatgcctatatcctgaatggtattgcctaggttttcttctagggtttttatggttttaggtctaacatgtaagtctttaatccatcttgaattaatttttgtataaggtgtaaggaagggatccagtttcagctttctacatatggctagccagttttcccagcaccatttattaaatagggaatcctttccccattgcttgtttttgtcaggtttgtcaaagatcagatggttgtagatatgcggcattatttctgagggctctgttctgttccattggtctatacctctgttttggtaccagtaccatgctgctttggttactgtagccttgtagtatagtttgaagtcaggtagcatgatgcctccagctttgttcttttggcttaggattgacttggcaatgtgggctcttttttggttccatatgaagtttaaagtagttttttccaattctgtgaagaaagtcattggtagcttgatggggatggcattgaatctataaattaccttgggcagtatggccattttcacgatattgattcttcctacccatgagcatggaatgttcttccatttgtttgtgtcctcttttatttcactgagcagtggcttgtagttctccttgaagaggtccttcacatcccttgtaagttagattcctaggtattttattctctttgaagcaattgtgaatgggagttcactcatgatttggctctctgtttgtctgttattggtgtataaggatgcttgtgatttttgcacattgattttgtatcctgagactttgctgaagttgcttatcagcttaaggtgattttgggctgagacagtggggttttctagatatacaatcatgtcatctgcaaacagggacaatttggcttcctattttcctaattgaataccctttatttccttctcctgcctaattgccctggccagaacttccaacactatgttgaataggagtggtgagagagggcatccctgtcttgtgccagctttcaaagggaatgcttccagtttttgcccattctgtatgatattggctgtggatgtgtcatagatagctcttattattttgagatatgtcccatcaatacctaatttattgagagtttttagcatgaagtgttgttgaattttgtcaaaggccttttctgcatctattgagataatcgtgtggtttttgtctttggttctgtttatatgctggattacatttattgattttcatatgttaaaccagccttgcatcccagggatgaagcccacttgatcatggtagataagctttttgatgtgctgctggattcggtttgccagtattgtattgaggatttttgcatcagcgttcatcaaggatattggtctaaaactctctttttttgttgtgtctctgccaggctttggtatcaggatgatgctggcctcataaagtgagttagggaggattccctctttttctattgattggaatagtttcagaaggaatggtaccagctcctccttgtacgtctggtagaatttggctgtgaatccatctgctcctggactttttttggttggtaagctattgattattgccacaatttcagagtctgttattggtctattcagagattcaacttcttcctgttttagtcttgggatggtgtatgtgtcgaggaatttatccatttcttctagattgtctagtttatttgcgtagaggtgtttgtagtattctgtgatggtagtttgtatttctgtgggatcggtggtgatatcccctttatcattttttattgcatctatttgattcttctctcttttcttctttattagtcttgctagcagtctatcagttttgttgatcttttcaaaaaaccagctcctggattcattaattttttgaacggtattttgtgtctctatttccttcagttctgctctgattttagttatttcttgccttctgctagcttttgaatgtgtttgctcttgcttttctagttcttttaattgtgacgttagggtgtcaattttggatctttcctgctttctcttgtgggcatttagtgctataaatttccctctacacactgctttgaatgtgtgccagagatactggtatgttgtgtctttgtttccgttggtttcagagaacatctttatttctgccttcatttcgttatgtacccagtagtcattctggagcaggttgttcagtttccatgtagtggagcggttttgagtgagtttcttaatcctgagttctagtttgattgcactgtggtctgagagacagtttgttataatttctgtttacatttgctgaggagtgctttacttccagctatgtggtcaattttggaataggtgtggtgtggtgctgaaaagaatgtatattctgttgatttagggtggagagttctgtagatgtctattaggtccgcttggtgcagagctgagttcaattcctgggtatcctttttaactttctgtctcgttgatctgtctaatgttgacagtgggttgttaaagtctcccgttattattgtgtaggagtctaagtctctttgtaggtcactaaggacttgctttatgaatctgggttgtcctgtattaggtgcatatacatttaggatagttagctcttcttgttgaattgatccctttaccattatgtaatggccttctttgtctcttttgatctttgttggtttaaagtctgttttatcagagactaggattgcaacccctgcctttttttgttttccatttgcttggtagatcttcctccatccctttattttgagcctatgtgtgtctctgcacgtgagatgggtttcctgaatacagcacactgatgggtcttgactctatccagtttgtcagtctgtgtcttttaattggagcatttagcccatttacatttaaggttaatattgttatgtgtgtatttggtcttgtcattatgatgttagctggttattttgctcgttagttgatgcagtttcttcctagccttgatggtctttacattttgtcatgtttttgcagtggctggtaccggttgttcctttccatgtttagtgcttctttcaggagctcttttagggcaggcctggtggtgacaaaatctctcagcatttgcttgtctgtaaaggattttatttccccttcacttatgaagcttagtttggctggatatgaaaattctgggttgaaaattcttttctttaagaatgttgaatattggtccccactctcttctggcttgtagagtttctgccgagagatccgctgttagtctgatgggcttccctttgtgggtaacccgacctttctctctggctgcccttaacattttgtccttcatttcaactttggtgaatctgacaattacgtgtgttggagttgctcttctcgaggagcatctttgtggcgttctctgtatttcctgaatctgaatgttggcctgccttgctagattggggaagttctcctggataatatcctgcagagtgttttccaacttggttccattctccccatcactttcaggtacaccaatcagacgtagacttggtcttttcacatagtcccatatttcttggaggctttgttcatttctttttattctttttttctctaaacttcccttctcgcttcagttcattcatttcgtcttccatcactggtaccctttcttccagttgatcgcatcagctcccgaggcttctgcattcttcacgtagttcttgagccttggctttcagctacctcagctcctttaaggacttctctgcattggttattctagttagccattcgtctacttttttttcaaggtttttaacttctttgccattggttcgaactttctcctttagctcagagtagtttgatcttctgaagccttcttctctcaacacgtcaaagtcattctccttccagctttgttccattgctggtgaggagctgcgttcctttggaggaggagaggcgctctgatttttagggtttccagtgtttctgctttgtttttttcccatctttgtggctttatctacttttggtctttgatgttggtgatgtacagaagggtttttggtgtggatgtcctttctgtttggtagttttccttttaacagacaggaccctctgctacaggtctgttggagtttgctagaggtccactccagaccctgtttgcctgggtatcagcagcggtggctgcagaacagcggtggctgtagaacagtggatgttggtgaaccgcaaatgctgctgcctgatcgttcctctggaagttttgtctcagaggagtacccggccgtgtaaggtgtcagtgtgcccctactggggggtgcctcccagttaggctgctcgggggtcacggacccacttgaggaggcagtctgcccattctcagatctccagctgcgtagtggaagaaccactactctcttcaaagctgtcagacagggacctttaagtctgcagaggttactgctgtctttttgtttgtctgtgccctgcccccagaggtggagcctacagaggcaggcaggcctccttgagctgtggtgggctccacccagttggagcttcggggctgctttgtttacctaatcaagcctgggcaatggcaggcgcccctcccccagccttgctgctgccttgcagtttgatctcagactgctgtgctagcaatcagcgagactctgtgggcataggaccctccgagccaggtgcgggatataatcccctggtgtgccgtttttttaagcccattggaaaagtgcagtattagggtgggagttacccgattttccaggtgccttctgtcacccctttctttgactaggaaagggaactccctgaccccttgctcttcccgagtgaggcaatgcctcgccctgcttcggctcgtgcatggtgcgttgcacccactgtcttgcacccactgtctggcactctctagtgagatgaacgcgatacctcagatggaaatgcagaaatcacccgtcttctgcgtcgctcacgctgggagctgttcctgttcagccatcttagctccacccaccccatgagagaatattcttaaaaccaaatacgtcatagaagcattatgatacatttattgtggaagagaggggtagtttaaacttgtttcatccactgatgttcttattgtagctatgatatttcttaatctgataaaacaatacttataggcaaacgtttctcacttatgtatagatgaaagtatgatttatataaccttgccatacaatagggacccattaattactgaagtaattaatgttttttgagatgtctataatatgttgcagttggtgaagattttagaaagttttatttcggccgggtgtggtcgttcatgcctgtaatccagcacttcgggaggctgaggcgggtggatcacgaggtctggagatcaagaccatcgtggctaatatggtgaaaccctgtgtctactaaaaaaaaaa

SEQ ID NO: 10441 - DNA, 6804 bp, Homo sapiens
ttttttcttgtaaatttgcttaagttctttgtagattctagatattagccctttgtcagatggatagattgcaaaaattttctcccatcctgtaggctgcctgttcactctgatgatagtttcttttgctgtgcagaagctctttagtttatttatatcccatttgtcaattttggcttttcttggcattgcttttcgtgttttagtcatgaagtctttgcctatgcctatgtcctgaatggtattgcctaggttttcttctagggtttttatggttttagatcttacgtttgagtccttaatccatcttgagttaatttttgtataaggtgtaaggaaggggttcagtttcagttttctgcatatggctagccagttttcccagcaccatttattaaatagggaatcctttccccatttcttggttttgtcatgtttgtcaaagaccagatggttgtagatgtgtggtattatttctgagggctctgttctgttccattggtctctatctctgttttggtaccagtaccatgctgttttggttactgtaaacttgtactatagtttgaagtcaggtagcatgatgcctccagctttgttcttttggcttaggattgtcttggctatacgggctgtttaagtttaaagcagtttttttttcaaattctacgaagaaagtcaatggtagcttgatgggcatagcattgaatctatgaattactttgggcaatatggccattttcacaatatggattcttcctatccatgagaatggaatgtttttccatttgtttgtgtcttctcttatttccttgagcagtggtttgtggttctccttgaagaggtccttcacataccttgtaagttggattcctaggtattttattctctttgtagcaattgtcaatgggagttagctcatgatttggctctctgtttgtctgttattggtttataggaatgcttgtgatttttgcacattgattttgtatcctgagactttgctgaagttgcttatcagcttaaggagattttgggctgagatgatggggttttctaaatatacaatcatgtcatctgcaaacagagaaaatttgactccctctcttcctatttaaataccctttatttctttctcttgcctgattgccctggccagaacttccaatactatgttgaataggatccatggtttttttttttaattaaacattttaacatgtttattttgagaaatcagtataaaatgtttcaatattcttttatgtatatctactgtatttcaaaaaatgtttaaaataaataccagaagacaataatttgcctgaagacctgtctcatcaaaaagagaaactgaaattttaaccaaataatttgagttttagtgcatgtgccctgttaaagtaaatagagactgggcctgaagaatccttgggaagacaaagccagttagacctcataaatgaccttaaccttgcttgatttgcaaacataagcaaacattaacttggactatttcttataaatgcctatattagagaaaaaaatgaaacttaaggctaaccaatcagaagccataaattaacttatataactagggactttcctgcaggatacacaaataaggcaactccataactgtacccaatcacatattctccttgctttactttcttattcatcttatgaaggcctccccttgcattccctctgcagaacttttgaaccacttccaatttgaagctgtccaaatcatgaattgctgtttgttcaagtaaaccctttaaaatttttactgtgcccaagtttaccttttgacagttcttaatctttatacttgtatctttttaaaaaattttttttattatactttaagttctagggtacatgtgcaaaacatgcaggtttgttacatatgtatacatttgccatgttggtgtgctgcactcattaacttgtcatttacattaggtatatctcctaatgctatccctcctctctcccccacgacaggccctggtgtgtgatgttccccaccctgtgtccaagtgttctcattgttcagttcccacctatgagtgggatcacatgcagtgtttggttttctgtccttgtgatagtttgctcagaatgatggtttccagcttcatccatgtctctacaaaggacatgaactcatccttttttatggctgcaaagtattccatggtgtatatgtgccacgttttcttaatcaagtctatcattgatggacatttgggttggttccaagtctttgctattgtgaatagtgccacagtaaacatatgtgtgcatgtgtctttatagcagcatgatttataatcctttgggtatatacccagtaatgggatggctgggtcaaatggtatttctagttctagatccttgaggaatcaccacactgtcttccacaatggttgaactagtttgcagtcccaccaacagtgtaaaagtattcctatttctccacatcctctccagcacctgttgtttcctgactttttaatgatcaccatcctaactggtgtgagatggtatctcattgtggttttgatttgcatttctctgatggccagagatgatgagcattttttcatgtgtctgtgggctgcataaatgtgttcctttgagaagtgtctgttcatatcctttgcccactttttgatggggttgtttgattttttcctgtacatttgtttaagttctctgtagattctggatattagccctttgtcagatgggtagattgcaaaaattttctcccattctgcaggttgcctcttcactctgatggtagtttcttttgctgtacaaaagctctgtagtttaattagatcccatttgtcaattttggctttgttgccattgcttttggtgttttagacatgaagtccttgcccatgcctatgtcctgaatggtattgcctaggttttcttctagggtttttatggttttaggtctaacatttaagtctttaatccatcttgaattaatttttgtataaggtgtaaggaaggaatccagtttcagctttctacacatggctagccagttttcccagcaccatttattaaatagggaatcctttccccattgcttgtttttgtcaggtttgtcaaagaccagatggttgtatatgtgtggtattatttctgagggctctgttctgttccattggtctctatctctgttttggtaccagtaccatgctgttttggttactgtagccttgtagtattgtttgaagtcaggtagcatgatgcctccagctttgttcttttggcttaggattgtcttggcaatgtgggctctcttttggttccatatgaactttaaagtagttttttccaattctgtgaagaaagtcattggtagcttgatggggatggcattgaatctatcaattaccttgggcagtatggccattttcaggatactgattcttcctatccatgagcatggaatgttcttccatttgtttgggtcctcttttatttcattgagcagtggtttgtagttctccttgaagaggtcttccacatcccttgtaagttggattcctaggtattttattctctttgaagcaattgtgaatgggagttcactcatgatttggctctctgtttgtctggtattggtgtataagaatgcttgtgatttttgcacattgattttgtatcctgagactttactgaagttgcttatcagcttaaggagattttgggctgagacaatggggttttctaaatatacaatcatgtcatctgcaaacagagacaatttgacttcctcttttcctaatcgaatacactttatttctttctcctgcctgattgccctggccagaacttccaacactatgttgaataggagtggtgagagaaggcatccctgtcttgtgccagttttcaaagggaatgcttccagtttttgtccattcaggatgatattagctgtgggtttgtcataaatagctcttattattttgagatatgtcccatcaatacctagtttattgagagtttttagcatgaagggctgttgaatttaatcaaaggccttttctgcatctattgagataatcatgtggtttttgtctttggttctgtttatatgatggattacgtttattgatttgcatatgttgaaccagccttgcatcccagggatgaagcccacttgatcgtggtggataagctttttgatgtgctgctggattcagtttgccagtattttattgaggatttttgcatcaatgttcatcagggatattggtctaaaattctctttttttattgtgtctctgccaggtttttgtatcaagatgatgctggcctcataaaatgagtgagggaggattccctctttttctattgattggaatagtttcagaaggaatggtaccagctcctctttgtacctctggtagaattcggctttgaattcatctggtcctgaactttttttggttgtaggctattaattattgcctcaatttcagagcctgttattggtctattcagagattcaactgcttcctggtttagtcttgggagggtgtatgtgtcgaggaatttatccatttcttctagattttctactttatttgcatagaggtctttacagtattctctgatggtagttggtatttctgtgggatcagtggtgatatcccctttatcattttttattgcatctatttgattcttctctcttttcttctttattagtcttgctagcagtctatcaatattgttgatcttttcaaaaaaccagctcctgcattcattgattttttaagggttttttgtgtctctatctccttcagttctgctctgatcttagttatttcttgccttctgctagcttttgaatgtgtttgcttttgcttctctagttcttttaattgtgatgttagggtgtcaattttagatctttcctgctttctcttgtgggcatttagtggtataaatttccctctacacactgctttaaatgtgtcccagagattctgatatgttgtgtctttgttcttattggtttcaaagaacatctttatttctgccacattttcgttacgtacccagtagttattcaggagcaggttgttcagtttccatgtagttgagcagttttgagtgagtttcttaatcctgagttctagtttaattgcactgtggtctgagagacagtttgttatgatttctgttcttttacatctgctgaggagtgcttacttccaactatgcggtgaattttggaataagtgcgatgtggtgctgagaagaatgtatattctgttgacttggggtggagagttctgtagatgtctgttaggctcacttggtgcagagctgaattcaattcctgggtatccttgttaactttctgtcttgttgatctgtctaatgttgacagtggggtgttaaagtctcccattattattgtgtgggagtgtaagtctctttggaggtctctaaggacttgctttatgaatctgggtgctcctgtattgggtgcatagatatttaggatagttagctcttcttgttgaattgatcctttaccattatgtaatggccttctttgtctcttttgatctttgttggttcaaagtctgttttatcagagactagaattgcaacctctgcttttttgttttgttttgttttccatttgcttggtagatcttcctccatccctttattttgagcatatgtgtgtctctgcacgtgagatgggtcttctgaatacaacacattgatgggtcttgactctttatccaatttgccagtcttttaattggagcacttagcccatttacatttaaggttattattgttatgtgtgaatttgatcctgtcattatgatgttagctggttattttgctcattagttgatgcagtttcttcctagcatcaatggtctttacaatttggcatgtttttgctggggctggtaccggttgttcctttccatgtttagtgcttccttcaggagctcttgtaaggcaggcctggtggtgacaaaatctctcagcatttccttgtctgtaaaggattttatttctcctttacttatgaagcttagtttggctggaaatgaaattctgggttgaaaattcttttctttaagaatgttgaatattggcccccactctcttctggcttgtagagtttctgccaagacatccacttttagtctgatgggcttccctttgtgggtaacccgacctttccctctggctgcccttaacattttttccttcatttcagctttggtgaatctgacaattatgtgtcttggagctgctcttcttgaggagcatctttgtggcattctctgtatttcctgaatttgaatgttggcctgccttgctaggttggggaagtattgctggataatatcctgaagagtgttttccaacttggttccattatccccatcactttcaggtacaccaatcagacgtagatttggtcttttcacatattcccatatttcttggaggctttgttcatttctttttactcttttttctctaaacatctcttctcgcttcgtttcattcatttgatcttcaatcactgataccctttctcccagttgatcaaatcagctactgaagcttgtgcatgcgtcatgtagttctcatgccatggttttcagctccatcaggtcatttaaggtcttctctacgctgtttattctagttagccattcatctaatcttttttcaagttttaacttctttgtgatgggttcaaacatcctcctttag

SEQ ID NO: 10442 - DNA, 5743 bp, Homo sapiens
ttcatttttctttatttatttttcttttttttattatactttaagttttagggtacatatgcaccacgggcaggtttgttacatatgtatacatgtgccatgttggcgtgctgcacccattaactcgtcatttaacattaggtatatctcctaatgctatccctcccgcctccccccaccccacaacaggccctggtgtgtgatgttccccttcctgtgtccatgtgttctcattgttcaattcccacctatgagtgagaacatgcggtgttcggttttttgtccttgcgatagtttgctgagaatgatggtttccagcttcatccatgtccctacaaaggacatgaactcatcattttttatggctgcatagtattccatggtgtatatgtgccacattttcttaatccagtctatcattgttggacatttgggttggttccaagtctttgctattgtgaatagtgccgcaataaacatacgtgtgcatgtgtctttataacagcatgatttataatcctttaggtatatacccagtaatgggatggctgggtcaaatggtacttctagttctagctccctgaggaatcgccacactgacttccacaatggttgagctagtttacagtcccaccaacagtgtaaaagtgtttctatttctccacatcctctccagcacctgttgtttcctgacttttgaatgatcgccattctaactagtgtgagatggtatctcattgtggttttgatttgcatttctctgatggccagtgatgatgagcattttttcatgtgtcttttggctgcataaatgtcttctttgagaagtgtctgttcatattctttgcccactttttgatggggttctttgtttttttcttgtaaatttgtttgagttcattgtagattctggatattagccctttgtcagatgagtaggttgcaaaaattttctcccattctgtaggttgcctgttcactctgatggtaatttcttttgctgtgcagaagctctttagtttaattggatcccatttgtcaattttcgcttttgttgccattgcttttggtgttgtagacatgaagtccttgcccatgcctatgtcctgaatggtattgcctaggttttcttctagggtttttatggtgttaggtctaacatttaaatctttaatccatcttgaattaattttagtataaggtgtaaggaagggatgcagtttcagctttctacatatgactagccagttttcccagcaccatttattaaatagggaatcctttccccatttcttgtttttgtcaggtttgtcaaagatgagatagttgtagatatgcagcattatttctgagggccctgttctgttccattggtctgtatctctgttttggtaccagtatcatgctgttttggttactgtagccttgtagtatagtttgaagtcaggtagcatgatgcctccagctttgttcttttggcttaggattgacttggtgatgcgggctcttttttggttccatatgaactttaaagtaattttttccaattctgtgaagaaagtcattggtagcttgatggggatggcattgaatctataaattaccttgggcagtatgaccattttcatgatattgattcttcctacccatgagcatggaatgttcttccatttgtttgtatcctcttttatttcattgagcagtggtttgtagttctccttgaagaggtccttcacatcccttgtaagttggattcctaggttttttattctctttgaagcaattgtgaatgggagttcactcatgatttggctctctgtttgtctgttattggtgtataagaatgcttgtggtttttgcacattgattttgtatcctgagactttgctgaagttgcttatcagcttaaggagattttgggctgagacgatggggttttctagatacacaatcatgtcatctgcaaacagggacaatttgacttcctcttttcctaattgaataccctttatttccttctcctgcctgattgccctggccagaacttccaacactatgttgaataggagtggtgagagagggcatccctgtcttgtgccagttttcagagggaatgcttccagtttttgcccattcagtatgatattggctgtggctttgtcataaatagctcttattattttgagatacgtcccatcaatacctaatttattgagagtttttagcatgaagggttgttgaattttgtcaaaggccttttctgcatctattgagataatcatgtggttttttctttggttctgtttatatgctggattacatttattgatttgcgtatgttgaacctgccttgcatcccagggatgaagcccacttgatcatagtggataagctttttgatgtgctgctggattcggtttgccagtattttattgaggatttttgcatcgatgttcatcaggtatattggtctaaaattctctttttttgttgtgtctctgccatgctttggtatcaggatgatgctggcctcataaaatgagttagggaggattccctctttttctattgattggaatcgtttcaaaaggaatggtactagctcctccttgtacctctggtagaattcggctgtgaatccatctgttcctggactttttttggttggtaagctattaattattgcctcaatttcagatcctgttattggtctattcagagattcaacttcttcctggtttagtcttgggagagtgtatgtgtcaaggaatttatccatttcttccggattttctagtttatttgcatagaggtgtttgtagtattctctgatggtagtttgtatttctgtgggatcagtggtgatatcccctttatcatttttaattgtgtctatttgattcttctctcttttcttctttattagtcgtgctaggagtctatcaattttgttgatcttttcaaaaaaccagctcctggcttcattgattttttgaagggctttttgtgtctccatttctttctgttctgctctgatcttagttatttcttgccttctgctagcttttgaatgtgtttgctcttgcttttctagttcatttaattgtgatgttagggtgtcaattttagatctttcctgctttctcttgtgggcatttagtgctataaatttccctctacacactgctttgaatgtgtcccagagattctggtatgttgtgtctttgttctcattttttccaaagaacatctttatttctgcctttatttcattatgtacccagtagtcattcaggagcaggttgttcagtttccatttagttgagcggttttgagtgagtttcttaatcctgagttctagtttgattgcactgtggtctgagagatagtttgttataatttctgttcttttacatttgctgaggagagctttacttccaagtatgtggtcaattttggaataggtgtggtgtggtgccaaaaaaaatgtatattctgttgatttggggtggagagttctgtagatgtctattaggtccgcttggtgcagagctgagttcagttcctggatatccttgttaactttctgtctcgttggtctgtctaatgttgacagtggggtgttaaagtctcccattattattgtgtgggagtctaagtctctttgtaggtctctaaggacttgctttatgaatctgggtgctcctgtattgggtgcatatatatttaggatagttagctctgcttgttgaattgatccctttaccattatgtaatggccttctttgtctcttttgatctttgttggtttaaagtctgttttatcagagactaggattgcaacccctgcctttttttttttttccatttgcttggtagatcttcctccatccctttattttgagcctatgtgtatctctgcacgtgagatgggtctcctgaatgcagcacactgatgagtcttgactctttatcgaatttgccagtctgtgtcttttaattggggcatttagcccatttacatttaaggttaatattgttatgtgtgaatttgatcctgtcataatgatattagctggttattttgctcgttagttgatgcagtttcttcctagccttgatggtctttacaatttggcatgtttttgcagtggctggtaccggtttttcctttccatgtttagtgcttccttcaggagctcttttagggcaggcctggtggtgacaaaatctctcagcatttgcttgtctgtaaagggttttatttctccttcacttgtgaagcttagtttggctggatatgaaattctgggttgaaaattcttttctttaagaatgttgaatattggcccccacactcttctggcttgtagagtttctgccgagagatcagctgttagtttgatgggcttccctttgtgggtaacccgacctttctctctggctgcccttaacgttttttccttcatttcaactttggtgaatctgacaattatgtgtcttggagttgctcttctcgaggagtatctttgtggcattctctgtatttcctgaatttgaatgttggcctgccttgctagattggggaagttctcctggataatatcctgcagagtgttttccaacttggttccattctccccgtcactttcaggtacaccaatcagatgtagatttggtcttttcacatagtcccatgtttcttggaggctttgttcatttctttttattcttttttctctaaacttctcttctcacttcatttcattcatttgatcttccatcactgataccctttcttccagttgatcaaatcagctgctgaggcttgtgcattcatcacgtagatctcatgccgtggttttcagctccatcaggtcctttaaggacttctctgcattggttattctagtcagccattcgtctaatcttttttcaaggtttttaacttttttgccatgggttcgaacttcctcctttaggtcggagtagtctgatcgtctgaagccttcttctctcaactcgtcaaaatcattctccatgcagctttgttccattgctggtgaggagccgcattcctttgtaggaggagaggtgcttgatttttagatttttcagtttttctgctctgttttttccccatctttgtggttttatctacctttggtctttgatgatggtgacgtacagatggggttttggtgtggatgtcctttctgtttgttagttttccttctaacagacaggaccctcagctgcaggtctgttggagtttgctggaggtccactccagatcctgtttgcctgggtatcagcagcagaggctgcagaacagtggatattggtgaacagcaaatgttgctgcctgatcgctcctctggaagttttgtctcagaggagtacctggctgtgtgaggtgtcagtctgcccctactggggggtgcctcccagttaggctacttgggggtcaaggacccacttgaggaggcagtctgtccgttctcagatctcaagctgtgcgctgggagaaccgctactctcttcaaagctgtcagacagggacatttaagtctgcagaggtttctactgccttttgtttggctatgccctgcccctagaggtggagtctacagaggcaagcaggcctccttgagctgcggtgggctccacccagttcgagtttcttgactgctttgtttacctactcaagcctcagcaatgacaggcgcccctcccccagcct

SEQ ID NO: 10443 - DNA, 6083 bp, Homo sapiens
taatcatcattcttttttttttttttttttaatttttttttttttattatactctaagttttagggaacatgtgcacattgtgcaggttagttacatatgtatacatgtgccatgctggtgcgctgcacccactaacgtgtcatctagcattaggtatatctcccaatgctatccctcccccctcccccgaccccaccacagtccccagagtgtgatattccctttcctgtgtccatgtgatctcattgttcagttcccacctatgagtgagaatatgcggtgtttggttttttgttcttgcgatagtttactgagaatgatggtttccaatttcatccatgtccctacaaaggacatgaactcatcattttttatggctgcatagtattccatggtgtatatgtgccacattttcttaatccagtctatcattgttggacatgtgggttggttccaagtctttgctattgtgaatagtaccgcaataaacatacgtgtgcatgtgtctttatagcagcatgatttatagtcctttgggtatatacccagtaatgggatggctgggtcaaatggtatttctagttctagatccctgaggaatcgccacactgacttccacaatggttgaactagtttacagtcccaccaacagtgtaaaagtgttcctatttctccacatcctctccagcacctgttgtttcctgactttttaatgattgccattctaactggtgtgagatgatatctcatagtggttttgatttgcatttctctgatggccagtgatgatgagcatttcttcatgtgttttttggctgcataaatgtcttcttttgagaagtgtctgttcatgtccttcgcccactttttgatggggttgtttgtttttttcttgcaaacttgtttgagttcattgtagattctggatattagccctttgtcagatgagtaggttgcgaaaattttctcccatgttgtaggttgcctgttcactctgatggtagtttcttttgctgtgcagaagctctttagtttaattagatcccatttgtcaattttggcttttgttgccattgcttttggtgttttggacatgaagtccttgcccacgcctatgtcctgaatggtaatgcctaggttttcttctagggtttttatggttttaggtctaacgtttaaatctttaatccatcttgaattgatttttgtataaggtgtaaggaagggatccagtttcagctttctacatatggctagccagttttcccagcaccatttattaaatagggaatcctttccccattgcttgtttttctcaagtttgtcaaagatcagacggttgtagatatgcggcattatttctgagggctctgttctgttccattgatctatatctctgttttggtaccagtaccatgctgttttggttactgtagccttgtagtgtagtttgaagtcaggtagtgtgatgcctccagctttgttcttttggcttaggattgacttggcgatgcgggctcttttttggttccatatgaactttaaagtagttttttccaattctgtgaagaaagtcattggtagcttgatggggatggcattgaatctgtaaattaccttgggcagtatggccattttcacgatattgattcttcctacccatgagcatggaatgttcttccatttgtttgtgtcctcttttatttccttgagcagtggtttgtagttctccttgaagaggtccttcacatcccttgtaagttggattcctaggtattttattctctttgaagcaattgtgaatgggagttcactcatgatttggctctctgtttgtctgttgttggtgtataagaatgcttgtgatttttgtacattgattttgtatcctgagactttgctgaagttgcttatcagcttaaggagattttgggctgagacgatggggttttctagataaacaatcatgtcgtctgcaaacagggacaatttgacttcctcttttcctaattgaataccctttatttccttctcctgcctgattgccctggccagaacttccaacactatgttgaataggagcagtgagagagggcatccctgtcttgtgccagttttcaaagggaatgcttccagtttttgcccattcagcatgatattggctgtgggtttgtcatagatagctcttattattttgaaatacgtcccatcaatacctaatttattgagagtttttagcatgaagggttgttgaattttgtcaaaggctttttctgcatctattgagataatcatgtggtttttgtctttggctctgtttatatgctggattacatttattgatttgcgtatattgaaccagccttgcatcccagggatgaagcccacttgatcatggtggataagctttttgatgtgctgctggatttggtttgccagtattttattgaggatttttgcatcaatgttcatcaaggatattggtctaaaattctcttttttggttgtgtctctgcctggctttggtatcagaatgatgctggcctcataaaatgagttagggaggattccctctttttctattgattggaatagtttcagaaggaatggtaccagttcctccttgtacctctggtagaattcggctgtgaatccatctggtcctggactctttttggttggtaaactattgattattgccacaatttcagagcctgttattggtctattcagagattcaacttcttcctggtttagtcttgggagagtgtatgtgtcgaggaatgtatccatttcttctagattttctagtttatttgcgtagaggtgtttgtagtattctctgatggtagtttgtatttctgtgggatcggtggtgatatcccctttatcattttttattgtgtctatttgattcttctctctttttttctttattagtcttgctagcggtctatcaattttgttgatcctttcaaaaaaccagctcctggattcattgagtttttgaagggttttttgtgtctctatttccttcagttctgctctgattttagttatttcttgccttctgctagcttttgaatgtgtttgctcttgcttttctagttgttttaattgtgatgttagggtgtcaattttggatctttcctgctttctcttgtaggcatttagtgccataaatttccctctacacactgctttgaatgcgtcccagagattctggtatgtggtgtctttgttctcgttggtttcaaagaacatctttatttctgccttcatttcgttatgtacccagtagtcattcaggagcaggttgttcagtttccatgtagttgagcggctttgagtgagattcttaatcctgagttctagtttgattgcactgtggtctgagagatagtttgttataatttctgttcttttacatttgctgaggagagctttacttccaactatgtggtcaattttggaataggtgtggtgtggtgctgaaaaaaatgtatattctgttgatttggggtggagagttctgtagatgtctattaggtctgcttggtgcagagctgagttcaattcctgggtatccttgttgactttctgtctcgttgatctgtctaatgttgacagtggggtgttaaagtctcccattattaatgtgtgggagtctaagtctctttgtaggtcactcaggacttgctttatgaatctgggtgctcctgtattgggtgcataaatatttaggatagttagctcctcttgttgaattgatccctttaccattatgtaatggccttctttgtctcttttgatctttgttggtttaaagtctgttttatcagagactaggattgcaacccctgcctttttttgttttccattggcttggtagatcttcctccatccttttattttgagcctatgtgtgtctctgcacgtgagatgggtttcctgaatacagcacactgatgggtcttgactctttatccaacttgccagtctgtgtcttttaattgcagaatttagtccatttatatttaaagttaatattgttatgtgtgaatttgatcctgtcattatgatgttagctggtgattttgctcattagttgatgcagtttcttcctagtctcgatggtctttacattttggcatgattttgcagcggctggtaccggttgttccttttcatgtttagcgcttccttcaggagctcttttagggcaggcctggtggtgacaaaatctctcagcatttgcttgtctataaagtattttatttctccttcacttatgaagcttagtttggctggatatgaaattctgggttgaaaattcttttctttaagaatgttgaatattggcccccactctcttctggcttgtagggtttctgccgagagatccgctgttagtctgatgggcttccctttgagggtaacccgacctttctctctggctgcccttaacattttttccttcatttcaactttggtgaatctgacaattatgtgtcttggagttgctcttctcgaggagtatctttgtggcattctctgtatttcctgaatctgaacgttggcctgccttgctagattggggaagttctcctggataatatcctgcagagtgttttccaacttggttccattctccacatcactttcaggtacaccaatcagacgtagatttggtcttttcacatagtcccatatttcttggaggctttgctcatttctttttattcttttttctctaaacttcccttctcgcttcatttcattcatttcatcttccattgctgataccctttcttccagttgatcgcatcggctcctgaggcttctgcattcttcacgtagttctcgagccttggttttcagctccatcagctcctttaagcacctctctgtattggttattctagttatacattcttctaaatttttttcaaagttttcaacttctttgcctttggtttgaatgtcctcccgtagctcagagtaatttgatcgtctgaagccttcttctctcagctcgtcaaaatcattctccatccagctttgttctgttgctggtgaggaactgcgttcctttggaggaggagaggcgctctgcgttttagagtttccagtttttctgttctgttttttccccatctttgtggttttatctacttttggtctttgatgatggtgatgtacagatgggttttcggtgtagatgtcctttctggttgttagttttccttctaacagacaggaccctcagctgcaggtctgttggaataccctgccgtgtgaggtgtcagtgtgcccctgctggggggtgcctcccagttaggctgctcggggttcaggggtcagggacccacttgaggaggcagtctgcccgttctcagatctccagctgcgtgctgggagaaccactgctctcttcaaagctgtcagacagggacacttaagtctgcagaggttactgctgtctttttgtttgtctgtgccctgcccccagaggtggagcctacagaggcaggcaggcctccttgagctgtggtgggctccacccagttggagcttcccggctgctttgtttacgtaagcaagcctgggcaatggcgggcgcccctcccccagccttgttgccgccttgcagtttgatctcagactgctgtgctagcaatcagcgacattccgtgggcgtaggaccctctgagccaggtgtgggatatcgtctcgtggtgcgccgtttcttaagccggcctgaaaagcgcaatattcgggtgggagtgacccgattttccaggtgcgtccgtcacccctttctttgactcggaaagggaactccctgaccccttgcgcttcccaggtgaggcaatgcctcgccctgcttcggctcgagcacggtgcgcacacacactggcctgcgcccactgtctggcactccctagtgagatgaacccggcacctcagatggaaatgcagaaatcacccgtcttctgcgacgctcacgctgggagctgtagaccggagctgttcctattcggccatcttggctcctcctcctaatcatcattcttgaatt

SEQ ID NO: 10444 - DNA, 6049 bp, Homo sapiens
atttacccatttcttttttttttttttatatactttaagttttagggtacatgtgcacattgtgcaggttagttacatatgtatacatgtgccatgctggtgcgctgcacccactaactcgtcatctagcattaggtatatctcccaatgctatccctcccccctccccccaccccaccacagtccccagagtgtgatattccccttcctgtgtccatgtgatctcattgttcaattcccacctatgagtgagaatatgcggtgtttggttttttgttcttgtgatagtttactgagaatgatgatttccaatttcatccatatccctacaaaggacatgaactcatcattttttatggctgcatagtattccatggtgtatatgtgccacattttcttaatccagtctatcattgttggacatttgggttggttccaagtctttgctattgtgaataatgccacaataaacatacgtgtgcatgtgtctttatagcagcatgatttatagtcatttgggtatatacccagtaatgggatggctgggtcaaatggtatttctagttctagatccctgaggaatcgccacactgacttccacaatggttgaactagtttacagtcccaccaacagtgtaaaagtgttcctatttctccacatcctctccagcacctgttgtttcctgactttttaatgattgccattctaactggtgtgagatggtatctcattgtggttttgatttgcatttctctgatggccagtgatgatgaacattttgtcatgtgttttttggctgcataaatgtcttcttttgagaagtgtctgttcatatccttcacccactttttgatggggttgtttgtttttttcttgtaaatttgtttgagttcattgtagattctggatattagccctttgtcagatgagtaggttgcgaaaattttctcccatgttgtaggttgcctgttcactctgatggtagtttcttttgctgtgcagaagctctttagtttaattagatcccatttgtcaattttggcttttgttgccattgcttttggtgttttggacatgaattctttgcccatgcctatgtcctgaatggtaatacctaggttgtcttctagggtttttatggttttaggtctaacgtttaaatctttaattcatcttgaattgatttttgtataaggtgtaaggaagggatccagtttcagcttcctacatatggctagccagttttcccagcaccatttattaaatagggaatcctttccccattgcttgtttttctcaggtttgtcaaagatcagatagttgtaggaatgcggcgttatttctgagggctctgttctgttccattgatctatatctctgttttggtaccagtaccatgctgttttggttactgtagcttgtagtatagtttgaagtcaggtagtgtgatgcctccagctttattcttttggcttaggattgacttggcaatacgggctctttttttggttccatatgaactttaaagtagttttttccaattctgtgaagaaagtcattggtagcttgatggggatggcattgaatctgtaaattaccttgggcagtatggccattttcacgatattgattcttcctatccatgagcatggaatgttcttccatttgtttgtatcctcttttatttccttgagcagtggtttgtagttctccttgaagaggtccttcacatcccttgtaagttggattcctaggtattttatactctttgaagcaattgtgaatgggagttcactcatgatttggctctctgtttgtctgttgttggtgtataagaatgtttgtgatttttgtacattgattttgtatcctgagactttgctgaagttgcttatcagcttaaggagattttgggctgagacaatggggttttctagatatacaatcatgtcatctgcaaacagggacaatttgacttcctcttttcctaattgaataccctttatttccttctcctgcctaattgccctggccagaacttccaacgctatgttgaataagagtggtgagagagggcatccctgtcttgtgccagttttcaaagggaatgcttccagtttttgcccattcagtatgatattggctgtgggtttgtcatagatagctcttattattttgaaatacatcccatcaatacctaatttattgagagtttttagcatggaaggttgttgaattttatcaaaggctttttctgcatctgttgagataatcatgtggtttttgtctttggctctgtttatatgctggattacatttattgatttgcatatattgaaccagccttgcatcccagggatgaagcccacttgatcgtcgtggataagctttttgatgtgctgctggattcggtttgccagtattttattgaggatttttgcatcaatgttcatcaaggatattggtctaaaattctcttttttggttgtgtctctgcccggctttggtatcagaatgatgctggcctcataaaatgagttagggaggattccctctttttctattgattggaatagtttcagaaggaatggtaccagttcctccttgtacctctggtagaattccgctgtgaatccatctggtcctggactctttttggttggtaaactattgattattgccacaatttcagctcctgttattggtctattcagagattcaacttcttcctggtttagtcttgggagagtgtatgtgtcgaggaatttatccatttcttctagattttctagtttatttgcgtagaggtgtttgtagtattctctgatggtagtttgtatttctgtgggatcggtggtgatatcccctttatcattttttattgtgtctatttggttcttctctctttttttctttattagtcttgctagcggtctatcaattttgttgatcctttcaagaaaccagctcctggattcattgattttttgaagggttttttgtgtctctatttccttcagttctgctctgattttagttatttcttgccttctgctagcttttgaatgtgtttgttctttcttttctagttcttttaattgtgatattagggtgtcaattttggatctttcctgctttctcttgtgggcatttagtgctataaatttccctctacacactgctttgaatgcatcccagagattctggtatgttgtgtctttcttctcattggtttcaaagaacatctttatttctgccttaatttcgttatgtacccagtagtcattcaggagcaggttattcagtttccatgtagttgagcagctttgagtgggattcttaatcctgagttctagtttgattgcactgtggtctgagagatagtttgttataatttctgttcttttacatttgctgaggagagctttacttccaactatgtggtcaattttggaataggtgtggtgtggtgctgaaaaaaatgtatattctgttgatttggggtggagagttctgtagatgtctattaggtccgcttggtgcagagctgagttcaattcttgggtatccttgttgactttctgtctcgttgatctgtctaatgttgacagtgtggtgttaaagtctcccattattaatgtgtgggagtctacgtctctttgtaggtcactcaggacttgctttatgaatctgggtgctcccgtattgggtgcatatatatttaggatagttagctcttcttgttgaattgatccctttaccattatgtaatggccttctttgtctcttttgatctttgttggtttaaagtctgttttatcagagactaggattgcaacccctgcctttttttgttttccatttgcttggcagatcttcctccatccttttattttgagcctatgtgtgtctctgcatatgagatgggtttcctgaatacagcacactgatggatcttgactcttcatccaatttgccagtctgtgtcttttaattggagaatttagtccatttatatttaaagttaatattgttatgtgtgaatttgatcctgtcattatgatattagctggtgattttgctcgttagttgatgcagtttcttcctagtctcgatggtctttacattttggcatgattttgcaggggctggtaccggttgttcctttccatatttagcacttccttcaggagctcttttagggcaggcctggtggagacaaaatgagtcagcatttgcttgtctgtagagtattttatttccccttcacttatgaagcttagtttggctggatatgaaattctgggttgaaaattcttttctttaagaatgttgaatattggcccccactctcttctggcttgtagggtttctgccgagagatccactgttagtctgatgggcttccctttgagggtaacccgacctttctctctggctgtccttaacattttttccttcatttcaactttggtgaatctgacaattttgtgtcttggagttgctcttctccaggagtatctttgtggtgttctctgtttttcctgaatctgaatgttggcctgccttgctagattggggaagttctcctggattatgtcctgcagagtgttttccaacttggttccattctccccatcactttcaggtacaccaatcagacatagatttggtcttttctcatagtcccatatttcttggaggctttgctcatttctttttattcttttttctctaaacttcccttctcacttcatttcattcatttcatcttccattgctgataccctttcttccagttgatcgcatcggctcctgaggcttctgcattcttcacgtagttctcgagccttggttttcagctccatcagctcctttaagcacttctctgtattggttattctagttatacattcttctgaattttgttcaaagttttcaacttctttgcctttggtttgaatgtcctcccgtagctcagagtaatttgatcgtctgaagccttcttctctcagctcgtcaaagtcattctccatccagctttgttctgttgctagtgaggaactgcgttcctttggaggaggagagacgctctgcgttttagggtttccagtttttctgttctgttttttctccatctttgtggttttatctacttttggtctttgatgatggtgatgtacagatgggttttcggtgtggatgtcctttctgtttgttagttttccttctaacagacaggaccctcagctgcaggtctgttggaataccctgccgtgtgaggtgtcagtgtgcccctgctggggggtgcctcccagttaggctgctcgggggtcaggggtcagggacccacttgaggaggcagtctgccggttctcagatctccagctgcgtgctgggagaaccactgctctcttcaaagctgtcagacagggacatttaagtctgcagaggttgctgctgtctttttgtttgtctgtgccctgcccccagaggtggagcctacagaggcaggcaggcctccttgtgctgtggtgggctccacccagttcgagcttcccagctgctttgtttacctaagcaagcctgggcaatggagggcgcccctcccccagcctcgctgcctccttgcagtttgatctcagactgctgtgctagcaatcagcgagattccgtgggcgtaggaccctccaagccaggtgtggcatatagtctcgtggtgcgccgtgttttaagccagtctgaaaagcgcaatattcgggtgggagtgacccgattttccaggtgcgtccatcacccctttctttgactcagaaagagaactccctgaccccttgcgcttcccaggtgaggcaatgcctcgccctgctttggctcacgcacagtgagcacacccactggcctgtgtccactgtctggcactccctagtgagatgcacccggtacctcagatggaaatgcagaaatcacccgtcttctgtgttgctcacgctgggagctgtagaccggagatgttcctattcggccatcttggctcctccccccgaa

SEQ ID NO: 10445 - DNA, 20024 bp, Homo sapiens
tcctgttattcgtctattcagagattcaacttcttcctggtttagtctcgggagagtgtatgtgtcgaggaatttatccatttcttctagattttctagtttatttgcatagaggtgtttgtagtattctctgatggtagtttgtatttctgtgggatcggtggtgatatcccctttatcattttttattgtgtctatttgattcttctctccttttttctttattagtcttgctagcggtctattaattttgttgatcctttcaaaaaaccagctcctggattcattaattttttgaacggttttttgtgtctctatttccttcagttctgctctgattttagttatttcttgccttctgctagcttttgaatgtgtttgctcttgcttttctagttcttttaattgtgatgttagggtgtcaattttggatctttcctgctttatcttgtgggcatttagtgctataaatttccctctacacactgctttgaatgtgtcccagagattctggtatgttgtgtctttgttcttgttggtttcaaagaacatctttgtttctgccttcatttcgttatgtactgtacccattcaggagcaggttgttcagtttccatgtagttgagcggttttgagtgagattcttaatcctgagttctagtttgattgcactgtggtctgagagacagtttgttataatttctgttcttttacatttgctgaggagagctttacttccaactatgtggtcaattttggaataggtgtggtgctgaaaagaatgtatattctgttgatttggggtggagagttctgtagatgtctattaggtccacttggtgcagagctgagttcaattcctgggtatccttgttgactttttgtctcgttgatctgtgtaatgttgacagtggggtgttaaagtctcccattattattgtgtgggagtctaagtctctttgtaggtcactcaggacttgctttatgaatctgggtgctcctgtattggttgcatatatatgtaggatagttagctcttcttgttgaattgatccctttaccattatgtaatggccttctttgtttcttttgatctttgttggtttaaagtctgttttatcagagactagtattgcaacccctgcctttttttgttttccatttgcttggtagatcttcctccatccttttattttgagcctatgtgtgtctctgcacgtgagatgggtttcctgaatacagcacactgacgggtcttgactctttatccaatttgccagtctgtgtcttttaattggagcatttagtccatatacatttaaagttaatattgttatgtgtgaatttgatcctgtcattatgatgttagctggttattttgttcgttagttgatgcagtttcttcctagtcttgatggtctttacattttggcatgattttgcagtggctggtaccggttgttcctttccatgtttagtgcttccttcaggagctcttttagggcaggcctggtggtgacaaaatctctcagcatttgcttgtctgtaaagtattttatttctccttcactgatgaagcttagtttggctggatatgaaattctgggttgaaaattcttttctttaagaatgttgaatattggcccccactctcttctggcttgtagggtttctgccaagatccgctgttagtctgatgggcttccctttgagggtaacccgacctttctctctggctgcccttaacattttttccttcatttcaactttggtgaatctgacaattatgtgtcttggagttgctcttctcgaggagtatctttgtggcgttctctgtatttcctgaacctgaacgttggcctgccttgctagattggggaagttctcctggataatatcctgcagagtgttttccatcttggttccattctccccatcactttcaggtacaccaatcagatgtagatttggtcttttcacatagtcccatatttcttggaggctttgttcgtttctttttattcttttttctctaaacttcccttctcgcttcattttattcatttcattttccattgctgataccctttcttccagttgatcgcatcagctcctgaggcttctgcattcttcacgtagttttcgagccttggctttcagctccatcagctcctttaagcacttctctgtattggttattctagttatacatttgtctaaatttttttcaaagttttcaacttctttgcctttggtttgaatttcctcctgtagctcggagtagtttgatcatctgaagccttcttctctcaactcgtcaaagtcattctccatccagctttgttccattgctggtaaggaactgcgttcctttggaggaggagaggcgctctcctttttagagtttccagtttttctgctctgttttttccccatctttgtggttttatctacttttggtctttgatgatggtgatgtacagatgggtttttggtgtggatatcctttctgttgttagttttccttctaacagacaggaccctcagctgcaggtctgttggagtttgctagaggtccactccagaccgtttgcctgggtatcagcagcggtgtctgcagaaccacggattttcatgaaccgcgaatgctgctgtctgatcgttcctctggaagttttgtctcagaggagtacctggccatgtgaggtatcagtctgccccactggggggtgcctcccggttaggctgctcaggggtcagggacctacttgaggaggcagtctgcccattctcagatctcaaactgcgtgctgggagaaccactgctctcctcaaagctgtcagacagggacatttaagtctgcagaggtttctgagcctacagaggcaggcaggcctccttgagctgtggtgggctccacccagttggagcttcccggctgctttgtttacctaagcgagcctgggcaatggcgggtgcccctccgccagcctcgctgcagccttgcagtttgatctcagactgctgtgctagcaatcagcaagactccgtgggcgtaggaccctccgagccaggtgcgggatataatttcctggtgcaccgtttcctaagcccgtcggaaaagcgcagtattcgggtgggagtggcccgattttccaggtgccatctgtcacccctttccttgaccaggaaagggaactcccggaccccttgcgcttcccgtgtgatgcgatgccacgccctgcttcggctggcgcacggtgcgctgcacccactgtcctgcacctactgtctggcactccctagtgagatgaacccggtatctcagatggaaatgcagaaatcacccgtcttctgcgtcgctcacactgggagctgtagaccggagctgttcctatttggccatcttggctcctcccacttcttcctttataaaacggtatgtcttttattgctttctatttacattactgcatggctaggaactccagtgcaatgtgggatagaagtggtaagagtggcatccttgccttgttcctgatctttggagataaccaaggttttcatcgttaaatatgacgtgagctgtaagtttttcacagatgtcctttgtcagatgtcttttattcctagtttgatgagttttatcatgaatgagtactgaattttctcacaagctttttctgcactattggcatgatcatatggtttatttagttacattgattgagtcaatctggaataatgccatttggtcatgatttacctctttcttatattgatagaattgatttgctaatattttgtgaggatttttacatcaatgttcatggaggatattggtctttagttttctttcttttaattttttttttttatgagacagtctcactctgtcaccgaggctggagtgcagtggcacgtctcagcccactgcaacctctgcctcttgggttcaagtgattcttgtgcctcagccacctgagtagctgggattacaagcatgtgccactacacccagctaatttttttttttaaatctttggtagagatggggtttcaccatattggccagggtctcaaaatcctgacttaaaagtgatttgccaccttggcctcccaaagtgctgggattacagatgtgtgcccggcatctttcttgtaattctctgtctggttttgagtatgctggcttcataaaatgggttattctaatattatgaagagtttttgtagaattggtatcatttcatagatggcactgacttaccacaattattttctgtgtttttgtccttttcatctttgaaatgcctgtgaagtccacttgtccatgatgctttacactgcaatgatttaaaataaatctggcaaacagctaatttcctttttctgtcttaaaacctttgcaactctcataatcatggaaatctaaaaacactgtttaagaaataagaattattggccaggcacagtggctcacgcctgtaatcccagcactttggggtgctgaggcgggcatatcactgaggtcaggagtttgagaccagcctggccaacatggtgaaaccctgtctctatgaaaaatacaaaaattagctggacatggtggtgggcacctgtagtcccagctacttgggaggctgaggcaggggaatcgcttgaacctgggaggcagaggttgcagtgagccgagatcgtgctgctgcactccagcctgggcgacagagcgggactccatctcagaatgaatgaatgaatgaatgaatgaatgaatgaataaaatttagtgttacaaagagttataagtttatattaaatattcaaacactacagtagggaacattttgggtagttttcaagtaacctaacgttacgatctcctaacaaggttaacaacaatacacagaatcaggttttgaaaccgtcaattgaaggacattttttgtttctaaaacttagaataccatttataggatttgtgtaaaatatacaatgcttctacttgtaagagtcacccacacccattatgtctgctactcaaaacataaaaacagaaaataagtgttgataaggatgttgagaaattgcaacccttgtgcactgatggtggagttgtaaaatggttcggccactgtggaaaaacagtatggtggctccttaaaaagttaaaaatagaatgactatatgatccaacaattccgtttctgggtataaagaaaaaagagttctgaagacatatttgtatacccatgtaaatagtgacaatattcacaatagtcaaagggtagagacaactctagtatccactgatggatgaatggataaataaaatatatacagtatatacacatacacaatggaatattattcagccttaaaaaggaaggaaattctgcaatatattacaacatagacgaaccttgaggacattatgctaagtgaaataagctagtcacaaagagacaaatattgcatgattctacttataaaaggtacagtaccttgaatgtcaaatgcagagagacaaaaggtagaacagtagttctcaggggctggttgaatagaggagtggggagttgtttaatgggtatagaattttagttttgtaaggttaaagaagtgctggaggttggttgcacaccactggaaatgtattttatcgctactgaaccgtatacttaaaaacgagatggtaaattttgttgtgtgtgtgtgggtgtttttaagtgactcaccattagtagtataccagctatgaacacacacttatatcatggcaagaactaataagcaagatcatgaccacttctctcctatgtttctgtcccagtatgggaatactgaccttaacctttaatactatgtctcagtgttcagtgctgtttgtgttgctggattccttcaaatcagcaatgtgtttatgttgattgctaagctttaattctcaccggagaattataatatctttcctattttcctgattttattactgatttttcttgggattcaaaatttgggaaaacaaaaagtttctcaagaaatgctggaaaggaaatcccacttggaaacactaaccaaaacgtttgcaagcaaaataaagcaatagataaaatggatcagttgaggttatactaggagtataagatgatttaaccttagaaaatcaaacagtgtagttcactacattaacagattcaaggaaaataatcatcatcaataaatgcagataaactgctaaaattcaccatctgtaataaaacctcacagcagcctagggacagaaaggaacttctttaatctgataagggaaatacacacattaaaaaaaaaaaaaacaaaaccctgcagcaaacagtaaatttaaaggtaaacacttacacttttatctttgagatgaggcacaggactagaatgtcccaatattctactgatgattgtgctaaagagaggtcctagccagtaaaatgaggcaaggaaaaaaaaaaagcaaacagtatagattggaatatgatctaacaattccatttctgacattattcatagatgatatgattatatacatagaaaatccaaacattactcatagatgatatgactatatatatagaaaatccaaaagaatccagatatatttctagaaagaattaaaagagcttactgtggttactggatagaaaaatcaatatgtaaaaactaattttaattctaacagtaataattaggaaaaacttatgaaaaaaatgtcctttataagaacatttaaaaaaacaaagtgcttaggaataaacatagtaaaactatacaagatctctgcaaggaaaactaaaacttaactgagtgacattaggaacaagggaaaatccctacctgaaagatttaaccttaatgaaaacactaataaaaatgtctgtcaaccaaaaaaactccattaagagaatgaagagacaagctacagaattggaaaagatgttagctaagatgttacataaccaacaaaggatcagtagaaatatcagcaaagaatacgtacaggcagttcatcagagaaaatcatactgactaacaagtgtatactaaaacatttaatctccctagtaattagtgaggtacaaattaaaatgagacatgataccattttgttcccatcaaaataacaataactttattttgaaaatatcaagtgaggcagcaaaatcacccctggttaagaaccactgcttttggatcatacacaatgaaagtatatatttctacatactgttgtacataaaactgtgtatgctgtacttttaatggcaaagggatttttcagaggataatgtctattatgagatctccttacttaccaaattctgagtcattataatctttgtggaaactttgactccactatatttatgcaaaatgcattttgttaaaatctaggcaaaagagactaaaactccagaggactgaatttattttaaaaatatgataaacaggtaaaaaactttgcatttaggataccaggatctttgcacttgtcatattctagtacagatcttttaggctagaaatgtcaactagatcactttctaggcccaaagaaagaacattcatatttgcctttttgtcaggaggcgactaagaaacactactaggatatttagactgagatgcagcattatcagactggttgtgcaataggctccccggttcacactgcgtggtcagttgcctatcctcctcagattgggagctttatataggcagactatgcctgccttgctcactgctttctccttagaacgagtcccatgcctggcacacagaacacacaaatatttgaataaagtgaatgagtcttagtatatgcttttagaattatttattcaaaaacactttataataaattcaggtaacagtaaagtaatacattcaatagtactaaaatctatagaaaatagataatttcattaaggtgcaattaaaatacttgaaattgggacacatctctatatttcaaaccaatatactggctttctttttaaaagactattctagtctttacgatgtccaaagtttttcctctttgcttttatttgctttagaccatatttaaatttttagcattcctaagtgcatacattttaggcatatactataatgaccaagagtttgtgaacctactgattaggtaaacactttggggaggtatgacctgcacaaagtagggtgggaaagctattatctcccttaatctggacacaactgttcaagcagtctataatttattagcttctctgatagcttcactatttggttttcattgaccttttgagcaactgactggcaaaccccagattcttttcgcctgaaatcttttcaagttagatactgtccatattacacttgtacttataatttactatcttcttgccttggacaacttatttctccaaattctgatttctccagcagtgtattgggatagtatcactaatcttgcaaagtaaagatcagaaatgctgtacataatatgggtcagtgacttagcatacaacaactattctatgattaatattttcaaaatctaactactcctcatttgtccttggcagttttctatcttagtcatttgcagaaagagttccagcttgccaaaacctttttttttttttttttgaggcagagtcttgttctgtcgccaaggctggaatacaatggcaaccctgtctttactaaaattacaaaaaaaaaatcttttataatcttaattctgtcatctgtgaattagttatttctcctaggcttgtgatctgtatgtaaatttgataaacttttcaaagccattgattagaatacttgaacagaacaggagcctcatagcataccatgcaaggctaaagagtagattaatgatgttattcaaagctctctggatgcaacaactagcaagaattagctacaaattcatttatctatactattatctagttgataatttctaatttcacccatgaagatttcagggctttcttaaagacattttaagtttactgcatttccttgatttactatagtaataaaactaccaatatataccaaatattcatttaggcagcttgtaagaaaaagatacaccaaggtaagtttgtaatttgaaatgcaaagtaatattctgaacagttctccagaagtcaaaccaagaaatttatagtccaaaaagttctggagattggttttaggggaggggaaggtgaggagatcaaatatgaatgagtgcctgccattggcaataaaaagaaatgccaactcttcataagaaaaaaatttatataaccttcaaggtccaaatacgaggagaaagctcaatcacccatttgttaatctccgcagctgggatgaacattttcctaaggatggagaagagattatactcactaatacacgagtcagtagttttactttcaggtggctttttatctgatgtttatcttatatgatgacagctgggggacagagaaatgttccacttctacctatgtatcaaactagatacctaagcccttcccttccaacagaacacagagaaatgctggataaaatgtagaaaacattcttttaaatacatagcagaacttacaagaaaggggaaatccttacggtcaaaaatgaggggaatgaggccgggcgcggtggctcacacctgtaatcccagcactttgggaggccgaggagggtggatcacgaggtcaagcgatcgagaccatcctggctaacacggtgaaactccgtctctaataaaaatacaaaaaattagccgggcgtgttggcacacgcctgtagtcccagctactcaggaggctgaggcaggagaattgcttgaacccaggaggcagaggtttcagtgagctgagatcatgccactgcactccagcctgggtgacagagcaagactctgtctcagaaaaaaatgaggggaatgaaaaaccagagaggtgaatatgtgagctgatgctgtagctgtcctggaacaatttgccagtctcattaacccacggcttttagcttagacatctatatggggagcaaagaacccagggcttgccaaaggcaggcagtgggaattaaatgtacctccttccacccctgccataaaggtgggacacatggaagcttatactctcagtgaaaaaggcatcaatcaaatattctgcccactagcacaaggagatgaggaggaagtgtgtttgccttggcctgggaaatctcctatcagtatttatgctacacttcaggtatggaaaccctaaagccaagaaattaaaataagaatgggcttgtgtgcagcaacagccctgggaatatgacataaacagacactcaagattcccatagataaagccttgctgaaaataaactcacttttcaaaaagacaaaactggatgaacagcctatcaaatacaaaaatcaacagatataaacagcaggaactaaatttaatagaactattacagtgtctatcaagtacagacatttaaaataattagtgacataaaaaacattaaaaaaacattaaaaatgacatcaagaaacagagatctgaaaaatgatgcataattagaaatgaaaaacaatttctgaaagaagaagcccaatggatagggtaaaagagattatatacatctgacaagagaattcatgaactagaaggcaatctatgaagttatcacagaaagataacatacatggacagtacagaagggcttaaaagataaagagaatagaatgagaagttttaatacacacttaaaaaaatagtaactacactaactgtgtctttgaaatttgttctccataacaacttcattatttagtaacactgagtgatcttactaggaaaaatccaaataagtttctgttttttttttttttttttgagatggagtttcgctcttgtcacccaggctggagtgcaatggcatgattttggcccacagcaaccttcacctcccaggttcaagagattctcctgcctcagcctctcgagtagctgggattacaggtgcccgccaccatgctcggctaatttttgtatttttagtagagacagggtttcaccatactggccaggctggtctcttggccaggctggtctcgaactcctgaccttgtgatccgctcacctcggcctcccaaagtgctgggattacaggcgtgagccgctgcgcccagcccgaatgaccattatttctaaagagtgaaagcagagatgttccttaagaccatcaaaacatttttgagtggtgattaaatcaagtattaaaaccaacattcaaaaaaacccacaatagttcacttaaatattaatccctacttaaagtatgttggcaggttaaaaataaaggctaaaatataatttctaaaggctgaatgaaagggtaattcatatactgaagatcacacccaagctttccatcctgggaaaagtcggctgagatttttggggtctatggcctgctgtatgagcaaattcacttgtccaccaacactgagcacagtgccttcttccactcctttcagtttctcttgtagtctcattaagacacgttcagctactttgttgaaactctggtcaatatcactaaggacaaaaacacaaaggtttcagtgaggtgaacagtttaaaggccttgggaataagaaaatctgaaaaactgacaacaggaccttcttaaaatactgctcacctgagatttcgtttgcattcttggtcatctgcattcagagtagggtgaagctcagtttcatcttccggcctctgctgtaaatacaaagctttcaaaggattcatggtccagtcaaagagtggatcatatagaaggacctaaacagagagaacatatgtattaaaagaacaatgtacattttaatcacatacttagaaacagtagaaccagtatcatacaaataagccagtcacatggtagttgatgggggaggggaacaaacatcatgcacacttcatgtttccttgaggaaactatcctagcataatgctccaagcttctcatttcattctgaattcattcttcctccatggttaggggtgacatcccttgacccatgtttcctgactggatgaaactaatctattaaaaggttagtcactttctttccttctctctctactcttaaccctgggttagtgtatttgctttgtagggcccaattcttcctcagcccaggctgtctcaaggtatagattgggatgtgggaactggagagcaccagcaagcctatttggacctcactcctaagccgtcttctccaatagttttatcagtaacaaatctgaaattctgatctccaccctattcctatggctctttttctctcagttctaaatctgggtggatccagaaaggtataatttgttgaaacctcctcaaaacccaaggtttggtgctgcgtttggaatcttgagatatatattaggtgtagaattaggataccaaaacaactgacatggctagagcaagtagctttaggtcgtaaattttagaaagtgagttcatgaggaatttctgatattggcagttcagaacagctaactgctctggtatttataaacacagaactttaaaaaaaataggctttagcaaatgcttacaaatcttagtaataagtggagacaatataaagaatgattctacagggcattccagtattacaaggttggaacacttttttgctgctatctgtatacagtttctcagtaaatctgcaggttgggactataaaatgcctttagcagatttagtttcaggacacgtactagattagcagaaccaaaatcgctctattttttaatgctgttttgagtgtcctccaggaccattaaatactgtggagaaactgagcttgattacatgtagcttgtccgttaagttcaaggtttcctatgtgacttcaagttgggcactgacatggctttagatttcagagatccaaaccagtttcacccacaaaagggaaatattaatatattttattaatgaactaatgaaaaggaatgaaggcctctaatacagactagatggttttcttgggttgaagtagaagaaaaatctaaattacttcaaaaccaagggcttgtgtcaggaatcatacttgcaaatattagaattaaggaggaactggaataagtaaaaaattatgtttcagtctgacaagacagaagtggttggaaacagtaaaggaatacagactgattaagctagagcagggtttctcagtctcagcactattgtcattttggatggggtatttctttgctgtgggggctaacttgtacattctgaggtgttcagcagcatccctggcctctacccagtagatgccaatactatcctcatctcccatccccaattgtgacaataaaaatgcctccagacattgccaactgtcctctaggggacaaaactgctcttggctaagcatcactgagttagagggagagatatatttccttagcataacacataaaatcttagaggagagaatggtccattaggaagaaaataaaatcttgaaggccaggagagacaaatacactgaaaagaaaagggaaatacacccaggttaaagtgctctgaaggaggggcttaggaagcggggagatcagttcagaaatagtgactgtgcctcaatgaaatctaagagaagaaaagaaatgaatccaagagaggaaagatatgatgtcccagaggactgggaaccaggatgctaattgagaagcaccctcctaaagctgaaggcagaaagggtcttactgtggtaagatcactgggaaaattattcttgaagattggaacaatcacaccaaatgattttgggaaattcggacagatttacggagggaagattaggtagatgagtgtaaaatacacaaagcattggagggtgtgttttttttgtttgtttgttttgttgtttgtttttttagttttttttaaattatacttttatgttttagggtacatgtgcacattgtgcaggttagttacatatgtatacatatgccatgctggtgcgctgcacccactaactcgtcatctagcattaggtatatctcccaatgctatccctccccccaccccccaccccaccacagtccccagagtgtgatattccccttcctgtgtccatgtgttctcattgttcaattcccacctatgagtgagaatatgcggtgtttggttttttgttcttgcgatagtttactgagaatgatgatttccaatttcatccatgtccctacaaaggacatgaactcatcattttttatggctgcatagtattccatggtgtatatgtgctacattttcttaatccagtctatcattgttggacatttgggttggttccaagtctttgctattgtgaataatgccgcaataaacatacgtgtgcatgtgtctttatagcagcatgatttatagtcctttggttatatacccagtaatgggatggctgggtcaaatggtatttctaattctagatccctgaggaatcgccacactgacttccacaatggttgaactagtttacagtcccaccaacagtgtaaaagggttcctatttctccacatcctctccagcacctgttgtttcctgactttttaatgactgccattctaactggtgtgagatggtatctcattgtggttttgatttgcatttctctgatggccagtgatgatgagcattttttcatgtgttttttggctgcataaatgtcttcttttgagaagtgtctgttcatgtccttcacccactttttgatggggttgtttgtttttttcttgtaaatttgtttgagttcattgtagattctggatattagccctttgtcagatgagtaggttgcgaaaattttctcccattttgtaggttgcctgttcactctgatggtagtttcttttgctgtgcagaagctctttagtttaattagatcccatttgtcaattttggcttttgttgccattgcttttggtgttttggacatgaagtccttgcccatgcctatgtcctgaatggtaatgcctaggttttcttctagggtttttatggtattaggtctaacgtttaagtctttaatccatcttgagttaatttttgtatcaggtgtaaggaagggatccagtttcagctttctacatatggctaaccagttttcccagcaccatttattaaatagggaatcctttccccattgcttgtgtttctcaggtttgtcaaagatcagatagttgtagacatgcggcgttattcgaacggctctgttctgttccattgatctatatctctgttttggtaccagtaccatgttgttttggttactgtagccttgtagtatagtttgaagtcaggtagtgtgatgcctccagctttgttcttttggcttaggattgacttgccgatgcgggctcttttttggttccatatgaactttaaagtagttttttccaattctgtaaagaaagtcattggtagcttgatggggatgccattgaatctgtaaattaccttgggcagtatggccattttcacaatattgattcttcctacccatgagcatggaatgttcttccatttgtttgtatcctcttttatttccttgagcagtggtttgtagttctccttgaagaggtccttcacatcccttgtaagttggattcctaggtattttattctctttgaagcaattgtgaatgggagttcactcatgatttggctctctgtttgtctgttgttggtgtaaaagaatgcttgtgatttttgtacattgattttgtatcctgagactttgctgaagttgcttatcagcttaaggagattttgggctgagacagtggggttttctagatatacaatcatgtcatctgcaaacagggacaatttgacttcctcttttcctaattgaataccctttatttccttctcctgcctgattgccctggccagaacttccaacactatgttgaataggagtggtgagagagggcatccctgtcttgtgccagttttcaaagggaatgcttccagtttttgcccattcagtatgatattggctgtgggtttgtcatagatagctcttattattttgaaatacgtcccatcaatacctaatttattgagagtttttagcatgaagggtttttgaattttgtcaaaggctttttctgcatctattgagataatcatgtggtttttgtctttggttctgtttatatgctggattacatttattgatttgcatatattgaaccagccttgaatcccagggatgaagcccactggatcatggtggataagctttttgatgtgctgctggattcgttttgccagtattttattgaggatttttgcatcaatgttcatcaaggatattggtctaaaattctcttttttggttgtgtctctgcccggctttggtatcagaatgatgctggcctcataaaatgagttagggaggattccctctttttctattgattggaatagtttcagaaggaatggtaccagttcctccttgtacctctggtagaattcagctgtgaatccatctggtcctggactctttttgtttggtaaactattgattattgccacaatttcagctcctgttaactggtctattcagagattcaacttcttcctggtttagtcttgggagagtgtatgtgtcgaggaatttatccatttcttctagattttctagtttatttgcgtagaggtgtttgtagtattctctgatggtagtttgtatttctgtgggatcggtggtgatatcccctttatcattttttattgtgtctatttgattcttctctcttttttctttattagtcttgctagcggtctatcaattttgttgatcctttcaaaaaaccagctcctggattcattaattttttgaagggttttttgtgtctctatttccttcagttctgctctgattttagttatttcttgccttctgctaacttttgaatgtgtttgctcttccttttctagctcttttaattgtgatgttagggtgtcagttttggatctttcctgctttctcttgtgggcatttagtgctataaatttccctctacacactgctttgaatgtgtcccagagattctggtacgttgtgtctttgttctcgttggtttcaaagaacatctttatttctgccttcatttcgttatgtatccagtagtcattcaggagcaggttgtttggtttccatgtagttgagcggttttgagtgagattcttaatcctgagttctagtttgatgtcactgtggtctgagagatagtttgttataatctctgttcttttacatttgctgaggagagctttacttccaactatggggtcaattttggaataggtgtggtgtggtgctgaaaaaaatgtatattctgttgatttggggtggagagttctgtagatgtctattaggtccgcttggtgcagagctgagttcaattcctgggtatccttgttgactttttatctcgttgatctgtctaatgttgacagtggggtgttaaagtctcccattattaatgtgtgggattctaagtctctttgtaggtcactcaggacttgctttatgaatctgggtgctcctgtattgggtgcatatatatttaggatagttagctcttcttgttgaattgatccctttaccattatgtaatggccttctttgtttcttttgatctttgttggtttaaagtctgttttatcagagactaggattgcaacccctgcctttttttgttttccatttgcttggtagatcttcctccatccttttattttgagcctatgtgtgtctctgcacgtgagatgggtttcctgaatacagcacactgatgggtcttgactctttatccaatttgccagtctgtgtcttttaattggagcatttagtccatatacatttaaagttaattttgttatgtgggagtttgatcctgtcattatgatgttagctggtgattttgttcgttagttgatgcagtttcttcctagtctcgatggtctttacattttggcatgattttgcagtggctggtaccggttgttcctttccatgtttagtgcttccttcaggagctcttttagggcaggcctggtggtgacaaaatctctcagcatttgcttgtctgtaaagtattttatttctacttcactgatgaagcttagtttggctggatatgaaattctgggttgaaaattcttttctttaagaatgttgaatattggcccccactctcttctggcttgtagggtttctgccgagagatccgctgttagtctgatgggcttccctttgagggtaacccgacctttctctctggctgcccttaacattttttccttcatttcaactttggtgaatctgacaattatgtgtcttggagttgctcttctcaaagagtatctttgtggcattctctgtatttcctgaatctgaacgttggcctgccttgctagattggggaagttctcctggataatatcctgcagagtgttttccaacttggttccattctccccatcactttcaggtacaccaatcagacgtagatttggtcttttcacatagtcccatatttcttggaggctttgctcatttctttttattcttttttctctgaacttcccttctcgcttcatttcattcatttcatcttccatcgctgataccctttcttccagttgatcgcatcggctcctgaggcttctgcattcttcacatagttctcgagccttgattttcagctccatcagctcctttaagcacttctctgtattggttattctagttatacattcttctaaatttttttcaaagttttcaacttatttgcctttggtttgaatgtcctcccgtagctcagagtaatttgatcgtctgaagccttcttctctcagctcgtcaaagtcattctccatccagctttgttccgttgctggtgaggaactgcgttcctttggaggaggagaggtgctctgcgttttagagtttccagtttttctgctctgttttttccccatctttgtggttttatctacttttggtctttgatgatggtgatgtacagatgggtttttggtgtggatatcctttctgtttgttagttttccttctaacagacaagaccctcagctgcaggtctgttggagtaccctgccgtgtgaggtgtcagtgtgcccctgctggggggtgcctcccagttaggctgctcgggggtcaggggtcagggacccacttgaggaggcagtctgcctgttgtccgatctccagctgcgtgctgggagaaccactactctcttcaaagctgtcagacagggacatttaagtctgcagaggttactgctgtctttttgtttgtctgtgccctgcccccagaggtggagcctacagaggcaggcaggtctccttgagctgtggtgggttccacccagttcgagcttccaggctgctttgtttacctaatcaagcctgggcaatggcgggcgcccctcccccagcctcgctgccaccttgcagtttgatctcagactgctgtgctagtaatcagcgagactccgtgggcgtaggaccctccgagccagctgcgggatataatctcgtggtgcgccgttttttaagctggtccaaaaagcgcaatattcgggtgggagtgacccgattttccaggtgccgtctgtcacccctttctttgactaggaaagggaactccctgacccttgcgcttcccaagtgaggcaatgccttgccctgcttcagttcgcgcacagtgcgtgcacccactgacctgcgcccactgtctggcgctccctagtgagatgaacctggtacctcagatggaaatgcagaaatcacctgtcttctgcatcgctcacgctgggagctgtataccggagctgttcctattcggccatcttggctcctcctcc

SEQ ID NO: 10446 - DNA, 12541 bp, Homo sapiens
tttattttattttattattattatactttaagttttagggtacatgtgcacagtgtgcaggttagttacatatgtatacatttgtcatggtggtgtgctgcacccattaactcgtcatttagcattaggtatatctcctaatgctatccctccccatccccccacaacagtccccggagtgtgatgttccccttcctgtgtccatatgttctcattgttcaattcccacctatgagtgagaatatgcagtgtttggttttttgttcttgtgatagtttacgagaatgatgatttccaatttcatccatgtccctgcaaaaggacatgaactcatcattttttatggctgcatagtattccatggtgtatatgtgccacattttcttaatccagtctatcattgttggacatttgggttcgttccaagtctttgctattgtgaatagtgccgcaataaacatatgtgtgcatgtgtctttatagcagcatgatttatagtcctttggatatatacccagtgatgggatggctgggttaaatggtatttctggttctagatccctgaggaatcgccgcactgacttccacaatggttgaactagtttacagtcccaccaacagtgtaaaaatgttcctatttctccacatcctctccagcacctgttgtttcctgacttttaaatgattgccattctaactggtgtgagatggcatctcattgtggttttgatttgcatttctctgatggccagtgatgatgagcattttttcatgtgttttttggctgcataaatgtcttcttttgagaagtgtctgctcatatactttgcccactttttgatggggttgtttgttttttccttttaaatgtgttggagttcattgtagattctggatattagccctttgtcagatgagtaggttgcaaaaattttctcccattttgtaggttgcctgttcactctgatggtagtttcttttgctgtgcagaagctctttagtttaattagatcccatttgtcaattttggctttggttgccattgcctttggtgttttagacatgaagtccttgcccatggctatgtcctgaatggtattgcctaggttttcttctagggtttttatggttttaggtctaacgtttaagtctttaatccatcttgaattaatttttgtataaggtgtaaggaagggatccagtttcagctttctacatatggctagccagttttcccagcaccatttattaaatagggaatcctttccccattgctcatttttctcaggtttgtcaaagatcagatagttgtagatatgcagcgttatttctgagggctctgttctgttccattgatctacatctctgttttggtaccagtaccatgctgttttggttactgtagccttatagtatagtttgaagtcaggtagcgtgatgcctccagctttgttcttttggcttaggattgacttggcaatgcaggctcttttttggttccatatgaactttaaagtagtttttccaattctgtgaagaaagtcattggtagcttgatggggatggcattgaatctataaattaccttgggcagtatggccattttcacgatattgattcttcctacccatgagcatggaatgttcttccatttgtttgtatcctcttatttcattgagcagtggtttgtagttctccttgaagaggtccttcacgtcccttgtaagttggattcctaggtattttattctctctgaagcaattgtgaataggagctcactcatgatttggctctctgtttgttattgctgtataagaatgcttgtgatttttgcacattgattttgtatcctgagactttgctgaagttgcttatcagcttaaggagattttgggctgagacaatggggttttctagatatacaatcatgtcatctgcaaacagggacaatttgacttcctcttttcctaaatgaatactctttatttccttctcctgcctgattgccctggccagaacttccaacactgtgttgaataggagtggtgagagagggcatccctgtcttgtgccagttttcaaagggaatgcttccagtttttgccctttcagtatgatattggctgtaggtttgtgatagatagctcttatcattttgaaatatgtcccatcaatacctaatttattgagagtttttagcatgaagggttgttgaattttgtcaaaggccttttctgcatctattgagataatcatgtggtttttgtctttggttctgcttatatgctggattacatttattgattttcatatattgaaccatccttgcatcccagggatgaagcccacttgatcatggtggataagctttttgaggtgctgcttgattcagtttgccagtattttattgatgatttttgcaccaatgttcatcaaggatattggtctaaaattctctttttttgttgtgtctctgcctggctttgatatcaggatgatgctggcctcataaaatgagttagggaggattccctctttttctattgattggaatagtttcagaaagaatggtaccaattcctccttgtacctctggtagaattcagctgtgaatccatctggtcctggactctttttagttggtaagctattgattattgccacaatttcagagtctgttattggtctattcagagattcaacttcttcctggtttagtcttgggagggtgtatgtgtcgaggaatttatccatttcttctagattttctagtttatttgtgtagaggtgtttgcagtattctctgatggtagtttgtatttctgtgggatcggtggtgatatcccctttatcattttttattgcgtctatttgattcttctctcttttttctttattagtcttgctagcggtctatcaattttgttgatcctttcagaaaaccagctcctggattcattaattttttgaagggttttttgtgtctctatttccttcagttctgctctgattttagttattttttgccttctgctagcttttgaatgtgtttgctcttgcttttctagttcttttaattgtgatgttagagtgtcagttttggatctttcctactttctcttgtgggcatttagtgctataaatttccctctacatactgctttgaatgtgtcccagagattctggtatgttgtgtctttgttctcgttggtttcaaagaacatctttatttctgccttcgtttggttatgtacccagtagttattcaggagcaggttgttcagtttccatgtagttgagcggttttgagtgagtttctgaatcctgagttttagtttgattgcactgtggtctgagagagagtttgttataatttctgttcttttacgtttgctgaggatagctttacttccaactatgtggtcaattttggaataggtgtggtacggcgctgaaaaaaatgtatattctgttgattttggggtggagagttctgtagacttctattaggtctgcttggtgcagagctgagttcaaatcctgggtatccttgttgactttctgtctcgttgatctgtctaatgttgacagtggagtgttaaagtctcccattattattgtgtgggagtctaagtctctttgtaggtcactcaggacttgcattatgaaactgggtgctcctttattgggtgcatatatatttaggatagttagctgttcttgttgaattgatgccttgaccattatgtaatggccttctttatctcttttgatctttgttggtttaaagtctcttttatcagagactaggattgcaacccctgactttttttgttttctattttcttggtagatcttcctccatccttttattttgagcctatgtgtgtctctgcacatgagatgggtttcctgaatacagcacactgacgggtcttgactctttatccaatttgccagtctgtgtcttttaattggagcatttagtccatttacttttaaagttaatattgttatgtgtgaatttgatcctgtcattttgatgttagctggttattttgctcgttagttggtgcagtttcttcctagcctcgatggtctttacaatttggcatgattttgcagtggctggtaccagttgttcctttccatgtttagtgcttccttcaggagctcttttagggcaggcctggtggtgacaaaatctctcagcatttgcttctctgtaaagtattttatttctccttcacttatgaagcttagtttggctggatatgaaattctgggttgaaaattcttttctttaagaatgttgaatattggcccccactctcttctggcttatagagtttctgccgagagatccgttgttagtctgatgggcttccctttgtgggtaacccgacctttctctctggctgcccttaacattttttccttcatttcaactttggtgaatctgacatttatgtgtcttggagttgctcttctcgaggactatctttgtggtgttctctgtatttcctgaatctgagtgttggcctgccttgctagattggggaagttctcctggataatatcctgcaggctgttttccaacttggttccattctccccgtcactttcaggtaaaccaatcagacatagatttggtcttttcacatagtcccatatttcttggaggctttgtttgtttcttttaatttttttttctctaaacttcccttcttgcttcatttcattcatttcatcttccatcgctgataccctttcctccagttgatcgcatcagctcctgaggcttctgcatccttcacgtagttctcgagccttggctttcagctccatcagctcctttaagcacttctctctattggttattctagttatacattcgtctaaatttttttcaaagttttcaacttctttgcctttggtttggatttcctcctgtagctcggagtagtctgatcgtctgaagccttcttctctcaatttggcaaagtcattctccgtccagctttgttccattgctggtgaggaactgtgttcctttggaggaggagaggcactctgctttttagcgtttgcagtttttctgctctgttttttccccatctttgtggttttatctacttttggtctttgatgatggtgacgtacagatgggtttttgatgtggatgtcctttctgtttgttagttttccttctaacagacaggaccctcagctgcaggtcttttggagtttgctagaggtccactccagaccgtgtttgcctgggtaacagcagtggtggctgcagaacagcagattaccgtgaaccacgaatgctgctgtctgatcgttcctctggaagttttgtctcagaggagtacctggccttgtgaggtgtcagtctgcccctactggggggtgcctcccagttaggctgcttggaggtcaggggtcagggacccacttgaggaggcaatctgcccattctcagatctccagctgcatgctgggagaaccactgctctcttcaaagctgtcagacagggacatttaagtctgcagaggttactgttgtctttttgtttgtctgtgccctgcccccagaggtggagcctacagaggcaggcaggcctccttgagctgtggtgggctccacccagttcgagcttcctggctgctttgtttacctaagcaagcctgggcaatggcgggcgcccctcccctagccttgctgccgccttgcagttggatctcagactgctgtgctagcaatcagcgagactttgtgggcgtaggaccctccgagccaggtgcgggatataatctcctggtgtgccattccttatgcccgtcggaaaagtgcagtattagggcgggagtgacccaattttctaggtgctgtctgtcacccctttctttgagtaggaaagggaactccctgaccccttgcacttcccgagtgagacaatgcctcgccctgctttgactcgtgcacggtgcactgcactcactgtcctgcgtccactgtctgccactccctagtgagatgaatccggtacctcagatggaaatgcagaaatcacccgtcttctgtgtcgcacatgctgggagctgtagaccggagctgttcctattcggccatcttggctgctgcctctgaaatttcctaaagaagaaggaattctcctgaagactgcaatgtagaaaccctgcctgagtttccagcctgatgctctggaatttggactcaagactgcaaactcaactctttcctaaattcccagcctggtagctcagcctgccctgcaagtttgggacttgacagcctcaagatcacatgacaatttctttttttttttttttttttactacatcattaagacttatttaatgctgagtctaaatacaaatccaagtgccccgtctgttcccataaaaatgttcatatttgtgttcttttttttttttttttactttgtgttttgttacttttaccttttctttctttttttttattattatactttaagttttagggtacatgtgcacattgtgcaggttagttacatatgtatacatgtgccatgctggtgcgctgcacccactaactcgtcatctagcattaggtatatctcccgatgctatccctccctgctcccccgaccccacagcagtccccagagtgtgatattccccttcctttgtccatgtgatctcattgttcaattcccacctacgagtgagaatatgcggtgtttggttttttgttcttgcgatagtttactgagaatgatgatttccaatttcatccacatccctacaaaggacatgaactcatcattttttatggctgcatagtattccatggtgtatatgtgccacattttcttaatccagtctatcattgttggacatttgggttggttccaagtctttgctattgtgaataatgcagcaataaacatacgtgtgcatgtgtctttatagcagcatgatttacagtcctttggatatatacccagtaatgggatggctgggtcaaatggtatttctagttctagatccctgaggaatcgccacactgacttccacaatggttgaactagtttacagtcccaccaacagtgtaaaagtgttcctatttctccacatcctctccagcacctgttgtttcctgacttttaaatgattgccattctaactggtgtgagatggtatctcattgtggttttgatttgcatttctctgatggccagtgatgatgagcattttttcatgtgttttttggctgcataaatgtcttcttttgagaagtgtctgttcatgtccttcgcccactttttgatggggttgtttgtttttttcttgtaaatttgtttgagttcattgtagattctggttattagccctttgtcagatcagtaggttgtgaaaattttctcccattttgtaggttgcctgttcactctgatggtagtttcttttgctgtgcagaagctctttagtttaagtagatcccatttgtcaattttggcttttgttgctattgcttttggtgttttagacatgaagtccttgcccatgcctatgtcctgaatggtaatgcctaggttttcttccagggtttttatggttttaggtctaacgtttaagtctttaatccatcttgaattgatttttgtataaggtgtaaggaagggatccagtttcagctttctacatatggctagccagttttcccagcaccatttattaaatagggaatcctttccccattggttgtttttgtcaggtttgtcaaagatcagaaagttgtagatatgcggcgctatttctgagggctccgttctgttccattgatctatatctctgttttggtaccagtaccatgctgttttggttactgtagccttgtagtatagtttgaagtcaggtagtgtgatgcctccagctttgttcttttggcttaggattgccttggcaatgcgggctcttttttggttccatatgaactttaaagtagttttttccaattctgtgaagaaagtcattggtagcttgatggggatggcattcaatctataaattaccttgggcagtatggccattttcacgatattgattcttcctacccatgagcatggaatgttcttccatttgtttgtatcctcttttatttccttgagcagtggtttgtagttctccttgaagaggtccttcacatcccttgtaagttggattcctaggtattttattctctttgaagcaattgtgaatgggagttcactcatgatttggctctctgtttgtctgttgttggtgtataagaatgcttgtgatttttatacattgattttgtatcctgagactttgctgaagttgcttatcagcttaaggagattttgggctgagacaatggggttttctagatatacaatcatgtcgtctgcaaacagggacaatttgacttcctcttttcctaattgaataccctttatttccttctcctgcctaattgccctggccagaacttccaacactatgttgaataggagtggtgagagagggcatccctgtcttgtgccggttttcaaagggaatgcttccaatttttgcccattcagtatgatattggctgtgggtttgtcatagatagctcttatcattttgaaatatgtcccatcaatacctaatttattgagagtttttagcatgaaccgttgttgaattttgtcaaaggctttttctgcatctattgagataatcatgtggtttttgtctttggctctgtttatatgctggattacatttattgatttgtgtatattgaaccagccttgcatcccagggatgaagcccacttgatcatggtggataagctttttgatgtgctgctggattcgttttgccagtattttattgaggatttttgcatcaatgttcatcaaagatattggtctaaaattctctttttttgttgtgtctctgcctggctttggtatcagaatgatgctggcctcataaaatgagttagggaggattgcctctttttctattgattggaatagtttcagaaggaatggtaccagttcctccttgtacctctgttagaattcggctgtgaatccatctggtcctggactctttggtttgtaagctattgattattgccacaatttcagctcctgttattggtcgattaagagattcaacttcttcctggtttagtcttgggagagtgtatgtgtccaggaatttatccatttcttctagattttctagtttatttgcgtagaggtgtttgtagtattccctgatggtcgtttttatttctgtgggattggtggtgatatcccctttatcattttttattgcatctatttgattcttctctctttttttctttattagtcttgctagcggtctatcaattttgttgatcctttcaaaaaaccaactcctggattcattaattttttgaagggttttttgtatctctatttccttcagttctgctctgatttaagttatttcttgccttctgctagcttttgaatgtgtttgctcttgcttctctagttcttttaattgtgatgttagggtgtcagttttggatcttttctgctttctcttgtgggcatttagtgctataaatttccctctacccaccgctttgaatgcgtcccagagattctggtatgttgtgtcttttttctcgttggtttcaaagaacatctttatttctgccttcatttcgttatgtacccagtagtcattcaggagcaggttgttcagtttccatgtagttgagtggttttgagtgagattcttaatcctgagttctagtttgattgcactgtggtctgagagatagtttgttataatttctgttgttttacatttgctgaggagagctttacttccaagtatgtggtcaattttggaatagctgtggtgtggtgctgcaaaaaaatgtatattctgttgatttggggtggagagttctgtagatgtgtattaggtccgcttggtgcagagctgagttcaattcctgggtatccttgttgactttctgtctcgttgatctgtctaatgttgacagtggggtgttaaagtctcccattattaatgtgtgggaatctaagtctctttgtaggtcactcaggacttgctttatgaaactgggtgctcctgtattgggtgcatatatatttaggatagttagctcttcttgttgaattgatcgctttaccattatgtaatcgccttctttgtctcttttgatctttgttggtttaaagtctgttttatccgagactaggattgcaacccctgcctttttttgttttccattggcttggtagatcttcctccatccttttattttgagcctatgtgtgtctctgcatgtgagatgggtttcctgaatacagcacactgacgggtcttgactctttatccaatttgccagtctgtgtcttttaattggagcatttagtccatttacatttaaagttaatattgttatgtgtgaatttgatcctgtcattttgatgttagctggtgattttgctcgttagttgatgcagtttcttcctagtctcgatggtctttacatattggcatgattttgcagcggctggtaccggttgttcctttccaagtttagtgcttccttcaggagctcttgtaaggcaggcctggtggtgacaaaatgtctcagcatttgcttgtctgtaaagtattttatttctccttcacttatgaagcttagtttggctggatatgaaattctgggttgaaaattcttttctttaagaatgttgaatattggcccccactctcttctggcttgtagggtttctgctgagagatccactgttagtctgatgggcttccctttgagggtaacccgacctttctttctggctgcccttaacattttttccttcatttcaactttggtgaatctgacaattatgtgtcttggagttgctcttctccaggactatctttgtggtgttctctgtatttcctgaatctgaatgttggcctgccttgctagattggggaagttctcctggataatatcctgcagagtgttttccaacttggttccattctccccatcactttcaggtacaccaatcagatgtagatttggtcttttcacatagtcccatatttcttggaggctttgctcatttctttttattcttttttctctagacttcccttctcgcttcatttcattcatttcatcttccatcactaataccctttcttccagttgatcgcatcggctcctgaggcttctgcattcttcacgtagttctcgagccttggttttcagctccatcatctcctttaagcacttctctgtattggttattctagttatacattcttctaaatttttttcaaagttttcaacttctttgcctttggtttgaatgtcctcccgtagctcagagtaatttgatcgtctgaagccttcttctctcagctcgtcaaagtcattctccatccagctttgttccgttgctggtgaggaactgcgttcctttggaggaggagagacgctctgcgttttagagttttcagtttttctgttctgttttttccccatctttttggttttatctacttttggtccttgatgatggtgatgtacagattggtttttggtgtggatgtcctttctgtttgttagttttccttctaacagacaggaccctcagctgcaggtctgttggaataccctgccatgtgaggtgtcagtgtgcccctgcttgggggtgcctcccatttaggctgctcgggggtcaggggtcagggacccacttgaggaggcagtctggccgttctcagatctccagctgtgtgctgggagaaccactgctctcttcaaagctgtcagacagggacatttaagtctgcagaggttactgctgtctttttgtttgtctgtgccctgcccccagaggtggagcctacagaggcaggcaggcctccttgagctgtggtgggctccacccagttggagcttcctggctgctttgtttacctaatcaagcctgtgcaatggcgggcgcccctcccccagcctcgctgccgccttgcagtttgatctcagactgctgtgctaggaatcagcgagactccgtgggcgtaggaccctccaagccaggtgcgggatataatctcgtggtgcgccgttttttaagccggtccgaaaagcgcaatattcgggtgggagtgacccgattttccaggtgcatccgtcacccctttctttgactccgaaagggaactccctgaccccttgcgcttcccaagtgagggaatgcctcgccctgcttcggctcacgcatggtgcacgcacccactgacctgcgcccactgtctggcattccctagtgagatgaacccggtacctcagatggaaatgcagaaatcacccgtcttctgcgtcgctcacgctgggagctgtagaccggagctgttcctatttggccatcttggctcctcccccgacaattt

SEQ ID NO: 10447 - DNA, 6070 bp, Homo sapiens
ttttgctgtattccataggttttgttttgttttttttatttttttatttttttattattatactttaagttttagggtaatgtgcacattgtgcatgttagttacgtatgtatacatgtgccatgctggtgcgcggcacccactaactcgtcatctagcattaggtatatctcccaatgctatccctaccccctccccccaccccacaacagtccccagagtgtgatgttccccttcctgtgtccatgtgatctctttgttcaattcccacctatgagtgagaatatgcggtgtttggttttttgttcttgcgatagtttactgagaatgatgatttccaatttcatccatgtccctacaaaggacatgaactcatcattttttatggctgcatagtattccatggtgtatatatgccacattttcttaatccagtctatcattgttggacatttgggttggttccaagtctttgctattgtgaataatgccgcaataaacacacgtgtgcatgtgtctttatagcagcatgatttataatcctttgggtatatactcagtaatgggatggctgggtcaaatggtatttctagttctagatccctgaggaatcgccacactgacttccacaatggctgaactagtttacagtcccatcaacagtgtaaaagtgttcctatttctccacatcctccccagcacctgttgtttcctgactttttaatgattgccattctaactggtgtgagatggtatctcattgtggttttgatttgcatttctctgatggccagtgatgatgagcattttttaatgtgttttttggctgcataaaggtcttcttttgagaagtgtctgttcatgtcctttgcccactttttgatggggttgtttgtttttttcttgtaaatttgtttgagttcattgtagattctcgatattagccctttgtcagatgagtaggttgcaaaaattttctcccattttgtaggttgcctgttcactctgatggtagtttcttttgctgtgcagaagctctttagtttaattagatcccatttgtcaattttggcttttgttgccattgcttttggtgttttagacatgaagtccttgcccatgcctatgtcctgaatggtattgcctaggttttcttgtagggtttttatggttttagctctaacgtttaagtctttaatccatcttgaattaatttttgtatgaggtgtaaggaagggatccagtttcagctttctacatatggctagccaattatcccagcaccatttattaaatggggaatcctttccccattgctggtttttctcaggtttgtcaaagatcagatagttgtagatatgtggcattaattttgagggctctgttctgttccattgatctatatctctgttttggttccagtaccatgctgttttggttactgtagccttgtagtatagtttgaagtcaggtagtgtgatgcctccagctttgttcttttggcttacgattgacttggcaatgcgggctcttttttggttccatatgaactaaaaatagttttttccaattctgtgaagaaaggcattggtagcttgatggggatggcattgaatctgtaaattaccttgggcagtatggccattttcatgatattgattcttcctacccatgagcatggaatgttcttccatttgtttttatcctcttttatttcattgagcagtggtttgtagttctccttgaagaggtccttcacatcccttgtaagttggattcctaggtattttattctctttaaagcaattgtgaatgggatttcactcatgatttggctctctgtttgtctgttgttggtgtataagaatgcttgtgatttttgtacattgattttgtatcctgagattttgctgaagttgcttatctgcttaaggagattttgggctgagacaatggggttttctagatatacaatcatgtcgtctgcaaacagggacaatttgacttcctcttttcctaattgaataccctttatttccttctcctgcctaattgccctggccagaacttccaacactatgttgaataggagtggtgagagagggcatccttgtcttgtgccagttttcaaagtgaatacttccagtttttgcccattcagtatgatattggctgtgggtttgtcatagatagctcttattattttgaaatacgtcccatcaatacctaatttattgagagttttgagcatgaagggttgttgaattttgtcaaaggtcttttctgcatctattgagataatcatgtggtttttgtctttggctctgtttatatgctggattacatttattgatttgcgtatattgaaccagccttgcatcccagggatgaagcccacttgatcatggtggataagctttttgatgtgctgctggatttggtttggcagtattttattgaggatttttgcatcaatgttcatcaaggatattgattggtctaaaattctcttttttggttgtgtctctgcccggctttggtatcagaatgatgctggcctcataaaatgagttagggaggattccctctttttctattgattggaatagtttcagaaggaatggtaccagttcctccttgtacctctggtagaattcggctgtgaatccatctggtcctggactcttttttgttggtaaggtattgattattgccacaatttcatatcctgttattggtctattcagagattcaacttcttcctggtttagtcttgggagagtgtatgtgtcgaggaatttatccatttcttcttgattttctagtttatttgcgtagaggtgtttgtagtattctctgatggtagtttgtatttccgtgggatcggtggtgatatcccctttatcatttttttattgtgtctatttgattcttctctctttttttctttattagtcttgctagtggtctatctattttgttgatcctttcaaaaaaccagctcctggattcattaattttttgaagggtttttgtgtctctatttccttcagttctgctctgattttagttatctcttgccttctgctagcttttgaatgtgtttgctcttgcttttctagttcttttaactgtgatgttaggatgtcaattttggatgtttcctgctttctcttgtgggcatttagtgctataaatttccctctacacactgctttgaatgcgtcccagagattctggtatgttgtgtgtttgttcttgttcatttcaaagaacatctttatttctgccttcatttcattatgtacccagtagtcattcagaagcaggttgttcagtttccatgtagttgtgcggttttgagtgagattcttaattctgagttctaatttgattgcactgtggtctgagagatagtttgttataatttctgttcctttacatttgctgaggagagctttactgccaactatgtgatcaattttggaataggtgtggtgtggtgctgaaaaaaatgtatattctgttgatttggggtggagagttctgtagatgtctattaggtccgcttggggcagagctgagttcaattcctgggtatccttgttgactttctgtcttgttgatctgtctaatcttgacagtggggtgttaaagtctcccattattaatgtgtgggagtctaagtctctttgtaggtcactcaggacttgctttatggatctgggtgctcctgtattgggtgcatatatatttaggatagttaactcttcttgttgaattgatccctttaccattctgtaatggtcttctttgtctcttttgatctttattagtttaaagtcggttttatcagagactaggattgcaatccctgcctttttttgttttccatttgcttggtagatcttcctccatccttttatttttagcctgtgtgtgtctctgcacgtgagatgggtttcctgaatacagcacactgatgggtcttgactctttatccaatttgccagtctgtgtcttctaattggagcatttagtccatttacatttaaagttaatattgttatgtgtgaatttgatcctgtcattatgatgttaggtggttattttgttcattagttgatgcagtttcttcctagtcttgatggtctttacattttggcatgattttgcagcagcttgtaccggttgttcctttccatgtttagcgcttccttcaggagctcttttagggcaggcctgttggtgacaaaatctttcagcatttgcttgtctgtaaggtattttatttctccttcacttatgaagcttagtttggctggatatttaattctgggttgaaaattcttttctttaagaatgttgaatattggcccccactctcttctggcttgtagggtttctgccaagagatccgctgttagtctgatgggcttccctttgagggtaacccgacctttctctctggctgcccttaacattttttccttcatttcaactttggtgaatctgacaattatgtgtcttggagttgctcttctcgaggagtatctttgtggtgttctctgtatttcctgaatctgaacgttggcctgccttgctagattggggaagttctcctggataatatcctgcagagtgttttccaacttggttccattctccccgtcactttcaggtacaccaatcagacgtagatttggtcttttcacatagtcccatatttcttggaggctttgttgatttctttttattcttttttctctaaacttcccttctcacttcatttcattcatttcatcttccatcaatgataccctttcttccagttgatcgcatcagctcctgaggcttctgcattcttcacgtagttcttgagccttggttgtcagctccatcactcctttaagcacttctctgtgttggttattctagttatacattcttctaaatttttttccaagttttcaacttctttgcctttggtttgaatgtcctcctgtagctcagagtaatttgatcgtctgaagccttcttctctcagctcgtcaaagtcgttctctgtccagctttgttccattgctggtgaggaactgcgttcctttggaggaggagaggcgctctgctttttagagtttccagtttttctgttctgttttttccccatctttgtggttttatctattttggtctttgatgatggtgatgtacagatgagtttttgatgtggatgtcctttctgtttgttagttttccttctaacagacaggaccctcagctgcaggtctgttggagtaccctgccgtgtgaggtgtcagtgtgcccctgctggggggtgcctcccagttaggctgctcgggagtcaggggtcagggacccgcttgaggaggcagtctgcccgttctcagatctccagctgcgtactgggagaaccactgctctcttcaaagctgtcagacagggacatttaagtctgcagaggttacagctttttgtttgtctgtgccctgcccccagaggtggagcctacagaggcaggcaggcctccttgagctgtggtgggctccacccagttcgagcttcctggctgctttgtttacctaagcaagcctgggcaatggtgggcgcccctgcctcagcctcactgccgccttgcagtttgatctcagactgcggtgctagcaatcagctagactctgtgggcgtaggaccctccgaagcaggtgtgggatataatctcatggtgtgccgttttttaagtccgttggaaaagcgcagtattcgggtgggagtgacccgattttccaggtgccgtccgtcacccctttctttgactaggaaagggaactccctgaccccttgcacttcccgagtgaggcaatgcctcaccccgcttcagctggcacacggtgtgcgcacccactgacctgcacccactgtctggcactccctagtgagacgaacccggtacctcagatggaaatgcagaaatcacccatcttctgcgtcactcaggctgggagctgtagaccggagctcttcctatttggccatcttggctcctccc

SEQ ID NO: 10448 - DNA, 6045 bp, Homo sapiens
gtattaattaaaatttttttttaatattattatactttaagttttagggtacatgtgcacattgtgcaggttagttacatgtgtatacgtgtgccatgctggtgtgctgcacccactaactcctcatctagcattaggtatatctcccaatgctatccctccccctccccccaccccacaacagtccccagagtgtgatattccccttcctgtgtccatgtgatctcattgttcaattcccacctatgagtgagaatatgcggtgtttggttttttgttcttgcgatagtttactgagaatgatgatttccaatttcatccatgtccctacaaagtacatgaactcatcattttttatggccgcataatattccatggtgtatatgtgccacattttcttaatccagtctatccttgttggacatttgggttggttccaagtctttgctattgtgaataatgccgcaataaacatacgtgtgcgtgtgtctttatagcagcatgatttatagtcctttgggtatatacccagtaatgggatggctgggtcaaatggtatttctagttctagatccctgaggaatcaccacactgacttccacaatggttgaactagtttacagtcccaccaacagtgtaaaagtgttcctatttctccacatcctctccagcacctgttgtttcctgactttttaatgattgccattctaactggtgtgagatggtatctcattgtggttttgatttgcatttctctgatggccagtgatgatgaacattttttcatgtattttttggctgcataaatgtcttcttttgagaagtgtctgttcatgtccttcacccactttttgatggggttgtttgtttttttcttgtaaatttgttggagttcattgtagattctggatattagccctttgtcagatgagtaggttgcgaaaattttctcccattttgtaggttgcccgttcactctgatggtagtttcttttgctgtgcagaagctctttagtttaattagatcccatttgtcaatttttgtcttttgttgccattgcttttggtgttttagacatgaagtccttgcccatgcctatgtcctgaatggtaatgcctaggttttcttctagggtttttatagttttaggtctaacgtttaagtctttaatccatcttgaattgatttttgtataaggtgtaaggaagggatccagtttcagctttctacatatggctagccagttttcccagcaccatttattaaatagggaatcctttctctattgcttgtttttgtcaggtttgtcaaagatcagatagttgtagatatgtggcgttatttctgagggctctgttctgttccattgatctatatctctgttttggtaccagtaccatgctgttttggttacggtagccttgtagtatagtttgaagtcaggtagtgtgatgcctccagctttgttcttttggcttaggattggcttggcgatgtgggctcttttttggttccatatgaactttaaagtagttttttccaattctgtgaagaaagtcattggtagcttgatggggatggcattgaatctataaattaccttgggcagtatggccattttcacgatattgattcttcctacccatgagcatggaatgttcttccatttatttgtatcctcttttatttccttgagcagtggattgtagttctccttgaagaggtccttcacatcccttgtaagttggattcctaggtattttattctctttgaagcaattgtgaatgggagttcactcataatttgtctctctgtttgtctgttgttggtgtataagaatgcttgtgatttttgtacattgattttgtatcctgagactttgctgaagttgctgctcagcttaaggagattttgggctgagacaatggggttttctagatatacaatcatgtcatctgcaaacagggacaatttgacttcctcttttcctaattgaataccctttatttccttcttctgcctaattgccctggccagaacttccaacactatgttgaataggagtggtgatagaggacatccctgtcttgtgccagttttcaaagggaatgcctccagtttttgcccattcagtatgatattgcctgtgggtttgtcatagatagctcttatgattttgaaatacgtcccaacagtacctaatttattgagagtttttagcatgaagggttgttgaattttgtcaaaggctttttctgcatctattgagataatcatgtggtttttgtctttggctctgtttatatgctggattacatttattgatttgcgtatattgaaccagccttgcatcccagggatgaagcccacttgatcatggtggataagctttttgatgtgctgctggattcgttttgccagtattttattgaggatttttgcatcaatgttcttcaaggatattggtctaaaattctctttttttgttgtgtctctgcctggctttggtatcagaatgatgctggcctcataaaatgagttagggaggattctctcttttcctattgattggaatagtttcagaaggaatggtaccagttcctccttgtacctctggtagaattcggctgtgaatccatctggtcctggactctttttggttggtaagctattgattattgccacaatttcagatcctgttattggtctactcagagattcaacttcttcctggtttagtcttgggagagtgtatgtgtcgaggaatttatccatttcttctagattttctagtttatttgcatagaggtgtttgtagtattctctgatggtagtttgtatttctgtgggattggtggtgatatcccctttatcattttttattgtatctatttgattcttctctctttttttctctattagtcttgctagcagtctatctattttgttgatcctttccaaaaaccaggtcctggattcattaattttttgaagggttttttgtgtctctatttccttcagttctgttctgattttagttatttcttgccttctgctagcttttgaatgtgtttgttcttgcttttctagttcttttaattgtgatgttagggtgtcaattttggatctttcctgctttctcttgtgggcatttagtgctataaatttccctctacacgctgctttgaatgcatcccagagattctggtatgttgtgtctttgttctcgttggtttcaaagaacatctttatttctgccttcatttcgttatgtacccagtagtcattcaggagcaggttgttcagtttccacgtagttgagcggttttgagtgagattcttaatcctgagttctagtttgattgcactgtggtctgagagatagtttgttataagttatgttcgtttatatttgctgaggagagctttacttccaaatatgtgatcaattttggaataggtgtggtgtggtgctgaaaaaaatgtatattctgttgatttggggtggagagttctgtagatgtctattaggtctgcttggtgcagagctgagttcaattcctgggtatccttgttgactttctgtctcgttgatctgtctaatgttgacagtggggtgttaaagtctcccattattaatgtgtgggagtctaagtctctttgtaggtcactcaggacttgctttatgaatctggttgatcctctattgggtgcatatatatttaggatagttagctcttcttgttgaattgatccctttaccattatgtaatggccttctttgtctcttttgatctttgttggtttaaagtctgttttattagagactaggattgcaacccctgcctttttttgttttccatttgcttggtagatcttccttcatccttttattttgagcctatgtgtgtctctgcacgtgaggtgggtttcctgaatacagcacactgatgggtcttgactctttatccaatttgccagtctgtgtcttttaattggagcatttagtccatttacatttaaagttaatattgttatgtgtgaatttgatcctgtcattatgatgttagctggttattttgctcgttagttgatgcagtttcttcctagtctcgatggtctttacattttggcatgattttgcagcggctggtaccggttgttcctttccatgtttagcacttccttcaggagctcttttagggcaggcctggtggtgacaaaatctctcagcatttgcttgtctgtaaaggattttatttctccttcacttatgaaacttagtttggctggatatgaaattctgggatgaaaattcttttctttaagaatgttgaatattggcccccactctcttctggcttgtagggtttctgccgagagatctgctgttagtctgatgggcttccctttgagggtaacccgacctttctctctggctgcccttaacattttttccttcatttcaactttggtgaatctgacaattatgtgtcttggaattgctcttctcgaggagtatctttgtggcgttctctgtatttcctgaatctgaacgttgccctgccttgatagattggggaagttctcctggataatatcctgcagagtgttttcccacttagttccattctccccatcactttcaggtacaccaatcagacgtagatttggtcttttcacatagtcccatatttcttggaggctttgctcatttctttttattcttttttctctaaccttcccttctcacttcatttcattcatttcgtcttccattgctgataccctttcttccagttgattgcatcggctcctgagacttctgcattcttcacatagttctcgagccttggttttcagctccatcaactcctttaagcacttctctgtattggttattctagttatacattcttctaaatttttttcaaagttttcaacttctttccctttggtttgaatgtcctcccgtagctcagagtaatttgatcgtctgaagtcttcttctctcatctcctcaaagtcattctccatccagctttgttccgttgctggtgaggagctgcattcctttggaggaggagaggtgctctgctttttagagtttccagtttttctgttctgttttttccccatttttgtggttttatctacttttggtctttgatgatggtgatgtacagatgggtttttggtgtggatgtcctttctgtttgttagttttccttctaacagagaggaccctcagctgcaggtctgttggagtaccctgccgtgtgaggtgtcagtgtgcccctgctggggggtgcctcccagttaggctgctcaggggtcaggggtcagggacccacttgaggaggcagtctgcccgttctcagatctccagctgcgtgctgggagaactacggctctcttcaaagctgtcagacagggacatttaagtctgcagaggttactgctgtctttttgtctgggccctgcccccagaggtggagcctacagaggcaggcaggcctccttgagctgtggtgggctccacccagttggagcttcctggctgctttgtttacctaatcaagcctgggcaatggcgggcgcccctcccccagcctcgctgccaccttgcagtttgatctcagacagctgtgctagcaatcagcgagactccgtgggcgtaggaccctccaagcgaggtgcgggatataatctcatggtgcactgttttttaagcccgtcggaaaagcgcagtattcgggtgggagtgacccgattttccaggtgctgtccgtcacctctttctttgactaggaaagggaactccctgaccccttgcgcttcccgagtgaggcaatgcctcgccttgctttggccctcgcacggtgcacgcacccactggcctgcgcccactgtctggcactccctagtgagatgagcccggtacctcagatggaaatgcagaaatcacccatcttctgcgtcgctcatgctgggagctgtagatgggagctgttcctattcggccatcttggcttctccccct

SEQ ID NO: 10449 - DNA, 6031 bp, Homo sapiens
ttttcttatttatttatttatttattattattatactttaagttttagggtacatgtgcacaatgtgcaggttagttacatatgtatacacgtgccatgctggtgcgctgcacccaccaactcgtcatctagcattaggtatacctcccaatgctatccctcccccctgccctcaccccacaacagtccccagagtgtgatgttccccttcctgtgtccacgtgttctcattgttcaattcccacctatgagtgagaatatgcggtgtttggttttttgttcttgcgatagtttactgagaatgatgatttccaatttcattcatgtccctacaaaggacatgaactcatcattttttatgactgcatagtattccatggtgtatatgtgccacattttcttaatccagtctatcattgttggacatttgggttggttccaagtctttgctattgtgaataatgccacaataaacatacgtgtgcatgtgtctttatagcagcatgatttatagtcctctgggtatataaccagtaatgggatggctgggtcaaatggtatttctagttctagatccctgaggaatcgccacactgacttccacaatggttgaactagtttacagtcccaccaacagtgtaaaagtgttcctatttctccacatcctctccagcacctgttgtttcctgactttttaatgattgccattctaactggtgtgagatggtatctcattgtggttttgatttgcatttctctgatggccagtgatggtgagcattttttcatgtgttttttggctgcataaatgtcttcttttgagaagtgtctgttcatgtccttcgcccattttttgatggggttgtttgtttttttcttgtaaatttgtttgagttcattgtagattctggatattagccctttgtcagatgagtaggttgcgaaaattttctcccattttgtaggttgcctattcactctgatggtagtttcttttgctgtgcagaagctctttagtttaattagatcccatttgccaattttggcttttgttgccattgcttttggtgttttagacatgaagtccttgcccatgcctatgtcctgaatggtaatgcctaggttttcttctagggtttttatggttttaggtctaacatttaagtctttaatccatcttgaattaatttttgtataaggtgtaaggaagggatccagtttcagctttctacatatggctagccagttttcccagcaccatttattaaatagggaatcctttccccattgcttgtttttctcaggtttgtcaaagatcagatacttgtagatatgcggccttatttctgagggctctgttctgttccattgatctatatctctgttttggcaccagtaccatgctgttttggttactgtagccttgtagtatagtttgaagtcaggtaacgtgatgcctccagctttgttcttttggcttaggatagacttgacgatgcgggctcttttttggtcccatatgaactttaaagtagttttttccaattctgtgaagaaagtcattggtagcttgatggggatagcattgaatctgtaaattaccttcggcagtatggccattttcacgatattgattcttcctacccatgagcatggaatgttcttccatttgtttgtatcctcttttatttccttgagcagtggtttgtagttctccttgaagaggtccttcacatcccttataagttggattcctaggtattttattctctttgaagcaattgtgaatgggagttcactcatgatttggctctgtgtttgtctgttgttggtgtataagaatgcttgtgacttttgtacattgattttgtatcctgagactttgctgaagttgcttatcagcttaaggagattttgggctgagacagtggggttttctagatatacaatcatgtcgtctgcaaacaggaacaatttgacttcctcttttcctaattgaataccctttatttccttctcctgactaattgccctggccagaccttccaacactatgttgaataggagtggtgagagagggcatccctgtcttgtgccagttttcaaagggaatgcttccagtttttgcccattcagtatgatattggctgtgggtttgtcatagatagctcttattattttgaaatacatcccatcaatacctaatttattgagagtttttagcatgaagcattgttgaattttgtcaaaggccttttctgcatctattgagataatcatgtggtttttgtctttgattctgtttatatgctggattacatttattgatttgtgtatattgaaccagccttgcatcccagggatgaagcccacttgatcatggtggataagctttttgatgtgctgctggatttggtttgccagtattttattgaggatttttgcatcaatgttcatcaaggatattggtctaaaattctcttttttggttgtgtctctgcccagctttggtatcaggatgatgctggcctcataaaatgagttagggaagattccctctttttctattgattggaatagtttcagaaggaatggtaccagttcctccttgtacctctggtagaattcggctgtgaatccatctggtcctggactctttttggttggtaagctattgattattgccacaatttcagatcctgttattggtctattcagagattcagcttcttcctggtttagtcttgggagagtgtatgtgtcaaggaatttatccatttcttctagattttctagtttatttgcatagaggtgtttgtagtattctctgatggtagtttctgtttctgtgggatcggtgatgatatcccctttatcattttttattgtgtctatttgattcttctctcttttttctttattagtcttgctagcggtttatcaattttgttgatcctttcaaaaaaccagctcctggattcattaattttttggagggtttttttgtgtctctatttccttcaattctgctctgattttagttatttcttgccttctgctagcttttgaatgtgtttgctcttgcttttctagttcttttaattgtgattatagggtgtcaattttagatctttcctgctttctcttgtgggcatttagtgctataaatttccctctacacactgctttgaatgcgtcccagagattctagtatgttgtgtctttgttctcgttggtttcaaagaacatctttatttctgccttcatttcgttatgtacccagtagtcattcaggagcaggttgttcagtttccatgtagttgagcggttttgagtgagattcttaatcctgagttctagtttgattgaactgtggtctgagagatagtttgttataatttctgttcttttacatttgctgaggagagctttactttcaagtatgtggtcaattttggaataggtgtggtgtggtgctgaaaaaaatgtatattctgttgatttggggtggagagttctgtagatgtctattaggtctgcttggtgcagagctgagttcaattcctgggtatccttgttaactttctgtcttgttgatctgtctaatgttgacagtggggtgttaaagtctcccattattaatgcatgggaatctaagtctctttgtaggtcactcaggacttgctttatgaatctgggtgctcctgtattgggtgcatatatatttgggatagttagctcttcttgttgaattgatccctttaccattatgtaatggccttctttgtctcttttgatctttgttggtttaaagtctgttttatcagagactaggattgcaacccctgcctttttttgttttccatttgcttggtagatcttcctccatccttttattttgagcctatgtgtgtctctgcacgtgaaatgggtttcctgaatacagcacactgatgggtcttgactctttatccaatttgccagtctgtgtcttttaattggagcatttagtccatttacatttaaagttaatattgttatgtgtgaatttgatcctgtcattatgatgttagctggttattttgctcattagttgatgcagtttcttcctagtctcaatggtctttacattttggcatgattttgcagcagctggtactggttgttcctttccatgtttagtgcttccttcaggagctcttttagggcaggcctggtggtgacaaaatctctcagcatttgcttgtctgtaaaggattttatttctccttcacttatgaagcttagtttggctggatatgaaattctgggttgaaaattcttttttttaagaatgttgaatattgacccccactctcttctggcttgtagagtttctgccgagagatccgctgttagtctgatgggcttccctttgagggtaacccgacctttctctctggctgttcttaacattttttccttcatttcaactttggtgaatctgacaattacgtgtcttggagttgctcttctcgaggagtatctttgtggcgttctctgtatttcctgaatctgaacgttggcctgccttgctagattagggaagttctcctggataatatcctgcagagtgttttccaacttggttccattctccccgtcactttcaggtacaccaatcagatgtagatttggtcttttcacatagtcccatatttcttggaggctttgctcgtttctttttattcctttttctctaaacttcccttctcgcttcatttcattcatttcatcttccatcgctgataccctttcttctagttgatcgcatcagctcctgaggcttctacattcttcacgtagttctcgagccttggttttcagctccatcagctcctttaagcacttctctgtattggttattctagttattcattcttctaaattcttttcaaagttttcaacttctttgcctttggtttgaatgtcctcccatagttcggagtaatttgatcgtctgaagccttcttctctcagctcgtcaaagtcattctccgtccagctttgttccattcctggtgaggaactgcattcctttggaggaggagaggagctctgctttttagagtttccagtttttctgctctgttttttccccatctttgtggttttatctacttttggtctttgacgatggtgatgtacagatgggttttttgtgtggatgtcctttctgtttgttagttttccttctaacagacaggaccctcagctgcaggtctgttagagtacccggccgtgtgaagtgtcagtctgcccctgctggggggtgcctcccagttaggctgctcgggggtcaggggtcagggacccacttgaggaggcagtctgcccgttctcagatctccagctgcgtgctgggagaaccactgctctcttcaaagctgtcagacagggacatttcagtctgcagaggttactgctgtctttttgtttgtctgtgccctgcccccagaggtggagcctacagaggcaggcaggcctccttgagctgtggtgggctccacccagttcgagcttcccggctgttttgtttacctcagcaagcctgggcaatggcgggcgcccctcctccagcctcgctgccaccttgcagtttgatctcagactgctgtgctagcaatcagcgagactctgtgggcgtaggaccctctgagccaagtgcgggatataatctcctggtgcgccgttttttaagcccgtcggaaaagcgcagtattcgggtgagagtgacccgattttccaggtgccctctgtcacccctttctttgactaggaaagggaactccctgaccccttgtgcttcctgagtgaggcaatgcctcgccctgcttcggctcacgcacggtgcgcgcacccactgacctgtgcccactgtctggcactccctagtgagatgaacctcagatggaaatgcagaaatcacctgtcttctgcgttgctcacgctgggagctgtagaccggagctgttcctatttggccatcttg

SEQ ID NO: 10450 - DNA, 6031 bp, Homo sapiens; identical to SEQ ID NO: 10449

SEQ ID NO: 10451 - DNA, 5640 bp, Homo sapiens
tttttttctctttttttaattattattatactttaagttttagggtacatgtgcacaatgtgcaggtttgtcacatatgtatacatgtgccgtgctggtgtgctgcacccattaactcatcatttagcattaggtatatctcctaaagctatccctcccccctccccccaccccacaacagtccccagagtgtgatgttccccttcctgtgtccatgtgttctcattgttcagttcccacctatgagtgagaatatgcagtgtttggttttttgttcttgcgatagtttactgagaatgatgatttccagcttcatccatgtccctacaaaggacctgagctcatcattttttatggctgcatactattccatggtgtatatgtgccacattttcttaatccagtctctcattgttggacatttgggttggttccaagtctttgctatggtgaatagtgtcgcaataaacatacgtgtgcatgtgtctttatagcagcatgatttatagtcctttgggtatatacccagtaatgggatggctgggtcaaatggtatttctagttctagatccctgaggaatcgccacactgacttcaacaatggttgaactagtttacagtcccaccaacagtgtaaaagtgttcctatttctccacatcctctccagcacctgttgtttcctgactttttaatgatcgccattctaactggtgtgagatggtatctcattgtggttttgatttgcatttctctgatggccagtgatggtgagcattttttcatgtgttgtttggctgcataaatgtcttcttttgagaagtgtctcttcatgtccttcgcccactttttgatggggttgtttgtttttttcttgtaaatttgtttgagttcattgtagattctggatattagccctttgtcagatgagtaggttgcgaaaattttctcccattttgtaggttgcctgttcactctgatggtagtttcttttgctgtgcagaagctctttagtttaatgagatcccatttgtcaattttggcttttgttgccattgcttttggtgttttagacatgaagtccttgcccatgcctatgtcctgaatggtaatgcctaggttttcttctagggtttttatggttttaggtctaatgtttaagtctttaatccatcttgaattgatttttgtataaggtgtaaggaagggatccagtttcagctttctacatatggctagccagttttcccagcaccatttattaaatagggaatcctttccccattgcttgtttttctcaggtttgtcaaagatcagatagttgtagatatgcggcgttatttctgagggctctgttctgttccattgatctatatctctgttttggtaccagtaccatgctgttttggttactgtagccttgtagtatagtttgaagtcaggtagcgtgatgcctccagctttgttcttttggcttaggattgacttggcaatgcgggctcttttttggttccatatgaactttaaagtagttttttccaattctgtgaagaaagtcattggtagcttgatggggatggcattgaatctgtaaattaccttgggcagtatggccattttcacaatattgattcttcctacccatgagcatggaatgttcttccatttgtttgtatcctcttttatttccttgagcagtggtttgtagttctccttgaagaggtccttcattcacatcccttgtaagttggattcctaggtattttattctctttgaagcaattgtgaatgggagttcactcatgatttggctgtttgtctgttgttggtgtataagaatgcttgtgatttttgtacattgattttgtatcctgagactttgctgaagttgcttatcagcttaaagagattttgggctgagacaatggggttttctagatatacaatcatgtcgtctgcaaacagggacagtttgacttcttcttttcctaactgaataccctttatttccttctcctgcctaattgccctggccagaacttccaacacaatgttgaataggagtggtgagagagggcatccctgtcttgtgccagttttcaaagggaatgcttccagtttttgcccattcagtatgatattggctgtgggtttgtcatagatagctcttattattttgagatatgtaccatcaatacctaatttattgagagtttttaacatgaagagttgttgaattgtgtcaaaggccttttctgcatctattgagataatcatgtggttattgtctgtggttctgtttatatgctggattacatttattgatttgcatatattgaaccagccttgcatcccagggatgaagcccacttgatcatggtggataagctttttgatgtgctgctggattcggtttgccagtattttattgaggatttttgcatcaatgttcatcaaggatattggtctaaaattctcttttttggttgtgtctctgcccggctttggtatcaggatgatgctggcctcataaaatgagttagggaggattccctctttttctattgattggaatagtttcagaaggaatggtaccagctcctccttgtacgtctggtagaattcggctgtgaatccatctggtcttggactctttttggttcgtaagctattgattattgccacaatttcagatcctgttattggactattcagagattcaacttcttcctggtttagtgttgggagagtgtatgtgtcgaggaatttatccatttcttctagattttctagtttatttgcgtagaggtgtttatagtattctctgatggtagtttgtatttctgtgggatcggtggtgatatcccctttatcattttttattgcgtctatctgattcttctctctttttttctttattagtcttgctagcggtctatcaattttgtggatcttttcaaaaaaccagctcctggattcgttaattttttgaagggttttttgtgtctctatttccttcagttctgctctgattttagttatttcttgccttctgctagcttgtgaatgtgtttgctcttgcttctttagttcttttaattgtgatgttagggtgtcaattttggatctttcctgctttctcttgtgggcatttagtgctataaatttccctctacacactgctttgaatgcgtcccagagattctggtatgttgtgtctttgttctcgttggtttcaaagaacatctttatttctgccttcatttcgttatgtatccagtagttattcaggagcaggttgttcagtttccatgtagttgagcggttttgagtaagattcttaatcctgagttctagtttgattgcactgtggtctgagagacagtttgttataatttctgttgttttacatttgctgaggagagctttacttccaagtatgtgatcaattttggaataggtgtggtgtggtgctgaaaaaaatgtatattctgttgatttggggtggagagttctgtagatgtctattaggtctgcttggtgcagtgctgagttcaattcctgggtttccttgtttactttctgtctcgttgatctgtctgtgttgacagtggggtgttaaagtctcccattattattgtgtgggagtctaagtctctttgtaggtcactcaggacttgctttatgaatcttggtgctcctgtattgggtgcatatatatttaggatagttagctcttcttgttgaattgatccctttaccattatgtaatggccttctttgtctcttttgatctttgttggtttaaagtctgttttatcagagactaggattgcaacccctacctttttttgttttccatttgcttggtagatcttcctccatccttttattttgagcctatgtgtgtctctgcacgtgagatgggtttcctgaatatagcacactgatgtgtcttgactctttatccaatttgccagtctgtgtcttttaattgaagaatttagtccatttacatttaaagttaatattgttatgtgtgaatttgatcctgtcattatgatgttagctggtgattttgctcgttagttgatgcagtttcttcctagtctcgatggtctttacattttggcatgattttgcagcagctggtatcggttgtttctttccatgtttagcgcttccttcaggagctcttttagggcaggcctggtggtgacaaaatctctcagcatttgcttgtctgtaaagtattttatttctccttcacttatgaagcttagtttggctggatatgaaattctgggttgaaaattcttttctttaagaatgttgaatattggcccccactctcttctggcttatagagtttctgccgagagatcagctgttagtctgatgggcttccctttgtgggtaacctgacctttctctctggctgcccttaacattttttccttcatttcaactttggtgaatctgacaattatgtgtcttggagttgctcttctcgaggagtatctttgtggcgttctctgtatttcctgaatctcaatgttggcctgccttgctagattggggaagttctcctggataatatcctgcagaatgttttccaacttggttccattctccccgtcactttcaggtacaccaatcagacgtagatttggtcttttcacatagtcccatatttcttggaggctttgctcatttctttttattcttttttctctaaccttcctttctcgcttcatttcattcatttcatcttccattgctgataccctttcttccagttgatcgcattggctcctgaggcttctgcattcttcacgtagttctcgagccttggttttcagctccatcagctcctttaagcacttctctgtattggttattctagttatacattcttctaaatttttttcaaagttttcaacttctttgcctttggtttgaatgtcctcccgtagctcagagtaatttgatcgcctgaagccttcttctctcagctcgtcaaagtcattctccatccagctttgttccgttgctggtgaggaactgcattcctttggaggagaggcgctctgctttttagagtttccagtttttctgttctgttttttccccatctttgtggttttatctacttttggtctttgatgatgttgatgatgatgatgggttttcggtgtggatgtcctttctgtttgttagttttccttctaacagacaggaccctcagctgcaggtctgttggaataccctgccgtgtgaggtgtcagtgtgcccctgctggggggtgcctcccagttaggctgctcgggggtcaggggtcagggacccacttgaggaggcagtctgccggttctcagatctccagctgcgtgctgggagaaccactgctctcttcaaagctgtcagacagggacccttaagtctgcagaggttattgctgtctttttgtttgtctgtgccctgcccccaaaggtggagcctacataggcaggcaggcctccttgagctgtggtggggtgcacccagttcgtgctttccagctgctttgtttacctaagctagcctgggcaatggaaagcgcccctcccccagcactaaatacaacctttcagtttgctctc

SEQ ID NO: 10452 - DNA, 6203 bp, Homo sapiens
ttttcttttcttgcatgtaaatctctttattttattttattttattattattatactttaagttttagggtacttgtgcacaatgtgcaggttagttacacatgtatacatgtgccatgctggtgtgctgcacccattaactcgtcatttagcattaggtatatctcctaaagctatccctcccccctccccccaccccacaacagtccccagagtgtgatgttccccttcctgtgtccatgtgttctcattattcaattcccacctatgagtgagaatatgcggtgtttggttttttgttcttgcgatagtttactgagaatgatgatttccaatttcatccatgtccctacaaaggacatgaactcatcattttttatggctgcatagtattccatggtgtatatgtgccaaattttcttaatccagtctataattgttggacatttgggttggttccaagtctttgctattgtgaatagtgccgcaataaacatgcgtgtgcatgtgtctttatagcagcatgatttatagtccattgggtatatacccagtaatgggatggctgggtcaaatggtatttctagttctagatccctgaggaaccgccacactgacttccaaaagggttgaactagtttacagtcccaccaacagtgtaaaagtgttcctatttctccacatcctctccagcacctgttgtttcccgactttttaatgatcgccattctaactggtgtgagatggtatctcattgtggttttgatttgcatttctctgatggccagtgatggtgagcattttttcatgtgttttttggctgcataaatgtcttcttttgcaaagtgtctgttcatgtcctttgcccactttttgatggggttgtttgtttttttcctgtaaatttgtttgagttcattgtagattctggatattagccgtttgtcagatgagtaggttgagacaattttctcccattttgtaagttgcctgttcactctgatggtagtttcttttgctgtgcagaagctctttagtttaattagatcccatttgtcaattttggcttttgttgccattgcttttggtgttttagacatgaagtccttgcccatgcctatgtcctgaatggcaaagcctaggttttcttctagggtttttatggttttaggtctaacatttaagtctttaatccatctcgaattaatttttgtataagatgtaaggaagggatccagtttcagctttctacatatgactagccagttttcccagcaccatttattaaatagggaatcctttccccattgcttgtttttctcaggtttgtcaaagatcagatagttgtcgatatgtggccttatttctgagggctgtgttctgttccattgatctatatctctgttttggtaccagtaccatgctgttttggttactgtagccttgtagtatagtttgaagtcaggtagcgtgatgcctccagctttgttcttttggcttaggattgactaggcgatgtgggctcttttttggttccacatgaactttaaaggagttttttccaattctgtgaagaaagtcattggtagcttgatggggatggcattgaatctataaattaccttgggcagtatggccattttcacggtattgattcttcctatccatgagcatggaatgttcttccatttgtttgtatcctcttttatttcactgagcagtggtttgtagttctccttgaagaggtccttcacatcccttgtaagttggattcctaggtattttattctctttgaagcaattgtgaatgggagttcactcatgatttggctctctgtttgtctgttattggtgtataagaatgcttgtgatttttgtacattgattttgtatcctgagactttgctgaagttgcttatcagcttaaggagattttgggctgagacaatggggttttctagatatacaatcatgtcgtctgcaaacagggacaatttgacttcctcttttcctaattgaataccctttatttccttctcctgcctgattgccctggccagaacttccaacactatgttgaataggagtggtgagagagggcatccctgtcttgtgccagttttcaaagggaatgcttccagtttttgcccattcagtatgatattggctgtgggtttgtcatagatagctcttattattttgagatacatcccatcaatacctaatttattgagagtttttagcatgaagggttgttgaattttgtcaaaggccttttctgcatctgctgagataatcaggtggtttttgtctttggttctgtttatatgctggattacatttattgatttgcatatattgaaccagccttgcatcccagggatgaagcccacttgatcatgctggataagctttttgatgtgctgctggattcagtttgccagtattttattgaggatttttgcatcaatgttcatcaaggatattggtctaaaattctctttttttgttgtgtctctgcccagctttggtatcaggatgatgctggcctcataaaatgagttagggaggattccctctttttctattgattggaatagtttcagaaggaagggtaacagttcctccttgtacctctggtagaatttggctgtgaatccatctggtcctggactctttttggttggtaaactattgattattgccacaatttcagagcctgttattggtttattcagagattcaatttcttcctggtttagtcttgggagggtgtatgtgtcaaggaatttatacatttcttctagattttctagtttatttgcgtagaggtgtttgtagtattctctgatggtagtttgtatttctgtgggattggtggtgatatcccctttatcattttttattgcacctatttgattcttctctcttttcttctttattagttttgctagcagtctatcaattttgttgatcctttcaaaaaaccagctcctggattcattaattttttgaagggttttttgtgtctctatttccttcagttctgctctgattttagttatttcctgccttctgctagcttttgaatgtgttttctcttgcttttctagttcttttaattgtgatgttagggtgtcaattttggatctttcctgctttctcttgtgggcatttagtgctataaatttccctctacacactgctttgaatgtgtcccagagattctggtatgttgtgtctttgttctccttggtttcaaagaacatctttatttctgccttcatttcgttatgtacccagtagtcattcaggagcaggttgctcagtttccatgtagttgagcagttttgagtgagtttcttaatcctgagttctagtttgattgcactgtggtctgagagacagtttgttataatttctgttcttttacatttgctgaggagagctttacttccaactatgtggtcaattttggaataggtgtggtgtggtgctgaagaaaatgtatattctgttgatttggggtggagagttctgtagatatctattaggtctgcttggggcagagctgagttcaattcctgggtatccttgttaactttctgtctcattgatctgtctaatgttgacagtggagtgttaaagtctcccattattattgtgtgggagtgtaagtctctttgtaggtcactcaggacttgctttatgaatctgggtgctcctgtattgggtgcatatatatttaggatagttagctcttcttgttgaattgatccctttatcattatgtaatggccttctttgtctcttttgatctttgtttgtttaaagtctgttttatcagagattaggattgcaacccctgcctttttttgttttccatttgcttggtagatcttcctccatccttttattttgagcctatgtgtgtctctgcacgtgagatgggtttcctgaatacagcacactgatgggtcttgactctttatccagtttgccagtctgtgtcttttaattggagcatttagtccatttacctttaaagttaatattgttatgtgtgaatttgatcctgtcattatgatgttagctggtgattttgctcgttagttgatgcagtttcttcctagccttgatggtctttacaatttggcatgattttgcggtggctggtaccggttgttcctttccatgtttagtgcttccttcaggagctcttttagggcaggcctggtggtgacaaaatctctcagcatttgcttgtctgaaaagtattttatttctccttcacttatgaagcttagtttgactggatatgaaattctgggttgaaaattattttctttaagaatgttggatattggcccccactctcttctggcttgtagaatttctgctgagagatccgctgttagtctgatgggcttccctttgtgggtaacctgacctttctctctggctgcccttaacattttttccttcacttcaactttggtgaatctgacaattatgtgtcttggagttgctcttctcgaggagtatctttgtggcattctctgtatttcctgaatctgaatgttggcctgccttgctagattggggaagttctcctggataatatcctgcagagtgttttccaacttggttccattctccccgtccctttcaggtacaccaatcagccgtagatttggtcttttcacatagtcccatatttcttggaggctttgttcatttctttttattcttttttctctaagcttcccttctcgcttcatttcattcatttcatcttccatcactgataccctttcttccagttgatcgcatcagctcctgaggcttctgcattcttcacgtagttctcgagtcttggctttcagctccattagctcctttaagcacttctctgtattggttattccagttatacattcgtctaaatttttttcaaagttttcaacttctttgcctttggtttgaatttcctcctgtagctcggagtactttgatcctctgaagccttcttctctcagctcgtcaaagtcattctccgtccagttttgttccgttgctggtgaggagctgtgttcctttggaggaggagaggcgctctggtttttagagtttccagtttttctactctgttttttccccatctttgtggttttatctacttttggtctttgatgatggtgatgtacagatgggtttttggtgtggatgtcctttctgtttgttagttttccttctaacagacaggaccctcagctgcaggtctgttggagtttgctagaggtccactccagaccctgtttgcctgggtaccagcagcggtggctgcagaacagcggattttcatgaaccacgaatgctgctgtctgatcattcctctggaagttttgtctcagaggagtacccagccgtgtgaggtgtcagtctgcccctactggggggtgcctcccagttaggctgcttgggggtcaggggtcagggacccacttgaggagggaggcagtctgcccattctcagatctccagctgcgtggtgagagaaccactgctctcttcaaagctgtcagacagggacatttaagtctgcagaggttactgttgtctttttgtttgtctgtgccctgccctcagaggtggagcctacagaggcaggcaggccttcttgagctgtggtgggctccacccagttggagcttcctggctgctttgtttacctaagcaagcctgggcaatggcaggtgcccctcccccagcctcgctgccgccttgcagtttgatctcagactgctgtgctagcaatcagcaagactccttgggcgtaggaccctctgagccaggtgcgggatataatctcgtggtgtgccgttctttaagcccattggaaaagcacagtattcgggtgggagtgacccgattttccaggtgctgtctgtcacccctttctttgactaggaaagggaactccctgaccccttgcgcttcccgagtgaggcaatgcctcaccctgcttcagctcatgcatggtgcgctgcacccactgtcctgcgccctctgtctggcactccctagtgagatgaacccggaacctcagatggaaatgcagaaatcacccgtcttctgcgtcgctcacgctgggagctgtagaccggagctgttcctatttggccatcttggctccagcccct

SEQ ID NO: 10453 - DNA, 6177 bp, Homo sapiens
tttcagattttttttattattattatactttaagttttagggtacatgtgcacaatgtgcaggttagttacatatatatacatgtgccatgctggtgtgctgcacccattaactcgtcatttagcattaggtatatctcctaatgctatccctccccccttcccccaccccacaacagtccccagagtgtgatgttccccttcctgtgtccatgtgttctcattgttcaattcccatctatgagtgagaatatgcggtgtttggttttttgttcttgcgatagtttactgagaatgatgatttccaatttcacccatgtccctacaaaggacatgaactcatcattttttatggctgcatagtattccatggtgtatatgtgccacattttcttaatccagtctatcattgatggacatttgggttggttccaagtctttgctattgtgaatagtaccgcaataaacatatgtgtacatgtgtctttatagcagcatgattggtagtcctttgggtatatacccagtaatgggatggctgggtcaaatggtatttctagttctagatccctgaggaatcgccacactgacttccacaatggttgaactagtttacagttccaccaacagtgtaaaagtgttgctatttctccacatcctctccagcacctgttgtttcctgactttttgatgattgccattctaactggtgtgagatgatatctcattgtggttttgatttgcatttctctgatggccagtgatggtgagcattttttcatgtgttttttggctgcataaatgtcttcttttgagaagtgtctgttcatatcctttgcccactttttgatggggttgtttgtttttttcttgtaaatttgtttgagttcattgtagattctggatattaaccctttgtcagatgagtaggttgcgaaaattttctcccattttgtaggttgccgattcattctgatgatagtttcttttgctgtgcagaagctctttcatttaattagatcccatttgtcaattttggcttttgttgccattgcttttggtgttttagacatgaagtccttgcccatgcctatgtcctgaatggtaatgcctaggttttcttctagggtttttatggttttaggtctaacatttaagtctttaatccatctggaattaatttttgtataaggtgtaaggaagggatccagtttcagctttctacatatggctagccagttttcccagcaccatttattaaatagggaatcctttccccattgcttgtttttctcaggtttgtcaaagatcagatagttgtagatatgcggcgttatttctgagggctctgttctgttccattgatctatgtctctgttttggtaccagtaccatgctgttttggttactgtagccttgtagtatagtttgaagtcaggtagcatgatgcctccagctttgttcttttggcttaggattgacttggcgatgtgggctcttttttggttccatatgaactttaaagtcgttttttccaattctgtgaagaaagtcattggtagcttgatggggatggcatcgaatgtgtaaaataccttgggcagtatggccattttcacgatattgattcttcctacccatgagcatggaatgttcttccatttctttgtatcctcttttatttccttgagcagtggtttgtagttctccttgaagaggtccttcatgtcccttgtaggttggattcctaggtattttattctctttgaagcaattgtgaatgggagttcactcatgatttggctctctgtttgtttgttattggtgtataagaatgcttgtgatttttgtacattgattttgtatcctgagactttgctgaagttgcttatcagcttaaggagattttgggctgagacaatggggttttctagatatacaatcatgtcatctgcaaacagggacaatttgacttcctcttttcctaattgaataccctttatttccttctcctgcctaattgccctggccagaacttccaacactatgttgaataggagtggtgagagagggcatccctgtcttgtgccagttttcaaagggaatgcttccagtttttgccctttcagtatgatattggctatgggtttgtcatagatggctcttattattttgagatacgtcccatcaatacctaatttattgagagtttttagcatgaagggttgttgaattttgtcaaaggccttttctgcatctattgagataatcatgtggtttttgtctttggttctgtttatatgctggattacatttattgatttgcatatatcgaaccagccttgcatcccagggatgaagctctcttgatcatggtggataagctttttgatgtgctgctggatttggtttgccagtattttattgaggatttttgcatcaatgttcatcaaggatattggtctaaaattctcttctttggttgtgtctctgcccggctttggtatcaggatgatgctggcctcataaaatgagttagggaggattccctctttttctattgattggaatagtttcagaaggaagcataccagttcctccttgtacctctggtagaattcggctgtgaatccatctggtcctggactctttttggttggtaagctattgattattgccacaatttcagagcctgttattggtctattcagagattcaacttcttcctggtttagtcttgggagggtgtatgtgtccaggaatttatccatttcttctagattttccagtttatttgcgtagaggtgtttgtagtattctctgatggtagtttgtatttctgtgggattggtggtgacatccccgttatcattttttattgtgtctatttgattcttctctcttttcttctttattagtcttgctagtggtctatcaattttgttgatcctttcaaaaaaccagctcctggatgcattaattttttgaagggttttttgtgtctctatttccttcagttctgctctgattttagttatttcttgccttctgctagcttttgaatgtgtttgctcttgcttttctagttctttcaactgtgatgttagggtgtcaattttggatctttcctgctttctcttgtgggcatttagtgctataaatttccctctacacactgctttgaatgtgtcccagagattctggtatgttgtgtctttgttcttgttggtttcaaagaatatctttatttctgccttcatttcgttatgtacccagtagtcattcaggagcaggttgttcagtttccatgtagttgagcggttttgagtgagtttcttaatcctgagttccagtttgattgcactgtggtctgacagacagtttgttataatttctgttctcttatatttgctgaggagagcttcacttccaagtatgtggtcaattttggaataggtgtggtgtggtgctgaaaaaaatgtatattctgttgatttggggtggagagttctgtagatgtctattaggtccacttggtgcagagctgagttcaattcctgggtatccttgttaactttctgtctcgttgatctgtctaatgttgacagtggggtgttaaagtctcccattattattgtgtgggaatctaagtctctttgtaggtcactcaggacttgctttatgaatctggatgctcctgtattgggtgcatatatatttcggatagttagctcttcttgttgaattgatccctttaccattatgtaatggccttctttgtctcttttgatctttgttggtttaaagtctgttttatcagagactaagattgcaacccctgcctttttttgttttccatttgcttggtggatcttcctctatccttttattttgagcctatgtgtgtctctgcacctgagatgggtttcctgaatacagcacactgatgggtcttgactctttatccaatttgccagtctgtgtcttttgattggagcatttagtccatttacatttaaagttaatattgttatgtgtgaatttgatcctggcattatgatgttagctggttattttgctcgttagttgatgcagtttcttcctagctttgatggtctttacattttggcatgattttgcagtggctggtaccggttgttcctttccatgtttagcgcttccttcaggagctcttttagggcaggcctggtggtgacaaaatctctcagcatttgcttgtctgtaaagtattttatttctccttcacttatgaagcttagtttggcaggatatgaaattctgggctgaaaattcttttctttaagaatgttgaatattggcccccactctcttctggcttgtagattttctgctgagagatctgctattagtctgatgggcctccctttgtgggtaacccgacctttctctctggctgcccttaacattttttccttcatttcaactttggtgaatctgacaattatgtttcttggagttgctcttctcgaggagtatctttgtggtgttctccgtatttcctgaatctgaatgttggcctgccttgctagattggggaagttctcctggataatatactgcacagtgttttccaacttggttccattctccccgtcactttcaggtacaccagtcagacttagatttggtcttttcacatagtcccatatttcttggaggctttgtttgtttctttttattcttttttctctcaacttcccttctcgcttcatttcattcatttgatcttccatcactgataccctttcttccagttgatcgcattggctcctgaggcttctgcattcttcacgtagttctcgagccttggctttcagctccatcagcgcctttaagcacttctctgtagtggttattctagttatacattcgtctaaatttttttcaaagtttttaacttcttcgcctttggtttgaatttcctcctgtagctcggagtagtttgatcgtctgaagccttcttctctcaactcatcaaagtcattctccatccagctttgttccgttgctggtgaggaactgcgttcctttggaggaggagaggcattctgctttttagagtttccagtttttctgctctgtttcttccccatctttgtgtttttatctacttttggtctttgatgatggtgatgtacagatgggtttttggtgtggatgtcctttctgcttgttagttttccttctaacagacaggaccctcagctgcaggtctgttggagtttgctagaggtcccctccagaccctgtttgcctgggtatcagcagcggtggctgcagaacagcggattttcatgaacctcgaatgctgctgtgtgatcgttcttctggaatttttgtctcagaggagtacccagccgtgtgaggtgtcagtctgcccctactggggggtgcttcccggttaggctgctcgggggtcaggggtcagggacccacttgaggaggcagtctgcccgttctcagatctccagctgcatgctgggagaaccactgctctcttcaaagctgtcagacagggacatttaagtctgcagaggttactgctgtctctttgtctgtgccctgcccccagaggtggagcctacagaggcaggcaggcctccttgagctgtggtgggctccacccatttcgagcttcccggctgctttgtttacctaagcaagcctgggcaatggtgggcgcccctccctcagccttgctgccaccttgcagtttgatctcagactgctgtgctagcaatcagggggactccgtgggcataggaccctccaagccaggtgcgggatataatctcctggtgcgccgttttttaagcccgtcggaaaagtgcagtattagggtgggagtgacccgattttccaggtgctgtctgtcacccctttctttgactaggaaagggaactccccgaccccttgcgcttcccgagtgaggcaatgcctcgccctgcttcgtcttgcgcacggtgcgctgcacccactgtcctgcacccactgtctggtactccctagtgagatgaacctggtacctcagatggaaatgcagaaatcacccgtcttctgcgtcgctcatgctgggagctgtaaaccagagctgttcctattcggccatcttggctggcaatcccagatatttgt

SEQ ID NO: 10454 - DNA, 6193 bp, Homo sapiens
tttttttttattatttttattttattttattttatttattttattattattatactttaagttttagggtacatgtgcacattgtgcaggttagttacatatgtatacatgtctcatgctggtgtgctgcaaccattaactcgtcatttagcattaggtaaatctcctaatgctatccctcgccccttcccccaccccacaacagtccccagagtgtgatgttccccttcctgtctctatgtgttctcattgttcaattcccacctatgagtgagaacatgcggtgtttggttttttgtccttgcgatagtttactgagaatgatgatttccaatttcatccatgtccctacaaaggacatgaactcatcattttttatggctgcatagtattccatggtgtatatgtgccacattttattaatccagtctatcattgttggacatttgggttggttccaagtctttgctattgtgaatagtgccgcaataaacatatgtgtgcatgtgtctttatagcagcatgatttatagtcctttgggtatgtacccagtaatgggatggctgggtcaaatggtatttctagttctagatccctgaggaatcgccacactgacttccacaatggttgaactagtttacagtcccaccaacagtgtaaaagtgttctgatttctccacatcctctccatcacctgttgtttcctgactttttaatgattgccattctaactggtgtgagatggtatctcatcgtggttttgatttgcatttctctgatggccagtgatgatgagcattttttcatgtgttttttggctgcataaatgtcttcttttgagaagtgtctgttcatgtcctttgcccactttttgatggggttctttgtttttttcttgtaaatttgtttgagttcattgtagattctggatatcagccctttgtcagatgagtaggttgcgaaaattttctcccattctgtaggttgcctgttcactctgatggtagtttcttttgctgtgcagaagatctttagtttaattagatccaatttgtcaattttgtcttttgttgccattgcttttagtgttttagacatgaagtccttgcctatgcctatgtcctgaatggtaatgcctaggttttcttctagggtttttatggttttaggtctaatgtttaagtctttaatccatcttgaattaatttttgtataaggtgtcaggaagggatccagtttcagctttctacatatggctagccacttttcccagcaccatttattaaatagggaatctttctccattgcttgtttttctcaggtttgtcaaagatcagatagatgtagatatgtggcattatttctgagggctctgttctgttccattgatctatatctctgttttggtaccagtaccatgctgttttggttactgtagcctagtagtatagtttgaagtcaggtagcatgatgcctccagctttcttcttttggcttaggattgacttggcgatgcgggctcttttttggttccatatgaactttaaagtagttttttccaattctgtgaagaaagtcattggtagcttgatggggatggcattgaatctataaattaccttgggcaatatggccattttcaagatattgattcttcctacctatgagcatggaatgttcttccatttgtttgtatcctcttttatttcattgagcagtggtttgtagttctccttaaagaggtccttcacatcccttgcaagttggattcctaggtattttattctctttgaagcaattgtgaatgggagtttactcatgatttggctctctgtttgtctgttattggtgtataagaatgcttgtgatttttgtacattgattttgtatcctgagactttgctgaagttgtttataagcttaaggagattttgggctgagacaatggggttttctagatatgcaatcatgtcatctgcaaacagggacaatttgactttctcttttcctaattgaataccctttatttccttctactgcctacttgccctggccagaacttccaacactatattgaataggagtggtgagagaggtcatccctgtcttgtgccagttttcaaagggaatgcttccagtttttgcccattcagtatgatattggctgtgggtttgtcatagatagctcttattattttgagatacgtcccatcaatacctaatttattgagagtttttagcatgaagggctgttgaattttgtcaaaggccttttctgcatctattgagataatcatgtggtttttgtctttggttctgtttatacactggattacatttattgatttgcatatattgcaccagccttgcatcccagggatgaagcccacttgatcatggtggataagctttttgatgtgctgctggattcagtttgccagtattttattgaggatttttgcatcaatgttcatcgaggatattggtctaaaattctcttttttggttgtgtctctgcccggctttggtatcaggatgatgctggtatcataaaaggagttagggaggattccctctttttctattgtttggaatagtttcagaaggaatggtaccagttcctccttgtacctgtggtagaattcggctgtgaatccatctagtcctggactctttttgattggtaagctattgattattgccacaatttcagagcctgttattggtctattcagagattcaacctcttcccgttttagtcttaggagggtgtatgtgtcgaggaatttatccatttcttctagattttctaatttatttgcgtagaggtgtttgtagtattctctgatggtagtttgtatttctgtgggatcagtggtgatatcccctttatcattttttattgcatctatttgattcttctctcttttcttctttattagtcttgctagcagtctatcaattttgttgatcctttcaaaaaaccagctcctggattcattaattttttgaagggttttttgtgtctctatctccttcagttctgctctgattttagttatttcttgccttctgctagctgttgaatgtgtttgctcttgttgcttttctagttcttttaattgtgatgttagggtgctaattttggatctttcctgctttctcttgtgggcatttagtgctataaatttccctctacacactgctttgaatgtgtcccagagattctggtatgttgtgtctttgttctcattggtttcaaagaacatctttatttctgccttcatttcattatgtaaccagtagtcattcaggagcaggttgttcagtttccatgtagttgagcggttttgagtgagtttcttaatcctgagttctagtttgattacactgtggtctgagagacggtttgttataatttctgttgttttacatttgctgaggagagctttacttccaagtatgtggtcaattttggaataggtgtggtgtggtgctgaaaaaaatgtatattctcttgatttggggtggagagttctgtagatgtctactaggtctgcttggtgcagagctgagttcaattcctgggtatccttgttgactttctgtctcgttgatctgtctaatgttgacagtgaggtgttaaagtctcccattattaatgtgtgggagtctaagtctctttgtaggtcactcaggacttgctttatgaatctgggtgctcctgtattgggtgcatatatatttaggatagttagctcttcttgttgaattgatccctttaccattatgtaatggccttctttgtctcttttgactttgttggtttaaagtctgttttatcagagactgggattgcaacccctgcctttttttgttttccatttgcttggtagatcttcctccatccttttattttgagcctgtgtgcgtctctgcacatgagatgggtttcctgaatacagcacactgatgggtcttgactctttatccaattttccagtctgtgtcttttagttggagaatttagtccatttacatttaaagttaatattgttatgtgtgaatttgatcctgtcattatgatgttagctggttattttgcccgttagttgatgcagtttctccctagtcttgatggtgtttacattttggcatgattttgcagtggctggtaccggttgttcctttccatgtttagtgcttccttcaggagctcttgtagggcaggcctggtggtgacaaaatctctcagcatttgcttgtctgtaaagtattttatttctccttcgcttatgaagcttagtttggctggatatgaaattctgggttgaaaattcttttctttaagaatgttgaaaattggcccccactgtcttctggcttgtagagtttcttccgagagatccgctgttagtctggtgggcttccctttgtggataacccgacctttctctctggctgcccttaacattttttccttcatttcaactttggtgaatctgacaattatgtgtcttggagttgctcttcttgaggagtatctttgtggcgttctctgtatttcctgaatctgaatgttggcctgccttgctagattggggaagttctcctgggtaatatcctgcagagtgtttttcaacttggttccattcttcccatcactttcaggtacactaatcagacgtagatttggtcttttcacatagtccatatttcttggagactttgttcatttccttttattcttttttctctaaacttcccttctcacttcatttcattcatttcatcttccatcactgataccctttcttccaattgatcgcatttgctcctgaggcttctgcattcttcacgtagttctcgagccttggctttcagctccatcagctcctttaagcacgtctttgtattggttattctagttatacattcgtctaaatttttttcaaagtttttaacttctttgcctttggtttgaatttcctcctgtagctcggtgtagtttgatcgtctgaagccttcttctctcaactcgtcaaagtcattctccgtccagctttgttccgttgctggtgagagactgcgttcctttggagaaggagaggcactctgctttttagagtttccagtttttctgctctgttttttccccatctttgtggttttttctacttttggtctttgatgatggtgatgtacagatgggtttttggtgtggatgtcctttctgtttgttagttttccttctaacagacaggaccctcagctgcaggtctgttggagtttgctagaggtccactccagacgctgtttgcctgggtatcagcagcagtggctgcagaagagtggatttttgtgaaccgcgaatgctgctgtctgatcgttcctctggaagttttgtcttagaggagtacccggccatgtgaggtgtcagtctgcccctactggggggtgcctcccagttaggctgctcaggagtcaggggtcagggacccacttgaggaggcagtctgctcgttctcagatctccagctgcatgctgggagaaccactgctctcttcaaagctgtcagacagggacatttaagtctgcagaggttactgctgtctttttgtttgtctgtgtcctgcccccagaggtggagcctacagaggccgacaggcctccttgagctatggtgggctccacccagttcgagcttccaggctgctttgtttaccgaagcaagcctgggcaatggcgggcgcccctcccccagcctcgctgctgccttgcagtttgatctcagactgctctgctagcaatcagtgagactccgtgggcgtaggaccctccgagccaggtgcgggatataatctcctggcacgccgctttttaagcctgttggaaaatcgcagtattagcgtgggagtgacctgactttccaggtgctgtctgtcaccccttcctttgactaggaaagggaactccctgaccccttgtgctccccaactaaggcaatgcctcaccctactttggctcgcgcacggtgcgctgcacccactgtcctgcgcccactatctggcagtccctagtgagatgaacccggtacctcagatggaaatgcagaaatcacccatcttctgcgtcgctcgtgctaggagctgtagaccagagctgttcctattcagccaccttggctgccc

SEQ ID NO: 10455 - DNA, 6044 bp, Homo sapiens
ttttctttttcttttttttttttaattaactttaagttttagggtacatgtgcacattgtgcaggttagttacatatgtatacatgtgccatgctggtgcgctgcacccactaactcgtcatctagcattaggtatatctcccgatgctatccctcccccctccccccaccccaccacagtccccagagtgtgatattccccttcctgtgtccatgtgatctcattgtgcaattcccacctatgagtgagaatatgcggtgtttggttttttgttcttgcgatagtttactgagaatgatgatttccaacttcaaccacgtccctacaaaggacatgaactcatcattttttatggctgcatactattccatggtgtatatgtgccacattttcttcatccagtctatcattgttggacatttgggttggttccaagtctttgctattgtgaattgtgccgcaataaacatacgtgtgcatgtgtctttatagcagcatgatttatagtcctttgggtatatacccagtaatgggatggctgggtcaaatggtatttctagttctagatccctgaggaatcgccacactgacttccacaatggttgaactagtttacagtcccaccaacagtgtaaaagtgttcctatttctccacatcctctccagcacctgttgtttcctgactttttaatgattgccattctaactggtgtgagatggtatctcactgtggttttgacttgcatttctctgatggtcagtgatgatgagcattttttcatgtgttttttggctgcataaatgtcttcttttgagaagtgtctgttcatgtccttcgcccactttttgatggggttgtttgtttttttcttgtaaatttgtttgagttcattgtagattctggatattagccctttgtcagatgagtaggttgcgaaaattttctcccattttgtaggttgcctgttcactctcatggtagtttcttttgctgtgcagaagctctttagtttatttagatcccatttgtcaattttgtcttttgttgccactgcttttggtgttttagacatgaagtccttgcccatgcctatgtcctgaatggtaatgcctaggttttcttctagggtttttatggttttaggtctaacgtttaagtctttaatccatcttgaattgatttttgtataaggtgtaaggaagggatccagtttcagctttctacatatgcctagccagttttcccagcaccatttattaaatagggaatcctttccccattgcttgtttttctcaggtttgtcaaagatcagatagttgtagatatgtggcgttatttctgagggctctgttctgttccattgatctatatctctgttttggtaccagtaccatgctgttttggttactgtagccttgtagtatagtttgaagtcaggtagtgtgatgcctccagctttgttcttttgtcttaggattgacttggcgatgcgggctcttttttggtttcatatgaactttaaagtagtttcttccaattctgtgaagaaaggcattggtagcttgatggggatggcattgaatctgtaaattaccttgggcagtatggccattttcacgatattgattcttcctacccatgagcatggaatgttcttccatttgtttgtatcctcttttatttccttgagcagtggtttgtagttctccttgaagaggtccttcacatcccttgtaagttggattcctaggtattttattctctttgaagcaattgtgaatgggagttcactcatgatttggctctctgcttgtctgttgttggtgtataagaatgcttgtgatttttgtacattgattttgtatcctgagactttgctgaagttgcttatcagcttaaggagattttgggctgagacaatggggttttctagatatacaatcatgtcatctgcaaacagggacaatgtgacttcctcttttcctaattgaataccctttatttccttctcctgcctaattgccctggccagaacttccaacactatgttgaataggagtggtgagagagggcatccctgtcttgtgccagttttcaaagggaatgcttccagtttttgcccattcagtatgatattggctgtgggtttgtcatagatagctcttattattttgaaatacgtcccatcaatacctaatttattgagagtttttagcaagaagagttgttgaattttgtcaaaggctttttctgcatctattgagataatcatgtggtttttgtctttggctctgtttatatgctggattacatttattgatttgcgtatattgaaccagccttgcatcccagggatgaagcccacttgatcatggtggataagctttttgatgtgctgctggattccttttgccagtattttattgaggatttttgcatcaatgttcatcaaggatattggtctaaaattctctttttttgttgtgtctctgcctggctttggtatcagaatgatgctggcctcataaaatgagttagggaggattccctctttttctgttgattggaatagtttcagaaggaatggtaccagttcctccttgtacctctggtagaattcggctgtgaatccatctggtcctggactctttttggttggtaaactattgattattgccacaatttcagctcctgttattgatctattcagagattcaacttcttcctggtttagtcttgggagagtgtatgtgtccaggaatttatccatttcttctagattttctagtttatttgtgtagaggtgtttgtagtattctctgatggtagtttgtatttctgtgggatcagtggtgatatcccctttatcattttttattgcatctattggattcttctctctttttttctttactagtcttgctagtggtctatcaattttgttgatcctttcaaaaaaccagctcctggattcattaattttttgaaggggttttgtctctctatttccttcagttctgctctgaaattagttatttcttgccttctgctagcttttgaatgtgtttgctcttgcttttctagttcttttaattgtgatgttagggtgtcaattttggatctttcctgctttctcttgtgggcatttagtgctataaatttccctctacacactgctttgaatgcatcccagagattctggtatgttgtgtctttgttctcattggtttcaaagaagatctttatttctgccttcatttcgttatgtacccagtagtcattcaggagcaggttgttcagtttccatgtatttgagtggttttgagtgagattcttaatcctgagttctagtttgattgcactgtggtctgagagatagtttgttataatttctgttcttttacatttgctgaggaaagctttacttccaagtgtgtggtcaattttggaataggtgtggtgtggtgctgaaaaaaatgtatatcctattgatttggggtggagagttctgtagatgtctattaggtctgcttggtgcagagctgagttcaattcctgggtatccttgttgactttctgtctcattgatctgtctaatgttgacagtggggtgttaaagtctcccattattaatgtgtaggagtctaagtctctttgtaggtcactcaggacttgctttatgaatctgggtgctcctgtattgggtgcatatatatttaggatagtcagctcttcttgttgaattgatccctttaccattatgtaatggccttctttgtctcttttgatctttgttggtttaaagtctgttttatcagagactaggattgcaacccctgcctttttttgttttccatttgcttggtagatcttcctccatccttttattttgagcctatgtgtgtctctgcacgtgagatgggtttcctgaatacagcacactgatgggtcttgactctttatccaatttgccagtctgtgtcttttaattggagcatttagtccatttacatttaaagttaatattgttatgtgtgaatttgatcctgtcattatgatgttagctggttattttgctcattagttgatgcagtttcttcctagtctccatggtctttacattttggcatgattttgcagcggctggtaccggttgttcctttccatgttcaatgcttccttcaggagctcttctaaggcaggccttgtggtgacaaaatctctcagcatttgcttgtctgtaaaggattttatttctccttcacttatgaagcttagtttggctggatatgagattctgggttgaaaattcttttctttaagaatgttgaatattggcccccactgtcttctggcttgtagggtttctgccgagagatccgctgttagtctgatgggcttccctttgagggtaacccgacctttctctctggctgcccttaacattttttccttcatttcaactttggtgaatctgacaattatgtgtcttggagttgctcttctcgaggagtatctttgtggcattctcttatttcctgaatctgaatgttgccctgccttgctagattggggaagttctcctggataatatcctgcagagtgttttccaacttggttccattctccccatcactttcaggtacaccaatcagacgtagatttggtcttttcacatagtcccatatttcttggaggctttgctcatttctgtttattcttttttctctaaacttcccttcttgcttcatttcactcatttcatcttccattgctgataccctttcttccagttgattgcatcggctcctgaggcttctgcattcttcatgtaattctcgagctttggttttcagctccatcagctcctttaagcacttctctgtactggttattctagttatacattcttctaaatttttttcaaagttttcaacttctttgcctttggtttgaatgtcctcccatagctcagagtaatttgatcgtctgaagccttcttctctcagctcgtcaaagtcattctccatccagctttgttccgttgctggtgagggactgcgttcctttggaggaggagaggcgctctgctttttagagtttccagtttttctgttctgttttttccccatctttgtggttttatctacttttggtctttgatgatggtgatgtacagatgggtttttggtgtggatgtcctttctgtttgttagttttccttctaacagaaaggaccctcagctgcaggtgtgttggaataccctgccgtgtgaggtgtcagtgtgcccctgctggggggtgcctcccagttaggctgctcgggggtcaggggtcagggacccacttgaggaggcagtctgccggttctcagatctccagctgcgtgctgggagaaccactgctctcttcaaagctgtcagacagggacatttaagtctgcagaggttactgctgtctttttgtttgtctgtgccctgctcccagaggtggagcctacagaggcaggcaggcctccttgagctgtggtgggctccacccagttcgagcttccaggctgctttgtttacctaatcaagcctgggcaatggcgggcgcccctcccccagcctcgctgccgccttgcagtttgatctcagactgctgtgctagcaatcagcgagactctgtgggcgtaggaccctctgagccagatgcgggatataatctcgtggtgcgccgttttttaagcccatcggaaaagcgcagtatttgggtgggagtgacccgattttccaggtgccatccatcacccctttctttgactcagaaagggaactccctgaccccttgcgcttcccaagtgaggcaatgccttgccctgcttcggctcgcgcacggtgcacgcacccactgacctgcgcccactgtctggcactctctagtgagatgaacccggtacctcagatggaaatgcagaaatcacccgtcttctgcgtcgctcacactgggagctgtagaccggagctgttcctattcggctatcttggctcctcccccata

SEQ ID NO: 10456 - DNA, 10789 bp, Homo sapiens
ttttttttactttatttttttatttttttattttttttttattattattattttttattatactctaagttttagggtacacgtgcacattgtgcaggttagttacatatgtatacatgtgccatgctggtgcgctgcacccactaatgtgtcatctagcattaggtatatctcccaatgctatccctccccgctcccccgaccccaccacagtccccagagtgtgatattccccttcctgtgtccatgtgatctcattgttcaattcccacctatgagtgagaatatgcggtgtttggttttttgttcttgcgatagtttactgagaatgatggtttccaatttcatccatgtccctacaaaggatatgaactcatcattttttatggctgcatagtattccatggtgtatatgtgccacattttcttaatccagtctatcattgttggacatttggattggttccaagtctttgctattgtgaatagtgccgctataaacatacgtgtgcatgtgtctttatagcagcatgatttatagtcctttgggtatatacccagtaatgggatggctgggtcaaatggtatttctagttctagatccctgaggaatcgccacactgacttccacaatggttgaactagtttacagtcccaccaacagtgtaaaagtgttcctgtttctccacatcctctccagcacctgttgtttcctgactttttaatgattgccattctaactggtgtgagatgatatctcatagtggttttgatttgcatttctctgatggccagtgatgatgagcatttcttcatgtgttttttggctgcataaatgtcttcttttgagaagtgtctgttcatgtccttcgcccactttttgatggggttgtttgtttttttcttgtaaatttgtttgagttcattgtagattctggatattagccctttgtcagatgagtaggttgcgaaaattttctcccatgttgtaggttgcctgttcactctgatggtagtttcttttgctgtgcagaagctctttagtttaattagatcccatttgtcaattttggcttttgttgccattgcttttggtgttttggacatgaagtccttgcccacgcctatgtcctgaatggtaatgcctaggttttcttctagggtttttatggttttaggtctaacgtttaaatctttaatccatcttgaattgatttttgtataaggtgtagggaagggatccagtttcagctttctacatatggctagccagttttcccagcaccatttattaaatagggaatcctttccccattgcttgtttttctcaggtttgtcaaagatcagatagttgtagatatgcggcattatttctgagggctctgttctgttccattgatctatatctctgttttggtaccagtaccatgctgttttggttactgtagccttgtagtatagtttgaagtcaggtagtgtgatgcctccagctttgttcttttggcttaggattgacttggcaatgtgggctcttttttggttccatatgaactttaaagtagttttttccaattctgtgaagaaagtcattggtagcttgatggggatggcattgaatctgtaaattaccttgggcagtatggccattttcacgatattgattcttcctacccatgagcatggaatgttcttccatttgtttgtgtcctcttttatttccttgagcagtggtttgtagttctccttgaagaggtccttcacatcccttgtaagttggattcctaggtattttattctctttgaagcaattgtgaatgggagttcacccatgatttggctctctgtttgtctgttgttggtgtataagaatgcttgtgatttttgtacattgattttgtatcctgagactttgctgaagttgcttatcagcttaaggagattttgggctgagacgatggggttttctagataaacaatcatgtcgtctgcaaacagggacaatttgacttcctcttttcctaattgaataccctttatttccttctcctgcctgattgccctggccagaacttccaacactatgttgaataggagtggtgagagagggcatccctgtcttgtgccagttttcaaagggaatgcttccagtttttgcccattcagtatgatattggctgtgggtttgtcatagatagctcttattattttgaaatacgtcccatcaatacctaatttattgagagtttttagcatgaagggttgttgaattttgtcaaaggctttttctgcatctattgagataatcatgtggtttttgtctttggctctgtttatatgctggattacatttattgatttgcgtatattgaaccagccttgcatcccagggatgaagcccacttgatcatggtggataagctttttgatgtgctgctggattcggtttgccagtattttattgaggatttttgcatcaatgttcatcaaggatattggtctaaaattctcttttttggttgtgtctctgcccggctttggtatcagaatgatgctggcctcataaaatgagttagggaggattccctctttttctattgattggaatagtttcagaaggaatggtaccagttcctccttgtacctctggtagaattcggctgtgaatccatctggtcctggactctttttggttggtaaactattgattattgccacaatttcagagcctgttattggtctattcagagattcaacttcttcctggtttagtcttgggagagtgtatgtgtcgaggaatgtatccatttcttctagattttctagtttatttgcctagaggtgtttgtagtattctctgatggtagtttgtatttctgtgggatcggtggtgatatcccctttatcattttttattgtgtctatttgattcttctctctttttttctttattagtcttgctagcggtctatcaattttgttgatcctttcaaaaaaccagctcctggattcattgattttttgaagagttttttgtgtctctatttccttcagttctgctctgatcttagttatttcttgccttctgctagcttttgaatgtgtttgctcttgcttttctagttcttttaattgtgatgttagggtgtcaattttggatctttcctgctttctcttgtaggcatttagtgctataaatttccctctacacactgctttgaatgcgtcccagagattctggtatgtggtgtctttgttctcgttggtttcaaagaacatctttatttctgccttcatttcgttctgtacccagtagtcattcaggagcaggttgttcagtttccatgtagttgagcggctttgagtgagatttttaatcctgagttctagtttgattgcactgtggtctgagagatagtttgttataatttctgttcttttacatttgctgaggagagctttacttccaactatgtggtcaattttggaataggtgtggtgtggtgctgaaaaaaatgtatattctgttgatttggggtggagagttctgtagatgtctattaggtctgcttggtgcagagctgagttcaattcctgggtatccttgttgactttctgtctcgttgatctgtctaatgttgacagtggggtgttaaagtctcccattattaatgtgtgggagtctaagtctctttgtaggtcactgaggacttgctttatgaatctgggtgctcctgtattgggtgcataaatatttaggatagttagctcctcttgttgaattgatccctttatcattatgtaatggccttctttgtctcttttgatctttgttggtttaaagtctgttttatcagagactaggattgcaacctctgcctttttttgttttccattggcttggtagatcttcctccatccttttattttgagcctatgtgtgtctctgcacgtgagatgggtttcctgaatacagcacactgatgggtcttgactctttatccaacttgccagtctgtgtcttttaattgcagaatttagtccatttatatttaaagttaatattgttatgtgtgaatttgatcctgtcattatgatgttagctggtgattttgctcattagttgatgcagtttcttcctagtctcgatggtctttacattttggcatgattttgcagcggctggtaccggttgttcctttccatgtttagcgcttccttcaggagctcttttagggcaggcctggtggtgacaaaatctctcagcatttgcttgtctataaagtattttatttctccttcacttatgaagcttagtttggctgatacgaaattctgggttgaaaattcttttctttaagaatgttgaatattggcccccactctcttctggcttgtagggtttctgccgagagatccgctgttagtctgatgggctttcctttgagggtaacccgacctttctctctggctgcccttaacattttttccttcatttcaactttggtgaatctgacaattatgtgtcttggagttgctcttctcgaggagtatctttgtggcattctctgtatttcctgaatctgaacgttggcctgccttgctagattggggaagttctcctggataatatcctgcagagtgttttccaacttggttccattctccacatcactttcaggtacaccaatcagacgtagatttggtcttttcacatagtcccatatttcttggaggctttgctcatttctttttattcttttttctctaaacttcccttctcgcttcatttcattcatttcatcttccattgctgataccctttcttccagttgatcgcatcggctcctgaggcttctgcattcttcacgtagttctcgagccttggttttcagctccatcagctcctttaagcacttctctgtattggttattctagttatacattcttctaaatttttttcaaagttttcaacttatttgcctttggtttgaatgtcctcccgtagctcagagtaatttgatcgtctgaagccttcttctctcagctcgtcaaaatcattctccatccagctttgttccgttgctggtgaggaactgcattcctttggaggaggagaggcgctctgcgttttagagtttccagtttttctgttctgttttttccccatctttgtggttttatctacttttggtctttgatgatggtgatgtacagatgggttttcggtgtagatgtcctttctggttgttagttttccttctaacagacaggaccctcagctgcaggtctgttggaataccctgccgtgtgaggtgtcagtgtgcccctgctggggggtgcctcccagttaggctgctcgggggtcaggggtcagggacccacttgaggaggcagtctgcctgttctcagatctccagctgcgtgctgggagaaccactgctctcttcaaagctgtcagacagggacacttaagtctgcagaggttactgctgtctttttgtttgtctgtgccctgcccccagaggtggagcctacagaggcaggcaggcctccttgagctgtggtgggctccacccagttggagcttcccggctgctttgtttacctaagcaagcctgggcaatggcgggcgcccctcccccagcctcgttgccgccttgcagtttgatctcagactgctgtgctagcaatcagcgagattccgtgggcgtaggaccctctgagccaggtgtgggatatagtctcgtggtgcgccgtttcttaagccggtctgaaaagcgcaatattcgggtgggagtgacccgattttccaggtgcgtccgtcacccctttctttgactcagaaagggaactccctgaccccttgcgcttcccaggtgaggcagtgcctcgccctgcttcggctcgcgcacggtgcgcacacacactggcctgcgcccaccgtctggcactccctagtgagatgaacccggtacctcagatggaaatgcagaaatcacccgtcttctgcgtcgctcatgctgggagctgtagaccggagctgttcctattcggccatcttggctcctcctcctccaatttttccataagtattttgaagctattattccgttgccttatgattctaatgttgctattgagaattccattatgagtctaatttagtgatcctcaatcaaggacaatattgccctccaaggacatctggcaatgtctggagacatttttggttgtcacaactggggggaagatgctactagcatctaatagttagaatctaggaaaaatgctaaatatcctacaatgtacagaacagtcctccacaactaagaagtatctggtccacaatgtcagtagtgctgaaattgagaaactctggtcaaattcttgttgctgtataagtaatatgttttctctttggttactttttaaaaacttgtctttgttgttttagtgttttgctatgagatgactatggtgtatttattgtcattcatcttgtttgggactcattgtacttcttacatctgagaatttatatctttcacctattttagaatattctcagtcattttcactgcaaatattttctgtttctcactttctcttttatatctttatggatgtcttactagatatatgttgggccttttcattctatttttcatgttaattaatctgtcacacttttcatctctttcaaaacctattacatttggataatttcctcatatatttcttccagttcactgatttttcttctaatatctgtagcctgtttttgaatatgtccattgtttttaatttttatgttccacatttttatttccagaatttctatttatttttcaaacattttttcatagtcacttttaatagaattttgagtctttcttttgtccttatttcaacatacttatttcatactattttttatattttagagctttttttctattatctcacttattggtgctctacccttgcagttttttctgtctgccaacccatttgtgatggaaaatatgtttgtgtgtgttataaattcagattgtgcccttatagtaaacagggcttgttttatctatggtaaccccttattttctgagtatgtagattttttttctaccaggtgtttcgggagtatcaccagccaagaacctaattttacattaatttatcaatttgaagattttccatacaaagtgaatggtgtaaattctaaactccaatccacatgaggtacagactccactattgctattttaactccgaagctatattttctatcctctcgacttcccttctttgtctaatccaaggtcaaccatagcatccattcacaagtttacttttctgtttgtaatttcctcttcatttctggcacatggaaatttcctttcttgtcagctcagctatgcatttaaaataatttgtgttgtaattcgtcaagtattatagagggagggttttcagactgttgtagagcagaacaagaagtcagcactcatcttatctctctttacttattttctatttcttttccccaaggagttgattggcatagatctacatgccctgtgtcttgttccagtcaaggatggcatcgctctgttcaagtcatggcctttgtaaaatatgacctgtcttaccgtcttcttccacttctcaagatgctgctggccttattagtgtattaaagtttatttccttctccagtccctcttaactgtctcctcccttggggctgcctagcacagaccattgccctgcacacaatgtaagcctcctgggccttatataagccacatgcttaccatgtgtacatacacacatttttgcatctgtctcaccgagttttcctcctatactggtgttgtgcttttcattggcctttccttgaattataagggcaagatccactcttaagcttaggacaaaaatgcagagactttaagagacttaagtgatataatgaatgccagggaaagaaagaagcaagaagtctcatttctgtgtcctaccctaaacttggccttccaaattcaacttttatcaaaacatttatcttttttaaaccttttatcaaaaccctcaaacgtagggggttttcagttgtttgctcaaatacgtaagtggtcatttgtttctcattttccttttcatgctcatgtttatactccttggtgagaaacgcagagggaagaaagggttattgccaccctaaaatcctaattaaatttttccttttgattcttctcagatataaacttctaaatgcaattattagatatgttcagacaaaaatctttatgattgaaaacataattattgatgctgatttatgcttcctgttgttcttattaaattgcagccgtttaaatatctagtaggctgctcttttaaggcttttttgctaagacagaagagctaataatgcatttgggagctctgtcataaagctctccaggcacatgctcattagtaagcttctacccagtgtgtcaatcaaatcattgcaaattgcatctgaaaattattctgcccattttcaaaggattttttgttacgattccagaaaaatgcaaatttgttccagccagtttatcctaagatgtgttcttctaaagcatcactgtgatattgataggctattattccaagctaagttcagatcttcatacaaagaactgagcctatctaaagcaacgaaatgcagcaggccctaactgggggctgtactcaactattgggaatgtctgagtattcattttgagaccacttccatccatagcatgatgtgtgaacttaggtaaggtggctgcatatagctctgctgatacactgttatttttttcctgatttctctgtctcttatagatttcataaatattgtcagttaggatgaaggaatttcaacctctctataatagctgatgctttataaaactaaaagagatctcaggagaaatatttgataactaatgaattaatctttgctaatgggtgggtcaaataatttgtattagtgacactgcaatacagtttgcccaggacacccagaaagtatgatctaaccttcttcactttcaaaacagagagacagagagcagtgttatggaaaaggtgtaggtgttggaaactgatcaaccaaattctgatcccaattctgctgcttacagctgtgtgacttcaggcaagtttctaagcctgtctgaaccaccattcactttatttccttacaatgaagaaatcattacatctaagcaggattaaactaggtactcaattattttatttcccttacccttcattagtagcaaaatgacaggctaatcaggtattagagattttttcaaaactccatcaattttctgttcagtaagagatcagtgatgaaaataagcatgactcaaatataattattctaatactgtatatcctaatcttttgttctatctcattgacagaacacttgagagtaattttagatttttgtaagtcatcaatccatcattatatgtgggccaacatctgtgcataacgactgggaattactaagaaaaatttattcatactgattgaatagcagagccatatgcagaagacaccttttattttattttattttattattatactttaagttttagggtacatgtgcacattgtgcaggttagttacatatgtatacatgtgccatgctggtgcactgcacccactaactcgtcatctagcattaggtatatctcccaaagctatccctcccccctccccccaccccacaacagtccccagagtgtgatgctccccttcctgtgtccatgtgatctcattgttcaattcccacctataagtgagaatatgcggtgtttggttttttgttcttgtgatagtttactgagaatgatgatttccaatttcatccatgtccctacaaaggacatgaactcatcattttttatggctgcatagtattccatggtgtatatgtgccacattttcttaatccagtctatcattgttggacatttgggttggttccaagtctttgctattgtgaatagtgccgcaataaacatacgtgtgcatgtgtctttatagcagcatgatttatagtcctttgggtatatacccagtaatgggattgctgggtcaaatggtatttctagttctagatccctgaggaattgccacactgacttccacaatggttgaactagtttacagtcccaccaacagtgtaaaagtgttcctatttctccacatcctctccagcacctgttgtttcctgactttttaatgattgccattctaactgccgtgagatggtatctcattgtggttttgatttgcattcctctgatggccagtgatgatgagcatttcttcatgtgttttttggctgcataaatgtcttcttttgagaagtgtctgttcatgtcctttgcccactttttgatggggtttgttttttcttgtaaatttgtttaagttcattgtagattctggatattagccctttgtcagatgagtaggttgtgaaaattttctcccattttgtaggttgcctgttcactctgatggtagtttcttttgctgtgcagaagctctttagtttaattagatcccatttgtcaattttgtcttttgttgccattgcttttggtgttttagacatgaagtccttgcccatgcctatgtcctgaatggtattgcctaggttttcttctagggtttttatggttttaggtttaacgtttaagtctttaatccatcttgaattga

SEQ ID NO: 10457 - DNA, 9322 bp, Homo sapiens
tttttttttttcaagagaattaaatcgtttattgattatgcatgataatggaaggtacacaaacttcattcccatctataattttattgggtaccattattcaatttagatatattgcataggatatgccaacaatcgttttaataaccaataattccatgattttgctttgctaatcccttttaatggtgaacttcaggtcacaacagtaactatcagttcaaccacaccaaggtttctgaagacaatggtttctccacccaagcaggttgtatataaattccaaaaagaacctggcatcaccctgaaggaactctaacttcacactgtaggggaaatttaccaagatggcttcagagtagaacaactttacacagcacattaaaaaaaaaaaagacatttattcagcgtcccaatcaggctattatatttagcaatcaacagcataggtgaaaaaaaaatctacattaaaaccctttgttggcatggtttacactttccacagaacagaaactaaaataacctgttacacaattagtcacaaatacagtcctcgagttttttgcccacacacatgagtatttgtctaaaacatgtctgctttgtagcagctgggccctgccaccactgtgcttggctgagttcacaaatctgttgtaacctgtagcttccctgtcacttctctggctctcctctcctgctaagctttgtttcctaattaaaatcttctgccactgccatagctactgctgctactggaaccaccatagccaccttggttttgtggtttggcaaagtattggcctccaccaccacaggggacagagcttctgcctccaaagtttcctcccttcaggggtccaaaatttggagactgattgttgtaattgtcaaaatcactgtagcttccgccacctccaaaattgcttccatcattaccaaatccactgtagtcatccccagccaccatattcaccaccaccacagctgccaccaaagccaccacgaccatggaagtttcctccatgacccaagttgtcattcccgctgaaaccacctccatgaccaccaccaaagtttccagaaccactcttgctttgacagggctttcctagcttcacagctgtggccattcaagtatgctatttctgaatgacagtcttatccatggagtcaccgttgtcaaacgttacaaaggcaaagccccttttcttgccaatgcctcggtcagtcatgatttcaatcacttcaattttttccatactgttcaaaatgatcccttaggtgatgttcttcagtgtcttctttaatgccaccaacaaatatatttttcacagttaactgggcacctggtctttgagaattttctcttgagacaactctctttgcttctacaactcttttttttttttttttttttttttttttttttgagatggagtcttgctctgtcgcccaggctggagtgcagtggtgccatctcagctcactgcaagctccgcctctcgggttcatgccattctcctgcctcagcctcctgtgtggctgggactacaggcgcctgccaccacatctggctaagtttttgtatttttagtagagacgggtttcaccgtgttagccaggatggtctcgatctcctgacctcgtgatccgcctgccttagccccccaaagtgctgggattataggcgtgaggttctacaactcttccatctaccttgtgtggccttgcattcatggctgcatccacctcctccacagtggcacacatgacaaacccacaggccctggagcgcttggtgtttggatctctcattaccacacagtccgtgagcgttccccattgctcaaaatggctcctcaggctctcattggttgtttcaaagctcaaccctccaatgaagagcttccttagctgtttgggctctttaggagactcttgacttagacatgactgacagggagaagagagactttaaccatgcttccttggtggcctccacgggcaggtaggtttgttttgttttgttttgttttgttttgttttggtaaatagttttcccaccattttattataagcattatcaaatatactgaataattgaaataatcagaaacaacaaatttgcatatatccaccatctttttttttttttttgagacagagtttccctctgttgcacaggctggagagcaatggggaatggggggatctcagctcactgcaacctctgtctcttgggttcaaccaattctcatgctttagcctcccacgtagctgagattatgtgcactgtgcaccaccacatccggctaatttttgtatttttagtagagatggggtttcaccatgttggccaggctgatcttgaactcctagcctcatgtcatctgcccaccttggcctctcaaagtgctgggatcacaggcgtgagctaccacattcagccactaccatctagattctacaattagcaattaatttgctttattatacatttattcaaccatctatttgttgatacctctgtccatccattaatccatctttttttttgaggcatttcaaggtaagttgtagatatcaacatacttcattcaatacttcagcatgcatatcatttagagtcatgtatatgagtttttcttggtaagattttacatatagtagatgcacaatctgtattttatttatttatttatttttggagacagacctctgtcacccaggctggagtgcagtggtgctatcatggctcactgaagcctcaacttcccaggctgaagtaatcttcccacctcagcctcccgagtagctgtgtctctaggtgcatgccactaggcctagctaattcttaaaatttttttgtagagacagggtctcacaattttgcccaggctggtctcaaactcctggcctcaagttatcctctcaccttagcctcccaagtagcttaaattactggcataagccaccatgcccagctttgatgcacaatcttaagtataccattcagtgaattttgacaaatgcagacacttatataatccaaactcctatcaagatagagaatatttatatcttcccagaaagttcactcacattccttcccagaaaatccccacatatccatccctcaaaaggcaaccactactctcacatttttcaacatgtcttaatatagtacagtgtgtaagagtttcagtgttccatcacctcactgacattggtgttgccaatcttttcattttagacattctgatatatttatagtaatatatctttgactaatgattttgagcatttatttatgtattcataccattctcatatctttcttcgtgaaatattggtctaaatattttgcccattttaaactgggttgtcttattttcttttctctatttttgagttgggatattattttgtcgcccaggctggagtgcagtggcaccatcatagctccctgcagctcaacctcctgggctcatgctatcctcccaccctagccttccagtttctgagattacaggtgtgagcaactgcaccctgatgcctctttattattgagctgtatttttactttggataatagtcctttctcaaatatatatatttgcacctttttctcagcctgtggcttaccgattcactttcttagcactgtcttttggtgcagaatattggctcaaccagttatgcaaatctttcaagtattgacacatttcattatacaaaattaaaatgacattcttttttaaattttattattattctttaagttttagggtacatatgcacaacgtgcaggtttgttacatatgtatacatgtgccatgttggcgtgctgcacccattaactcgtcatttagcattaggtatatctcctaatgctacccctccccactccccctaccccacaacaggccccggtgtgtgatgttccctttcctgtgtccatgtgttctcattgttcaattcccatctatgagtgagaacatgtggtgtttcttttttgtccttgcgatagtttgctgagagtgatggtttccagcttcatccatgtccctacaaaggacatgaactcatcgttttttatggctgcatagtattccatggtgtatatgtgccacattttcttaatccagtctatcatcattggacatttggcttggttccaagtctttgctattgtgaatactgccacaataaacatacgtgtgcatgtgtctttatagcagcatgatttataatcctttgggtatatacccagtattgggatggctgggtcaaatggtatttctagttctagatccctgaggaatcgccacactgacttccacaatggttgaactagtttacagtcccaccagcagtgtaaaagtgttcctatttctccacatcctctccaacacctgttgtttcctgactttttaatgattgccattctaactggtgtgagatggtatctcattgtggttttgatttgcatttctctgatggccagtgatgatgagcattttttcatgtgtctgttggctgcataaatgtcttctttcgagaagtgtctgttcatatccttcacccactttttgatggggttgtttttttcttgtaaatttgtttgagttcattgtagattctggatattagccctttgtcagatgagtaggttgcaaaaatgttctcccattctgtaggttgcctgttcactctgatggtagtttcttttgctgtgcagaagctctttagttgaattagatcccatttgtcaattttggcttttgttgccattgcttttggtgttttagacatgaagtccttgcccatgcctatgtcctgaatggtattgcctaggttttcttctagggtttttctggttttaggtctaacctgtaagtctttaatccatcttgaattaatttttgtataaggtgtaaggaagggatccagtttcagctttctacatatggctagccagttttcccagcaccatttattaaataggaaatcctttccccattgcttgtttttctcaggtttgtcaaagatcagatagttgtagatacgtggcattatttctgagggctctgttctgttccattggtctatatctctcttttggtaccagtaccatggtgttttggttactgtagccttgtagtatagtttgaagtcaggtagcgtgatgcctccagctttgttcttttggcttaggattgacttggcaatgtgggctcttttttggttccatatgaactttaaagtagttttttccaatactgtgaagaaagtcaatggtagcttgatggggatggcattgaatctataaatgaccttgggcagtatggccattttcacgatattgattcttcctacccatgagcatggaatgttcttccatttgtttgtatcctcttttatttcattgagcagtggtttatacttctccttgaagaagtccttcacatcccttgtaagtttgattcctaggtattttattctctttgaagcaattgtgaatgggagttcactcatgatttggctctctgtttgtctgttactggtgtataagaatgcttgtgattttttacattgatttttgtatcctgagactttgctgaagttgcttatcagcttaaggagattttgggctgagacgatggggttttccagatatgcaatcatgtcatctgcaaacagggacaatttgacttcctcttttcctaattgaatgccctttatttccttctcctgcctgattgccctggccagaacttccaacactatgttgaataggagtggtgagagagggcatccctgtcttgtgccagttttcaaagggaatgcttccagtttttgtccattcagtatgatattggctgtgggtttgtcatagatagctcttactattttaagatacgtcctatcaatacctaatttattgagagtttttagcatgaagggctgttgaattttgtcaaaggccttttctgcctctattgagataatcatgtggtttttgtctttggttctgtttacatgctggtttatgtttactgattttcgtgtgttgaaccagccttgcatcccaggcatgaagtccacttgatcatggtggataagctttttgaggtgctgctggatttggtttgccagtattttattgaggatttttgcatcaatgttcatcaaggatattggtctaaaattctctttttttgttgtgtctctgccaggctttggtatcaggatgatgctggcctcataaaatgagttagggaggattccctctttttctattgattggaatagtttcagaaggaatggtaccagctcctccttgtacttctggtagaattcaggtgtgaatccatctggtcctggactttttttggttggtaggctattaattattgcctcaatttcagagcctgttattggtctattcagagattcaacttcttcctggtttagtcttgggtgggtgtatgtgtcgaggaatttatccatttcttctagattttctagtttatttgtgtagaggtgtttatagtattctctgatggtagtttgtatttctgtggaatcggtggtgatatcccctttgtcattttttattgcatctgtttgattcttctctcttttcttctttattagtcttgctagaggtctatcaattttgttgatcttttcaaaaaaccagctcctggattcattgattttttgaagggttttttgtgtctctatttccttcagttctgctctgatcttagttatttcttgccttctgctagcttttgaatgtgtttgctcttgcttctctagttcttttaattgtgatgttagggtgtcagttttagatctttcctgctttctcttctgggcatttagtgctataaatttccctctacactctgctttgaatgtgtcccagagattctggtatgttgtgtctttgttcttgttggtttcaaagaacatctttatttctgccttcatttcgttatgtacccagtagtcattcaggagcaggttgttcagtttccatgtagttgtgcggttttgagtgagtttcttaatcctgagctctagtttgattgcactgtggtctgagagacagtttgttataatttctgttcttttacatttgctgaggagtgctttccttgcaactatgtggtcaattttggaataggtgtggtgtggtgctgaaaagaatgtatattctgttgatttggggtggagagttctgtagatgtctattaggtccgcgtggtgcagagctgagttcaattcctggatatccttgttaactttctgtctcgttgatctgtctaatgttgatggtggggtgttaaagtctcccattattattgtgtgggagtctaagtctctttgaaggtcactcaggacttgctttatgaatctgggtgctcctgtattgggtgcatttatatttaggacagttagctcttcttgtggaattgatccctttaccattatgtaatggccttctttgtttcttttgatctttgttggtttaaagtctgttttatcagagactaggattgcaacccctgcctttttttgttttccatttgcttggtagatcttcctccatccttttattttgagcctatatgtgtctctgcacgtgagatgggtttgctgaattcagcacactgatgtgtcttgactctttatccaatttaccattctgtgtcttttaattggagcgtttagcccatttacatttaaggttaatattattatgtgtgaatttgatcctgtcattatgatgttagctggttattttgctgattagttgaggcagtttcttcctagcctcgatggtctttacaatttggcatgtttttgcagtggctggtaccagttgttcctttccatgtttagtgcttccttcaggagctcttttagggcaggcctggtggtgacaaaatctctcagcatttgcttgtctgtaaaggattttatttctccttcacttatgaagcttagtttggctggatattaaattctgggttgaaaattctttcctttaagaatgttgaatattggcccccactctcttctggcttgtagagtttctgccgagagatcagctattagtctgatgggcttccctttgtgggtacccgacctttctctctggctgcccttaacatttttttcctttatttcaactttggtgaatctgacaattatgtgtcttggagttgctcttctcaaggactatctttgtggcattctgtgtatttcctgaatttgaatgttggcctgccttgctggagtggggaagttctcctggataatattctgcagagtgttttccagcttggttccattctccctgtcactttcaggtacaccaatgagacgttgatttggtcttttcacatggtcccatatttcttggaggctttgttcgtttctttttattctttttttcaaaacttctcttcttgcttcatttcattcatttcgtcttccatcgctgattccctttcttccagttgatcgcatcagctactgaggcttgtgcattcgtcacgtagttctaatgccatggttttcagctccatcaggtcctttaaggacttctctgcattggttattctagttagccgttcatctaattttttttcaaggttcttaacttctttgccatgggttcgaacttcctcctttagctcggagtagtttgatcttcttaagccttctctcaactcatcaaagtcattctctgtccagctttgttccgttgctggtgaggagctgcattgctttggaggaggagaggtgctctgatttttagagtttcccgtttttctgctttgttttttccccatctttgtggttttatctacctttggtctttgataatggtgacgtacagatgggtttttggtgtggatgtcctttctgtttgttagttttccctctaacagtcaggaccctcagctgcaggtctgttggagtttgctggaggtccactccagaccctgtttgcctgggtatcagcagcggtggctgcagaacagcggatattggtgaaccgcaaatgctactgcctgatcattcctctggaagttttgtctcagaggagtacccggccatgtgaggtgtcagtccgcccctactggggggtgcctcccagttagggtactccggggtcagggacccacttgaggaagcagtcttcccattctcagatctcaagctgcgtgctggaagaaccactactctcttcaaagctgtcagacagggacatttaagtctgcagaggttactgctg

SEQ ID NO: 10458 - DNA, 6072 bp, Homo sapiens
ttttttcttttctctaaccagtgcttttctgactctttttttttttttttttatactctaagttttagggtacatgtgcacattgtgcaggttagttacatatgtatacatgtgccatgctggtgcgctgcacccactaatgtgtcatctagcattaggtatatctcccaatgctattcctcccccctcccccgaccccaccacagtccccagagtgtgatattccccctcctgtgtccatgtgatctcattgttcaattcccacctatgagtgagaatatgcggtgtttggttttttgttcttgcgatagtttactgagaatgatggtttccaatttcatccatgtccctacaaaggatatgaactcatcattttttatggctgcatagtattccatggtgtatatgtgccacattttcttaatccagtctatcattgttggacatttgggttggttccaagtctttgctattgtgaatagtgccgcaataaacatacgtgtgcatgtgtctttatagcagcatgatttatagtcctttgggtatatacccagtaatgggatggctgggtcaaatggtatttctagttctagatccctgaggaatcgccacactgacttccacaatggttgaactagtttacagtcccaccaacactgtaaaagtgttcctatttctccacatcctctccagcacctgttgtttcctgactttttaatgattgccattctaactggtgtgagatgatatctcatagtggttttgatttgcatttctctgatggccagtgatgatgagcatttcttcatgtgttttttggctgcataaatgtcttcttttgagaagtgtctgttcatgtccttcgcccactttttgatggggttgtttgtttttttcttgtaaatttgtttgagttcattgtagattctggatattagcccttggtcagatgagtaggttgcgaaaattttctcccgtgttgtaggttgcctgttcactctgatggtagtttcttttgctgtgcagaagctctttagtttaattagatcccatttgtcaattttggcttttgttgccattgcttttggtgttttggacatgaagtccttgcccacgcctatgtcctgaatggtaatgcctaggttttcttctagggtttttatggttttaggtctaacgtttaaatctttaatccatcttgaattgatttttgtataaggtgtaaggaagggatccagtttcagctttctacatatggctagccagttttcccatcaccatttattaaatagggaatcctttccccattgcttgtttttctcaggtttgtcaaagatcagatagttgtagatatgcggcattatttctgagggctctgttctgttccattgatctatatctctgttttggtaccagtaccatgctgttttggttactgtagccttgtagtatagtttgaagtcaggtagtgtgatgcctccagctttgttcttttggcttaggattgacttggcaatgcgggctcttttttggttccatatgaactttaaagtagttttttccaattctgtgaagaaagtcattggtagcttgatggggatggcattgaatctgtaaattaccttgggcagtatggccattttcacgatattgattcttcctacccatgagcatggaatgctcttccatttgtttgtgtcctcttttatttccttgagcagtggtttgtagttctccttgaagaggtccttcacatcccttgtaagttggattcctaggtattttattctctttgaagcaattgtgaatgggagttcacccatgatttggctctctgtttgtctgttgttggtgtataagaatgcttgtgatttttgtacattgattttgtatcctgagactttgctgaagttgcttatcagctttaggagattttgggctgagacgatggggttttctagataaacaatcatgtcgtctgcaaacagggacaatttgacttcctcttttcctaattgaatcccctttatttccttctcctgcctgattgccctggccagaacttccaacactatgttgaataggagcggtgagagagggcatccctgtcttgtgccagttttcaaagggaatgcttccagtttttgcccattcagtatgatattggctgtgggtttgtcatagatagctcttattattttgaaatacgtcccatcaatacctaatttattgagagtttttagcatgaagggttgttgaattttgtcaaaggctttttctgcatctattgagataatcatgtggtttttgtctttggctctgtttatatgctggattacatttattgatttgcgtatattgaaccagccttgcatcccagggatgaagcccacttgatcatggtggataagctttttgatgtgctgctggattcggtttgccagtattttattgaggatttttgcatcaatgttcatcaaggatattggtctaaaattctcttttttggttgtgtctctgcccggctttggtatcagaatgatgctggcctcataaaatgagttagggaggattccctctttttctattgattggaatagtttcagaaggaatggtaccagttcctccttgtacctctggcagaattcggctgtgaatccatctggtcctggactctttttggttggtaaactattgattattgccacaatttcagagcctgttattggtctattcagagattcaacttcttcttggtttagtcttgggagagtgtatgtgttgaggaatgtatccatttcttctagattttctagtttatttgcgtagaggtgtttgtagtattctctgatggtcgtttgtatttctgtgggatcggtggtgatatcccctttatcattttttattgtgtctatttgattcttctctctttttttctttattagtcttgctagcggtctatcaattttgttgatcctttcaaaaaaccagctcctggattcattgattttttgaagggttttttgtgtctctatttccttcagttctgctctgattttagttatttcttgccttctgctagcttttgaatgtgtttgctcttgcttttctagttcttttaattgtgatgttagggtgtcaattttggatccttcctgctttctcttgtaggcatttagtgctataaatttccctctacacactgctttgaatgcgtcccagagattctggtatgtggtgtctttgttctcgttggtttcaaagaacatctttatttctgccttcatttcgttatgtacccagtagtcattcaggagcaggttgttcagtttccatgtagttgagcggctttgagtgagattcttaatcctgagttctagtttgattgcactgtggtctgagagatagtttgttataatttctgttcttttacatttgctgaggagagctttacttccaactatgtggtcaattttggaataggtgtggtgtggtgctgaaaaaaatgtatattctgttgatttggggtggagagttctgtagatgtctattaggtctgcttggtgcagagctgagttcaattcctgggtatccttgttgactttctgtctcgttgatctgtctaatgttgacagtggggtgttaaagtctcccattattaatgtgtgggagtctaagtctctttgtaggtcactgaggacttgctttatgaatctgggtgctcctgtattgggtgcataaatatttaggatagttagctcctcttgttgaattgatccctttaccattatgtaatggccttctttgtctcttttgatctttgttggtttaaagtctgttttatccgagactaggattgcaacccctgcctttttttgttttccattggcttggtagatcttcctccatccttttattttgagcctatgtgtgtctctgcacatgagatgggtttcctgaatacagcacactgatgggtcttgactctttatccaacttgccagtctgtgtcttttaattgcagaatttagtccatttatatttaaagttaatattgttatgtgtgaatttgatcctgtcattatgatgttagctggtgattttgctcattagttgatgcagtttcttcctagtctcgatggtctttacacttttggcatgattttgcagcggctggtaccggttgttcctttccatgtttagcgcttccttcaggagctcttttagggcaggcctggtggtgacaaaatctctcagcatttgcttgtctataaagtattttatttctccttcacttatgaagcttagtttggctggatatgaaattctgggttgaaaattcttttctttaagaatgttgaatattggcccccactctcttctggcttctagggtttctgccgagagatccactgttagtctgatgggctttcctttgagggtaacccgacctttctctctggctgcccttaacattttttccttcatttcaactttggtgaatctgacaattatgtgtcttggagttgctcttctcgaggagtgtctttgtggcgttctctgtatttcctgaatctgaacgttggcctgccttgctagattggggaagttctcctggataatatcctgcagagtgttttccaacttggttccattctccatatcactttcaggtacaccaatcagacgtagatttggtcttttcacatagtcccatatttcttggaggctttgctcatttctttttattcttttttctctaaacttcccttctcgcttcatttcattcatttcatcttccattgctgataccctttcttccagttgattgcatcggctcctgaggcttctgcattcttcacgtagttctcgagccttggttttcagctccatcagctcctttaagcacttctctgtattggttattctagttatacattcttctaaatttttttcaaagttttcaacttctttgcctttggtttgaatgtcctcccgtagctcagagtaatttgatcgtctgaagccttcttctctcagctcgtcaaaatcattctccatccagctttgttctgttgctggtgaggaactgcgttcctttggaggaggagaggcgctctgcgttttagagtttccagtttttctgttctgttttttccccatctttgtggttttatctacttttggtctttgatgatggtgatgtacagatgggttttcggtgtagatgtcctttctggttgttagttttccttctaacagacaggaccctcagctgcaggtctgttggaataccctgccatgtgaggtgtcagtgtgcccctgctgggcggtgcctcccagttagctgctcgggggtcaggggtcagggacccacttgaggaggcagtctgcctgttctcagatctccagctgcgtgctgggagaaccactgctctcttcaaagctgtcagacagggacatttaagtctgcagaggttactgctgtctttttgtttgtctgtgccctgcccccagaggtggagcctacagaggcaggcaggcctccttgagctgtggtgggctccacccagttcgagcttcccggctgctttgtttacctaagcaagcctgggcaatggcgggcgcccctcccccagcctcgttgccgccttgcagtttgatctcagactgctgtgctagcaatcagcgagattccgtgggcgtaggaccctctgagccaggtgtgggatatagtctcgtggtgcgccgtttcttaagccggtctgaaaagcgcaatattcgggtgggagtgacccgattttccaggtgcgtccgtcacccctttctttgactcggaaagggaactccctgaccccttgcgcttcccaggtgaggcaatgcctcgccctgcttcggctcgcgcacggtgcgcacacacactggcctgcacccactgtctggcactccctagtgagatgaacccggtacctcagatggaaatgcagaaatcacccgtcttctgcgtcgctcacgctgggagctgtagaccggagctgttcctattcggccatcttggctcctcctcccttt

SEQ ID NO: 10459 - DNA, 7091 bp, Homo sapiens
tatttttttttgttattatactttaagttctagggaacatgtgcacaacgtgcaggtttattatgtatacatgtgccatgttggtgtgctgcacttgttaactcgtcatttacattgggtatatctcctaatgctatccctccaccttcagcccaccctacgacaggccccggtgtgtgatgttccccaccctgtgtccaagtgttctcattgttcaattcccacctataaatgagaatatgcagtgtttggttttctgtccttgcgatagtttgctcagaatgatggtttccagcttcatccatgtccctacaaaggacatgaactgatccttttttatggctgcatagtattccatggtgtatatgtgccacattttcttaattaggtctatcattgatggacatttgggttggttccaagtctttgctattgtgaatagtgctgcaataaacatacatgtgcatgtgtctttatagcagcatgatttataatcctttgggtatatgtccagtaatgggatggctgggtcaaatggtatttctagttctagatccttgaggaatcgccacactgtcttccacaatggttgaactagtttacagtcccaccaacagtgtaaaagtgctcctatttcttccacagcctctacagcatctgttgtttcctgactttttaatgttcaccattctaactgctgtgagatggtatctcattgtggttttgatttgcatttctctgatggccagtgatgatgagcattttttcatgtgtctattggctgcataaatgtcttcttttgagaagtgtctgttcatatactttgcccactttttgatggggttgtttgattttttcttgtaaatttgtttaagttctttgtagattctggatattagccctttgtcagatgagtaggttgcaaaaattttctcccattctgtaggttgcctgttcactctgatggtagtttcttttgctatgcagaagttctttggtataattagatcccatctgtcaattttggcttttgttgccattgcttttggggttttggtcatgaagtccttgcccatgcctatgtcctgaatggtattgcctaggttttcttctacagtttttatggttttaggtctaacatttaagtctttaatccatcttgaattaatttttgtataaggtgtaaggaagggatccagttgcagctttctacatatggccagccagtttccccagcaccatttattaaataggcaatccttttcccatttcttgtttttgtcaggtttgtcaaagatcaggtggctgtagctgtgtggtgttatttctgaggtctctgttctgttccattggcctatatctctgttttggtaccagtaccatgctgttttgcttactatagccttgtagtatagtttgaagtctggtagcgtgatgcctccagctttgttctttggcttaggattgtggcaatgcaggctcttttttggttccatatgaactttaaagtagttttttccaattctttgaagaaagtcattggtaacttgataaggatggcattgaatctataaattacctttggcagtatggccattttcatgatattaattcttcctatccatgagcatggaatgttcttccatttgtttgtgtcctcttttatttcattgagcagtggtttgtagttctccttgaagaggtccttcacatcccttgtaagttggattcctaggtattttattttctttgaagcaattgtgaatgggagttcgctcatgatttggctctcttgtttgtctgttattgatgtataggaatgcttgttatttttgcacattgattttgtatcctgagactttgctgaagttgcttatcagcttaaggagattttgggctgagacgatggggttttctaaatatcatgtcatctgcaaatagggacaatttgacttcctcttttcctaattgaataccctttatttctttctcctgcctgattgccctggccagaacttctaacaccatgttgaataggagtggtgagggagggcatccctgtcttgtgccagttttgttttcaaagggaatgcttccagtttttgcccactcagtatgatattggctgtcagtttgtcataaatagctcttattattttgagatacgtcccatcaatacctagtttattgaaagtttttagcatgaagggctgttgaattttgtcaaaggccttttctgcatctgttgagataatcgtgtggtttttgtctttggttctgtttatatgatggattaaatttatggatttgcatatgttgaaccagccttgcaacccagggatgaagccaactggatcatggtggataagctttctgatgtgctgctggattcgatttgccagtattttattgaggatttttgcatcgatgttcatcagcgatattggtctaaaattctctttttttgttatgtctctgcccggctttggtatcaggatgatgttggcctcacaaaatgaattagggaggattccctctttttctattgattggaatagtttcagaagaaatggtgccagctcctctttgtacctctggtagaattcggctgtgaatccatctggtcctggactttttttggttggtaggctattaattattgcctcaatttcacaacctgttattggtctaatcagggattcaacttcatcctggtttagtcttaggaggttgtatgtgtccaggaatttatccatttcttctacattttctagtttatttgcgtagaggtgtttatagtattctctgatggtagtttgtatttctgtgggatcagtggtgatatcgcctttatcattttttattgcatctatttgattcttctctcttttcttctttattagtcttgctagcagtctatcaattttgttgatctctcaaaaaaccagctcctggattcattgattttttgaagggttttttgtgtctctatttccttcagttctgctctgatcttagttatttcttgccttctgctagcttttgaatgtgtttgctcttgcttctctagttcttttaattgtgatgtttgggtgtcagttttagatctttcctgctttctcttgtgggtatttagtgctataaatttccctctacacactgctttgaatgtgtcccagagattctggtatgttgtgtctttgttctcattggtttcaaagaacatctttatttctgccttcagaaataaatgactactgtacccagtagtcattcaggagcgggttgttcagtttccatgtagttgagcagttttgagtgagtttcttaatcctgagttctagtttgattgcactgtggtctgagagacagtttgttttaatttctgttctttaaaatttgctgaggagtgctttacttccaactatgtggtcagttttggaatacatgtgatgtggtgctgagaagaatgtgtagtctgtagatttgggatggagagttctgtagatgtctattaggtccacttggtgcagagctgagttcaattcctggatatccttgttaacgttctgtctcgttgatctgtctaatgttgacagtggggtgttaaagtctcccattattgttgtgtgggagtgtaagtctctttgtaggtctctaaggacttgctttatgaatctgggtgctcccgtattgggtgcgtatatatttaggatagttagctcttcttgttgaattgatccctttaccattatgtaatggccttctttgtgtcttttgatctttgttggtttaaagtctgttatatcagagactaggattgcaacccttgcttttttctgttttccatttgcttggtagatcttccaccatccctttattttgagcctatgtgtgtctctgcacatgagatgggtctcctgaatacagcacactgatgggtcttgactccttatcccatttgccagtctgtgtcttttaattggagcatttagcccatttacattaaggttaatattgttatgtgtgaatttgatcctgtcattatgatgttagctggttattttgctcattagttgatgcagtttcttcctagcatcaatggtctttacaatttggcatgtttttgcagtggcttttaccagttgttcctttccatgttcactgcttccttcaggagctcttgtaaggcaggcctggtggtgacaagatttctcagcatttgcttgtctgtaaagtattttatttctccttcacttatgaagcttagtttggctggatatgaaattctgggttgaaaattcttttctttaagaatgttgaatattggcccccactctcttctggcttgtagagtttctgccaagagatccgctgttagtcttatgggcttccctttgggggtaacctgacctttctctctggccgcccttaacattttttccttcatttcaactttggtgaatctgacaattatgtgtcttggagttgctcttcttgaggagtatctttgtggtgttctctgtattttgtgaatttgaatgttggcctcccttgctaggttgaggaagttctcctggataatatcctgaagagtattttccatcttggttccattctccccatcactttcaggtacagcaatcagacatagatttggtcttttcacatagtcccatatttctcagaggctttgtttgtttctttttactcttttttctctaaacttatcttctcacttcatttcatttatttgatcttcaatcactgatgccctttcttctacttgatgaaatcagcttctgaagcttgtgcatgcgtcaggtagttcttgtgccatggttttcagctccatcaggtcatttaaggacttctctacactgtttattctagttagccattcgtccaatcttttttcaaggtttttagcttctttgcaatgggttcaaatatcctcctttagctcagagaagtttgttattaccaatcttctgaagccttcttctctcaactcatcagagtcaatctccgtccagctttgttccgttcctggtgagcggctgcattcctttggaggggaagaggggctgtgatgtttagaattttcagcttttctgctctggtttctccccatctttgtggttttatatacctttggtctttgatgatggtgacgtacagatggggttttggtgtggatgtgctttctgtttgttagttttccttctaacagtcaggaccctcagctgcaggtctgttggaatttgctgctggtccactccagaccctgtttgcctgggtatcaccagtggaggctgcaggactgcaaatattgcagaacagcagatgttgctgtctgatccttcctctggaagcttcgtctcagaggggcactggactgtatgaggtgtcagtcagcccctactgggaggtgtctcctagttaggctactcgggggccagggacccacttgaggaggcagtctgtcagttctcagatctcagacttggtgctgggagaaccactactctcttcaaagctgttagacagggacgtttaagtctgcagaagtttcttctgccttttgttcagctatgtcctgcccccagaggtggagtctactgaggcaggcaggcctccttgagctgcggtgggctccacccagttggagcttcctggcctctttgtttacctactcaggcctcagcaatagcggacacccctcccccagcctcgctgctgccttgcaatttgatctcagactgctgtgctagcagtgattgaggctctgtgggcgagtgacccttacagccaggtgtgggatataatctcctgctgtgccatttgctaagaccgttggaaaagtgcagtattagggtgggagtgtcccgattttccagatacagtctgtcatgacttcccttaggtaggaaagggaattcctggacccttgggcttcccgggtgaggcagtgccccaccctgctttgtgggctgcactcactgtctgacaagccccagtgagatgaacctggtacctcagttggaaatgcagaaatcacctgtcttcggcgttggtcacgctaggagctgcagactggagctgttcctatttggctgtcttggaacctctctagatcatgtatttttatgcattctggcaatctgtgtcttttgattagagagtttactccatttacatttaaagtaattactgataaggaggaatttaaatctgtcattttgctgcatgttttttatatgccatgcatcttatttaccttttgtttcctacattattgtcttcttttgtgtttaatttttatagtgaaatatttaaattcctttgtcattttcttttgtgtacattctacagatattttctttaaggttgccatggggattacatttggtatttaaagttgtaacactctaggctgggcgcagtggttcacgcctgtaatcctagcactttcggaggccgaggtgggtggattgcaaggtcaggagattgagaccatcctggctaacatggtgaaaccccgtctctactaaaaataccaaaacaaaattagccgggcgtggtggtgggcacctgtagtcccagctactcaggatgctgaggcgagagaatggcgtgaacctgggaggcggagcttgcagtgagccgagatcatgccactgtactccagcttgggcaacagagcgagactccatctcaaaaaacaaacaaaaaaacaaaacaaaaagttataacactctaatttgaatttataccatcttaacttcagtaacacacaaaatctttgctcctttatagctctgccctcacctcttttgattgttattttcacaagattacattattatacattgtgagtccaaaaatgtaaatgaatactttctttaaatgtattcatttacattttgtatttaaatgaatttatgtatttaaatgaatttatgtatttaaatgaatatatgtatttaaatgaatatatgtatttaaatgaatatttctttaaatgtaaattttcatttgaactttggtgaatctgacaattatgtgtcttggagttgctcttctcaagg

SEQ ID NO: 10460 - DNA, 27812 bp, Homo sapiens
gagcaaagtccaagagatgaattatattcagaaaactctgttcaagatagggtatgattacaaattggaacagatcaaaaagggatatgatgcacctctttgcaatctgtaagtacatttcataggctctgtggtttgagcctttaaatttttttatgcttttaaatccagaagatgaataaataaatggcaagttaattcatttgaatatcaccaccatgatcataaggttgaaattctcttttattctaagtcttattgtttatacagcaagcagaggactctgatcttggcaatttaacaaattttaataattgagtgtatatttaagatttatttataaaatttagtttcatgaagaaaaactaaaatagacttttgaatcaagacacttgagcttaaaaaatgtcatttctaactaaaaaaagtgacctccattgcatgaaggtttctgatttattgtattcataaaatagtgtagtaagtatatgaatataacttattttaaatgtgatgctgaggagtggggatggggaagcattttttattggaagtgagataagataggtgattaaatgttccaaagataattaaaatttttttacctctgatgtctgttttctttcatttacttgtgtcagcatagtttcccgatgctacacattatctttcttcatttttaaagagttttttctggcatttttacaaggcgttactagttgttgccttgttaacctctcattctcaccgtgattctgacattgagatgttcaaccagttgaggaatctttcccagagcttataaattagtgtgttgccaagaataatgtatgcgtacattaaaatcatttatcctccctttattaaggttactgtttaaaaaggtcaaggccctgctgggagggaatgtccgcatgatgctgtctggaggggccccgctatctcctcagacacaccgattcatgaatgtctgcttctgctgcccaattggccagggttatggactgacagaatcatgtggtgctgggacagttactgaaggtaagcattattaatgtggtaaatattctgtatcagctgctactaataaaatacattcgcattacctttggaaaccatggtaactttaaaatacctcttaactaatatcagattcattgcaaatcagtgtagttttggtttatgaattcttaattataagtatcatgtggaccctttcattttaagccttataattttttttttttttgagatggagtttcactcttgttgcccaggctggagtgcaatagcataatctcagctcactgcaacctccacctcctgggttcaaacaattctcctgcctcagcctcccaagtagctgggattacaggcgtgtgccaccatgcccagctaatttttgtatttttagatggggtttcaccatgttgaccaggctggtctcgaactcctgacctcaggtgatctgcctgcctcggcctcccaaagtgctgggattacaggcggtgagccaccacgcccggtcgccttataaatatttatgccacacagtcggtcctcaaaatcctgtcaccctggtcctttagtcttctttctctaaatgatcacttctttggagaactgtactattaaaaatgaagtatcacttttatgctccctcttaaatctgtgttcctgtcctaacttcttctttggtttcccttttgttattttcaacagcctgaagcgaggtttcccaaccctgacactgttcaaattttgaatccgataattctttgttgttgagggctgttgtatgcattgcagaatatttagttgccaaagcagatgtttatgggctcaccccagctgtgacaatgaaacatatccccaaacattgccagatatcccctggggggcaaaatcactttaggttgagaaacactggggtataggaattgtttttttggataatcttattttcgctttaaactcattgtgtccaaaatcaatgccattattctaaactgtctctctattgacaaattatttgtttgtgtcaatggtgataccatccttaaagtcattccaggtatcagctttgaagtcatctgtttattttaaaatatctttaaatgtcatcagatcattccttcattaggtttctcctttccctccatatcacctctgtcgtccaactttttattgctccattctgctccgacctaacagcctttttatttttgagacagagtcttgctctgttgcccaggctggagtgcagtggcacaatctcagctcactgcaacctccgcctcccgggttcaagcaattctcttcccttagcctcctgagtagctgggactacaggcgtgtgccaccacacctgactaatttttgtatttttagtagaagcggggttttaccatgttggccaggctggtctcgaactcctgacctcaggtgatccacccacctcagcttcccagagtattaggattacaggcgggagccactgcgcctgccctgacctaacagccttgtaacagctgtgtctgcctacattacatcacttctgatttatcctgtatccttctattagatgcatccacctcatccactgcttgatacctgatgtatcaaatctaaacacctctttacctagctttgacatctttaatctgatgctagtgtacttatccaacatcattttccattattccccacatatacacaatgcctggctcttctctccagacccaccagtcttcttactgtttcttatgaaggcattcttggtctcacctctatgtattttcttttcccttctcttggaatgtcctttttgcttattgatcacaaccatcttttaatgcccacttttcaataatgtctttcctaactacttcattttacattcattgtttaagtctctaagctactattgtgcttaccttcagtgcccatgcagtttagtatttaaatgttctctgaattgtttcacatgcatttcttcccagttcatttgtaaggtcattgagtgcagggtctccttatctctcatgtgctgtttacataatgggctgtccataaatatttgtttattgctagcaataatcacaaattgcaaatggatatcatcatcatgatgatgtttgacaacagcagctaacatcttttgaaggcttagcttgtgccaagaagtgttaagcattgtccatgtatcatctcatttaatcctcacagcatatccctgtatgaagtaggttttgttactatctccatttcatagatgaggaaatggaggcttagagaggctaagttacttgtccatgttacatagccaatgagtggtagagcaggaattccaatcaaaatctatcttatgacaagcttaggtagataacggtggagccatctctcctcctttaacagatattttgtacttaattacataaaatataaccatgaaaagcaaaaatgatgtaacaacaatggaatccattgcactattgaagtggagttgaaatactgaaaaatgatcacactttgcactccttcttttgtcatttttctgactctggttctaactctaatattcccagtgcattggtacaaatctggaatgtggtatgctaatatctctgttactttttccctcacagtaactgactatactactggcagagttggagcacctcttatttgctgtgaaattaagctaaaagactggcaagaaggtaagaattttatgaaaagctctagtgattcaagatatgctgaaaactactgtcagctttatgactttcatttctttaaagtctggggaagcaaataattctctgctgttttgctgttgcctgtccccatgcattctttttcctcagtgatatctttaggttcccaagaggaaaataaaatctctagaatctaggattaatgattctgaacttgacaatacttgaaggtaaagagaaaaaaaattcttactggagctttctgggtttggagaaggtgaggatccttgaaacttgactttactagtgagaatgtttgggctgagaaaccccagatttttaggggatagaatgatgggttgcactcatacacacaccaacttcttagatcttgatcccagaaaagattttcatagttgagactcaactgtccagctatttgtatagttgaatttttatatgtacctgcacagacaagccacttagaagaaaactagagacattgatgatcatcctttctataaattagctgaaggcaaatatcaaccagtcttcttaatgaaagatactaaatatacacagtaactacaataaagtagattgttaaataaaacaaataattaacagcctagccatgtcagataaaggaagagtaattaaaatgcttaagattttaaaagagaatatttaccttaggatggaacacggactaaaaatttaaagtacaagttaccgtgtaggatgcaacccttaggttgtccaaaccctgagaaaatgaatacgtttttatctaacataaactttaagtttctaaagcattttttattatgtgtgttattgtcagtgctttatgagcaaatgactatttcttttttaaaaacacattttaaaaagccagttgcattcccaagagttttacaccttgggacttagtcttccctttttccatggtaatggcattccaattttaccatgaaaatctgaagaaaatagtttgtgtgtatgtgttttggacatcaacatcagaattattttattaggtaagtttttaattgttaggcagtggaatcagagaaatgtttaaaggcaaaaatctccttaccaagttttactataatttttattttctgatttcctggtactgggccttaatgtcagttttggggagtaggtcccttgttgaacatgtatttggagttttccttgctgtgaagactctttggctttatactgtatgaatgatctcagtttttttttaacatacaatgggttttatcatgttgaaatattgaatagttttaagtttatcagagcagctaacagctgaaaggaaccctgattttaatccttttatgacacaaaatctagtctatatcttattttgcaaatttagatttttgtatattttccttaaagtaagcttccttcagtaatacagaggtaatgagtagtgatgaaatatattagtatttattatcaattagtttagtgtttgaacttctaaagtcatgactggccacaggcaaaattaatacaattttcttcctgtttcccatagtcccccctttccctctcactttatgatgctaccatttttgggtacttactgcatgttctttttggttaaaacctccttagaaaaaatttgaaatgcattgatatcagtatgtcagtaatttacttataacagcttcaagtgttactcttcctgggggtgattttatcttaacagaactctgtgaacactaagctctaatggtgttctaagtgtgaaatgttatggtatgggaaggtttgagatgggtgattgttggtggtgattatcattgagcctttcttggtgttcttaaaatcacagtcacccagtatcctcatgtaaattttagtaaatataaactaatgttctctcataaagtgatataaaatctgatcagcagaaaaatactaacatacgtataagctttaagaattaatgaaatttgttgtagaacaataactaatttacttttatgatttccaggcggttatacaattaatgacaagccaaaccccagaggtgaaatcgtaattggtggacagaacatctccatgggatattttaaaaatgaagagaaaacagcagaagattattctgtggatgaaaatggacaaaggtggttttgcactggtgatattggagaattccatcccgatggatgtttacagattataggtcagaatgttttctttttatggttttctttagtttttataacttcagtatatatgaaaggtaatattgatcagtcattaataaagttgatggttccattagttcaaactttggacaagttatttaacttatgtatgagcttctccatcagcaaaacaaggacaataccaacctcatagggctgtcgttaagattaaatgagttgatatatgtaaaatattctaaacagagcctgaaccttagcgtaagtactagcagcactagcaacagcagcattgagtgtagagagaatgggcagggaaatagcaaacaggtaatgagaaaacaaaaagagctcagaggacgtctttcttggtcaaccacatgtgattttatataactgtttcctataacatactctatgctaggccttcctcactcttcacctctccacccaaggggcagcatgggcacatatatttttttttactgttggctatttatatgtgtctaacgaggcctgaaccttagaaaattaatatcaatccttagcactagtcagttctgagaatgtcagttactttggcattgtcctcattgagtctactgaagtggacctttatgttcaaaaaatgactccaaaatgggcccttgtgctattcacttggatgaggcaaaagttaaaacttgctgatgagaacccctcagcaagatcccagtcaggtcttttttaagacatagagtttcctcacctatatgtagtgactgatttcaatccatcgctggacctcacgatatctgacctgaatatagttagagatttcctgggaaaattggttcttcatctagaaatttgaaccaggaaccatggttcagttgagaaacaataagcttttttcccccttgttccttaattgcactggaatcaaaggttatttctgtagagtgggttcccaggctacgggtaggcaaatcagcactcatactcattccaaggccatgtgatgattattcaagctgtgccatcctgtgctagcactttcttagagaactgtcattttaacaagataatgtcaaaagtggaaaaggagaattaacatgtgttaaatgtgttctatatgccagacattgtgggatatgtctgtatgaggtaggcatcattatcctgataaaacttgaggattagaaggttaactgacatgccgaggatcacttagctagtaccaggcagagttaccattcagatagaatgttccaaagtcctagttccctctattaaattgattataatatttaagattataataagatgctaaagctttgggtttaaggtgtaacttttagccaatacttacttaagtaggcattttatttttaactggtgtgtatgggcaacattatatatatgcagtttttgccattttaaaagtaatggcaaaaaccacaattacttttgcaccaacctaataataattttagaagaagtagttttgtaaataacgattaaggcaatgatattcaaagaagacagtcagaattgcatataccttagttaaacagacttaacattctttatgacttaacagatcgtaagaaagatctagtgaagttacaagcaggagagtatgtatctcttgggaaagtagaagctgcactgaagaattgtccacttattgacaacatctgtgcttttgccaaaaggtaactttccaaagttgtattttttgtttcgtaagtcaaaagatatttagaaaataatgtgattacatattatcataagggtaacatagtcttctcttagaattttcatcagatctggggaattgtacatttatgtaagttagtgaattcaacagcttaaagatcattttagataactcagacgtgttaactatttattggacacctgcatcttgctaaatacttagctatgcaacaagttatttcatttaacatccatgacaactgagacttagtataagtaattttcccaaaaatgtaacacaactactacatgttgagatgaattttgaacccaagtttttctaaatcaaaagcctaagagattgagccattttctttatatgttgatatgtcttatttttatgggttttattcttttttaaaaattgtaattgtggtaaaaagcatataacgtaagatttaccatcttaaccatttctaaatgtacagttcagtagtgttgtgtatatttacattggtgtgcagccaatctccagacctttttttcttgcaaaatggaaactctatacccattaaacagcaactcctattcctcctccctccttcccctgggaaccaccattctactttctgtttctatgaatttgacttctctagaaatctcacacaagtagaattatacagtttttgcctttttgtgattggcttaattcccttagtataatgtcctcaaggattatccatgttgtagcatatgtcagaatttccttcattttgaaggcttaacaatattccattgtatccatataatgtattttgtttatatattcattgtcagtgcacattttggttgcctccccctcttggttgttgtgaataatgctcctaggaaaatgcgtatgcaaatatctctttgagatcctgctttcaattatgtggatagatacctagatttagaattgctggatcatatgacagttctatttttaattttttaaggaactgcaatactgttttccatagcaacagcaccatttttacatttcctacaacagtacacaaacattctagttcctccacttcttcactagcacttgtttgttttatatagtagtcatcctcatggatgtgaggggatattttgttttagttttgatttgtattttcctaatgattagtgccactgagcaccttttcctatgattgttggccattcatatattatcgctggagaaatgtctattcaagttctttgttcattatttaattgagctatttggttttttgttactgagttgtggaaattatatattctgtttattaaccccttatcagatatatgatttgcaaattttttttttctattccatagattgcctttttactctgctgattgagtcttttgatacacacaagtttttagttttgttgtagtcccagttatctgttttttgcttttgttgcctttgcttttggtgtcacacccaagaaatattgccaaatctattctcataaagtgtttcttctgtttttttttttctagcagttttatagttttatcagattggtgcaaaagtaattttggtttttgccattaatgtcaattacttttgcaccgacttaatagctcttcgatgtttagatttttgatccattttgagctaatttttgtatatgttgtaaggtgaaggtccaccttcattcattgcatgtggatatccagttttcctagtaccatttgttgacgagactgtcctttcctcattgagtggtcttaacacccttgtcaaagatcgtttctccatagatacaagggtttacttctagtttctctattccattggtctatatgtccttctttatgctggtactatgggttttatcatttcctaatgaaactttaataaataagagaaatatatatttggaattatctgtactgtactatgtcattgactagtttatgaataacttttctcaatgttttcatttctattttattttctgtttttttagtgatcagtcctatgtgatcagttttgtggttcctaaccagaaaaggttgacacttttggcacaacagaaaggggtagaaggaacttgggttgatatctgcaataatcctgctatggaagctgaaatactgaaagaaattcgagaagctgcaaatgccagtaagtaagaaattgctagactggtatagtccctaaaagtcatctaatgatgtcttttgcattaggctcttcaatatgtttgctttaataataaaatacaggattttaagaaacctatttcttaaatatgtataatggatttccatgttggaaggatccttcaatgtcatatagtagaataacctatgtagttctttattgcatgtttcaacatctttcccaaagtggtcatctagcctgtgtttggaatggtccatctttgggtagatctgttatataaatctactttgtgtctgtaaagcagaaattagtaactctaagtttagtaaatagtgttataaccatgattatgctttgtgtgtatactgtggctctgtaaatggactatcttcagatggtacattaataaccaattggagaaaatctgcttatatagtatatgccaggaattgtgttacacactaggaatacagaaagtagtaagactcatttcttgctctcatgtagttcattatcaggtgagaggggcacatgagagagacaacaatcttaacagcaatagagagatgaacagagaatcatggtaccacagatgagggtacctaacctacttgggaggacatggaagagatgtcacttcagctcatccttaagggttaattagaagttaactaggttgggcattctaggccaagaagcaacatgagaaaggcaaataggtatgaaaaggatgatgtgtgcagggaactacaagggagtctggtgttaccggtacagtgcaaagtatgaggtaaggctgtagaggttagcagaggccaagttgtgtagtaccttctatgcttgttcagaaatttggatgtaatcctgtagacagtgaggagccattggcaggttttactaggttagtgatgtggtcaggtttgcattttggagagatgcagtcactctggaggccatgctgcagatgaatttgagggggactggactgaggcagaaggccagttgaagaggactgtaggagatacctagactggggggtggtgagtaatgagggcgtgaagcagggaatcaggaaatgtttatgaagcaaaattggcacacttcagtgattaattggataacatagataagggaaaagaggagtctaggatagcccccagatttgtagctgaagcgacaaggtaaatactactactgattgagctagaaaatacaagaggaagagctggcatatacaagaagatgatgaggtcagtatgggatacatgtagtttgaaacacgttttgacaaccccatcaaaaagtgggcaaagaatatgaacagacacttctcaaaagaagacatttatgcagccaacagacacatgaaaaaatgctcatcatcactggccatcagagaaatgcaaatcaaaaccacaatgagatgccatctcacaccagttagaatggcaatcattaaaaagtcagggaacaacaggtgctggagaggatatggagaaataggaacacttttacactgttggtgggactgtaaactagttcgaccattgtggaagacactgtggtgattcctcaaggatctagaactagaaataccatttgacccagccatcccattactgggtatatacccaaaggattataaataatgctgctgtaaagacacatgcacacatatgtttattgcagcactattcacaagagcaaagacttggaaccaacccagatatccatcaataatagactggattaagaaaatgtggcacatatacaccatggaatactatgcagccataaaaaaggatgagttcatgtcctttgtagggacatggatgaagctggaaaccatcattctcagcaaactatcgcaaggacaaaaaaccaaacaccgcatattctcactcataggtgggaattgaacaacgagaacacttggacacaggaaggggaacatcacacactggggcctgttgtggggtggggggacgggggagggatagcattaggagatatacctaatgttaaatgatgaggattaatgggtgcagcacaccaacatggcacatgtatacatatgtaacaaacctgcatgttgtgcacatgtaccctagaacttaaagtataaaaaaataaaaataaaaaacacgttttggataatcaaagttaaaatgtccagcaggcggttgtgtgtagtccaaatcttattgggagaggcctggactctgctatagactcggggataattgaaaccacgaaagtagatgggccaaccttgggtgagattgtaaagggagaacaggaggctgtggatgggtctctggataacaccagcatataaggaatggatgaagaaagagatgtgtgtgggaagcatgattggcaagatgccaggagagcaatgcccatgcagaccactgctaagagagtttcaggaaagagagtaatcaacagttttacattagcagaaaggactgacaaagcttattggaacattgattggaaaattaaagagattaaaaattaatgctcaagttcaatagtaggctttttttttttcttttttcccaacgagggattccatgtgggtggctgattttataacctttttttaagtttcagttttatcagtataacaagtatatatagtttaaaaaatgtcagtattaaggacttgcaacaaaaagcagcccatattgtatccctcttttccccaagtctcatctgtcttcaactttagttgtttttttaaagtttctggcattcgtctccatttttctaaagaaaatggttatgttgctccttcttgaatttttcatttgcgatgttatggacttttatggacctctaaccatagaagatgatttacctttcttatgaccattctccttgccttccctaccacactttttcttttccaatagatagtacaatttgcattttacacccaggtttccgttatgattatgaaaatattcacagctgaactacatagtgttttatgattatatttcctttcttggacaattttttgtgtttccctggatcttaaaatttcctctcttcattagttttttgtatactattcttaactcttccactaaactctgttaaaattgtaaaaattctccctaatacaggaaaggatagcatgtctgtatttttgttctcggagacatacttcttagagccctttatcctcatgctgaaatttagactatttgcttccaaaggcttccctttactatcatcctgggaatttcctttgcttctctcctatgttggatcctgtttcctggatctcatatctgtctctttcctggtttactcgccggtttgggtagagcacatccttcagcagcttcctgagaaaggtgcatgggaggtaaatttttgagactgtgcttgcgtgtctgaatatgtttttattctgtcctcacccttgagatgtgtcttggcatattttagagtgataaattctaaatcatttttcctgaatactttgcagacttggctttgttgtcttccagctccagtgttgcatcctgattcccattcctttgtgtatgatctattttatctctcctagctttcagagtcattatgttaatttctggtgttttgatagttcataatgatgtatcttagtgtgggtctttgatcatttatcattgtgcatacttgctgtgggccctttccatatggagatctctgcccttcagttctgggaaatgttaatttatcttttgtttgttcatttgtttttttccccataattccccccaccctgtgtgtctgtttctgagactacttttatatggctgttggacttccagctttcatcctctaattttattatcctttttaaaattttctatttctctttttgttttatattctggcagagtctctcaactttatcatctcttctgtctactgaatttccaatttccactatcagaattttaattttcaagagcttgttcctgtcctctcagtgttccttttaatagcaccctgttgctctttcatggatgcagtcaatgcattgtctcttattcctctgaggatattaaaaggaatcctttttatgtagttttcttctcctgttattgtctcttttacctccaagttgcactttatgcttgccttggtcattgagtcccaagtgtctgctgatccttgtatgtccatattcaggaaccaggtactaaaaaactgtttggaaagcttactgggcttcactgaaaaggcattccaacgttagtgtctttttctcttaagtcattctgtttctccaaaggagatttctccagtcttttgcccgggcaatattagcctgactgccagaattctggtagccaaaagaggtaaaggagttattgagggggatgggagagcagtgggtctcaccctcactgaatccttctcttttcagccttactccctccttctgttgtacctaatgtccatgagtcccgagtctctgcttcagtttttccaaaaagtagacctgcctacaaatggctttgagaagagcagcatagggtgcgggagaacttttctctaaacaggctggagaccagtgctgctctttccagctttacccctcatctcttatcttcagaggcacaggcttagtgggcacttgcccgggctctactatgagggcagtttgctgcttgttggcaacctcttttgttggtagttgctttggcttcctcagccctaagttaattaccacaaattcctttgctttttgtcttctaagattttgttgcactttctcattcagtgcccattttctcttgtttcactttttgccttgtggttaatacctttttcatttttaaattattctaaacaatttaaattcttttttaggcagaacagagaaaaactatatactcttcgtgttttgttggaagctgttaacctaatttcaacccattgtttttctcttacaaataaaaatatcatttttctgattataggttatctatattcattataaaatattggacaacagaatattacaaagaaggaagtaaaaatcacttgagagtagtttatctttgggtggcaagattacattttggtatatatacttaagctgtcaacataatcgaagtttttctgtgtcagtaaatagaaaattacggtatcattttaaatactaaatagtcccagtgcataaatagccatttaagtccctattagatttttaggtgaatttcaccttcttccccatcactgtaaacaaatataacacgaatcttgtatactccattattttcttatgtgattattttcttagtgtgaattcctagaaacagaatttctgagtcaaagagaatatatatatatatattttttcaaataaatttttttaaaaattattattatactttaagttttagggtacatgtgcacaatgtgcaggttagttacatatgtatacatgtgccatgctggtgtgctgcacccattaactcgtcatttagcattaggtatatctcctaatgctatccctcccccttccgcccaccccacaacagtccccagagtgtgatgttccccttcctgtgtccatgtgttctcattgttcaattcccatctataagtgagaacatgcggtgtttggttttttgtccttgcgatagtttactgagaatgatgatttccaatttcatccatgtccctacaaaggacatgaactcatcattttttatggctgcatagtattccatggtgtatatgtgccacattttcttaatccagtctatcattgttggacatttgggctggttccaagtctttgctgttgtgaatagtgccgcaataaacatacgtgtgcatgtgtctttatagcagcatgatttatagtcctttgagtatatacccagtaatgggatggctgggtcaaatggtacttctagttctagatccctgaggaatcgccacactggacttccacaatggttgaactagtttacaatcccaccaacagtgtaaaagtgttcctatttctccacatcctctccagcacctgttgttccctgactttttaatgattgccattctaactggtgtgagatggtatctcattgtagttttgatttgcatttctctgatggccagtgatgatgagcattttttcatgtgtcttttggctgcataagaatatatattttaaagacttttttcctcattgccaaattgctgcctctccccaggaaaactgaaccggcttatattcctatcagagatatatgaatatacctatttctctaactgggctcctattatttctatttattaaaaatgttaactacttaggttacattttggtttaaaaatatagtttatagtaatagtttttctacctgaaaactaatttctccccaagaataattttctgaattctagacactgtgaagttttaaataacaatggcctgttaacataatcagattgaaaaagcttatttattttatacctataaaaacagtgtgacatgtattttatacttacaaaaatagtgtgacataatatttccttcttcaaggtggttttgttacaatattattgatataacacacttttatattaatgaaccaggctcccagaaccttttttgatacaaagcctgatttgctctcaatatagtatttctaaaaatatatagtattttctttaggtatttaagtatagcatttcaaatatagtattttctttaaatatagtatttcaagaaatatatagtatttcaaccaaaaggctaatcatcagaggtgcactgtagttactcttattcatcctctgaatatattaatggattagaatgtgacttgaataattttccattgcatatttaattgtgtagaagcaacaatgggggaagtcaaactgtatcccactttgttagaaggcagaataaaatcctaggacccactaggttctcataactttcctgtgcttagagtgaggcatgtaactcatgatttggataatgagtggtaatcatgagctaaatgtataaatcataaaccttttgtgccacaaaggatttatcttgccaacattttgcaaattataatttcagagacttatgcaaaaaagtgtgaaatagttttgattgtattcagcaaatctgtcagaaattatacatctttcatagcaggcctcttcatattttaagtataattgtgaggtatacatagtatcataagaatgcaaaatacttgtttttgggtgatttgagcaactactaatggctatgaaaattgctatttgctgccacctgcaagtcacatttcataatgttctagttaattcagataaaaatgccacatttttgtttgttttgtttgtttttccttctcctaacctttctcacttgttggcaatttattctatttacaggaatctgtgatagtccattgcttcctatggcttggagtattagataatgtttaggagttttcaagatgaaacttctatagcagtctttatttttttggctttaaagtaggaatttaactaagattgttttcagcctgctttcatttgcttgtgtgcaactgaaataatgtgtttgccttgtcccaattttgtcagtgtttctggactaggacctatgtatgtaagaaaagtaaaatgaaataaaaaattggggggccaaatctgtagctgagaatttaactgtttccttgagttccaaatgtgacgttgggagcagataagcttattttatgaaactctgtgtaactgagctgtactttaataacagagtagacctggttaattcaagcaagttttatgttcctttacgacccattcaggcattatttttaggaagttggttgtaatttatatttaaaagattatttttcatactcaactttatatttttctgtcattttagtgagaaactcactagttcaatcaagctttcataaaacgtagactagtactagaaaagaactttggtgaatgtgagttctttgtgcttgccactgaaaccaaatcatttctaaactcgtctaggctattttgtagtagtttttaaaaatgtgcgaatgtttgcttcttggcaattgctgttttaaataatcacataaaataacattttatgttgattaacataacatctgttgattaatattactgttaataggcctccataatttaaagaattacccttgtagtcataataaataacttgatggcatataatttatggaatttaaaagtattaatactgtattaattacctttatgtccttccttatattttgccaatatgtattaagttgtataactcaaatacaatattcattgcatcagtttttataccatttaaagatatgaaattcacaatccccttttttatctgcatttgaatatatagtaaagtttataaagaatatttgtctagagacttaattttctgtagaatgaattaataaacttgtatgtatttatggagggctctcaaccctatggatggcagtgaaaaaatcaaagaccttgcttttatggagcttacattttagctccatggtgaaacaaatatataatatgttgggtggtgataactactttgaacaaagcatagtgttaagaaggtatagagagacaaagggacttctcttttgtgtatttctttatttattattatactttaagttttagggtacatgtgcacaatgtgcaggttagttacatatgtatacatgtgccatgctggtgcgctgcacccactaacttgtcatctagcattaggtatatctcccaatgctatccctccccccttccccccaccccacaacagtccccagagtgtgatgttccccttcctgtgtccacgtgttctcattgttcaattcccacctatgagtgagaatatgcggtgtttggttttttgttcttgcgatagtttactgagaatgatgatttccaatttcatccatgtccctacaaaggacatgaactcatcattttttatggctgcatagtattccctggtgtatatgtgccacattttcttaatccagtctatcattgttggacatttgggttggttccaagtctttgctattgtgaataatgccgcagtaaacatatgtgtgcatctgtctttatagcagcatgatttatagtcctctgggtatatacccagtaatgggatggctgggtcaaatggtatttctagttctagatccctgaggaatcaccacactgacttccacaacggttgaactagtttacagtcccaccaacagtgtaaaagtgtccctatttctcgacatcctctccagcacctgttgtttcctgactttttaatgattgccattctaactggtgtgagatggtatctcattgtggttttgatttgcatttctctgatggccagtgatggtgagcattttttcatgtgttttttggctgcataaatgtcttcttttgagaagtgtctgttcatgtccttcacccactttttgatggggttgtttgtttttttcttgtaaatttgtttgagttcattgtagattctggatattagccctttgtcagatgagcaggttgcgaaaattttctcccattttgtaggttgcctgttcactctgatggtagtttcttttgctgtgcagaagctctttagtttaattagttcccatttgtcaattttggcttttgttgccattgcttttggtgttttagacatgaagtccttgcccatgcctatgtcctgaatggtaatgtctaggttttcttctagggtttttatggttttaggtctaacgtttaagtctttaatccattttgaattgatttttgtgtaaggtgtaaggaagggatccagtttcagctttctacatatggctagccagttttcccagcaccatttattaaatagggaatcctttccccattgcttgtttttcttaggtttgtcaaagatcagatagttgtagatatgtggcgttatttgtgaggcctctgttctgttccattgatctgtatctctgtgttggtaccagtaccatgctgttttggctactgtagccttgtagtatagtttgaagtcaggtagcgtgatgcccccagctttgttcttttggcttaggattgacttggcgatgctggctcttttttggttccatatgaactttaaagtagttttttccaattctgtgaagaaagtcattgatagcttgatggggatggcattgaatccgtaaattaccttgggcagtgtggccattttcacgatattgattcttcctacccatgagcatggaatgttcttccatttgtttgtatcctcttttatttccttgagcactggtttgtagttctccttgaagaggtccttcacatcccttgtaagttggattcctaggtattttattctctttgaagcaattgtgaatgggagttcactcatgatttggctctctgtttgtctgttgttggtgtataagaatgcttgtgatttttgtacattgattttgtatcctgagactttgctgaagttgcttatcagcttaaggagattttgggctgagacaatggggttttctagatatacaatcatgtcgtctgcaaacagggacaatttgacttcctcttttcctaattgaataccctttatttccttctcctgcctgatcgccctggccagaacttccaacactctgttgaataggagtggtgagagagggcatccctgtcttgtgctggttttcaaagggaatgcttccagtttttgcccattcagtataatgttggctgtgggtttgtcatagatagctcttattattttgaaatacgtcccatcaatacctaatttattgagagtttttagcatgaagcgttgttgaattttgtcaaaggccttttctgcatctattgagataatcatgtggtttttgtctttggttctgtttatatactggattacatttattgatttgcgtatattaaaccagccttgcatcccagggatgaagcccacttgatcatggtggataagctttttgatatgctgctggattcggtttgccagtattttattgaggatttttgcatcaatgttcatcaaggatattggtctaaaattctcttttttggttgtgtctctgccaggctttggtatcaggatgatgctggcctcataaaatgagttagggaggattccctcattttctattgattggaatagtttcagaaggaatggtatcagttcctccttgtacctctgatagaatttggctgtgaatccatctggtcatgggcttttttttgttggtaggctattaattactgcctcaatttcagcactttttattggtctattcagggattcaacttcttcctggtttagtcttgggagggtgtatgtgtccaggaatttatccatttcttctagattttctagtttatttgcgtagaggtgtttgtagtattctctgatggtagtttgtatttctgtgggatcggtggtgatatcccctttatcattttttattgcgtctatttgattcttctctctttttttctttattagtcttgctagcggtctatcaattttgctgatcctttcaaaaaaccacctcctggattcattaattttttgaagggttttttgtgtctctatttccttcagttttgctctgatcttagttatttcttgccttctgctagcttttgaatgtgtttgttcttgcttctctagttcttttaattttgatgttagggtgtcaattttagatctttcctgctttctcttgtgggcatttagtgctataaatttccatctacacactgctttgaatgtgtcccagagattctggtatattgtgtctttgttcttgttggtttcaaagaacatctttatttctgtcttcatttcgttatgtacccagaagtcatccaggagcaggttgttcagtttccatgtagttgaccggttttgagtgagattcttaatcctgagttctagtttgattgcactgtggtctgagagacagtttgttataatttctgttcttttacatttgctgaggagagctttacttccaagtttgtggtcagttttggaataggtgtggtgtggtgctgaaaaaaatgtatattctgttgatttggagtggagagttctgtagatgtctattaggtccacttggtgcagagctgagttcaattcctgggtatccttgttgactttctgtctcgttgatctgtctaatgttgacagtggggtgttaaagtctcccattattaatgtgtgggagtctaagtctctttttaggtcactcacgacttgctttgtgaatctaggtgctcctgtattaggtgcatatatatttaggatagttagctcttcttgttgaattgatccctttaccattatgtgatggccttctttgtctcttctgatctttgttggtttaaagtctgttttatcagagactaggattgcaacccctgccttttttttgttttccatttgcttggtagatcttcctccatccttttattttgagcctatgtgtgtctctgcacgtgagatgggtttcctgaatacagcacactgatgggtcttgactctgtatccaatttgccagtctgtgtcttttaattggagcatttagtccatttacatttaaagttaatattgttatgtgtgaatttgatcctgtcattatgatgttagctggttattttgctcgttagttgatgcagtttcttcctagtctcaatggtctttacattttggcatgattttgcagtggctggtaccggttgttcctttccatgtttagcacttccttcaggagctcttttagggcaggcctggtggtgacaaaatctctcagcatttgcttgtctgtaaagtattttatttctccttcacttatgaagcttagtttggccggatatgaaattctgggttgaaaattcttttctttaagaatgttgtatattggcccccactctcttctggcttgtagagtttctgccgagagatccgctgttagtctgatgggcttccctttgagggtaccccaacctttctctctggctgcccttaacattttttccttcatttcaactttggtgaatctgacaattatgtgtcttggagttgctcttctcgaggagtatctttgtggcattctctgtatttcctgaatctgaatgttggcctgccttgctagattggggaagttctcctggataatattctacagagtgttttccaacttggttccattctccccatcactttcaggtacaccaatcagatgtagatttggtcttttcacatagtcccatatttcttggaggctttgctcgtttctttttattcttttttctctaaacttccttctcactccatttcattcatttcatcttccatcattgatagcctttcatccagttgatcgcatcggctcctgaggcttctgcattcttcacgtagttctcgagccttggctttcagctccgtcagcttctttaagcacttctctgtattggttattctagttatacattcttctaaatttttttcaaagttttcaacttctttgcctttggtttgaatgtcctcccgtagctcggagtaatttgattgtctgaagccttcttctctcagctcgccagagtcattctccgtccagctttgttccgttgctggtgaggaactgcattcctttggaggaggagaggcgctctgctttttagagtttccagtttctctgctctgttttttccccatctttgtggttttatctacttttggtctttgatgatggtgatgtacagatcggtttttggtgtggatgtcctttctgtttgttagttttccttctaacagacaggaccctcagctgcaggtctgttggagtacccggccgtgtgaggtgtcagtctgcccctgctggggggtgcctcccatttaggctgctcgggggtcaggggtcagggacccacttgaggaggcagtctgcccattctcagatctccagctgcgtgctgggagaaccactgatctcttcaaagctgtcagacagggacatttaagtctgcagaggttactgctgtctttttgtttgtctgtgccctgcccccagaggtggagcctacagaggcaggcaggcctccttgagctgtggtgggctccacccagttggagcttcccagctgctttgtttacctaagcaagcctgggcaatggcgggcgcccctcccccagcctccctgccaccttgcagtttgatctcagactgctgtgctagcaatcagcgagactccgtgggcgtaggaccctccgagccaggtgcgggctataatctcctggtgcaccgttttttaagcctgtcggaaaagcacagtatttgggtgggagtgacccgattttccaggtgacccgtttctttgactaggaaagggaactccctgaccccttgtgcttcccgagtgaggcaatgcctcgccctgcttcggctcgcgcatggtgcgcacacccactgacctgcgcccactgtctggcactccctagtgagatgaacctggtacctcagatggaaatgcagaaatcacccgtcttctgtgtcgctcaggctgggagctgtagaccagagctgttcgtatttggccatcttggctcctcccccttctcttttgttatgagtggtcagggatgtcctctccggggtggtggtatttgagcagacatatggataaagtatggaagtgacacacaactttattgagaaagaccatctcaggcaaatataaagtctctgaagaggaagatgtgtgtgtatgtgtgtgtgtgtgagtataaataatgtgtatatgtatgtatattttaataaccacatagactaaaactatccaactgaaacaacttaggtatactttgagaaatataaaatgaaattgtaaggtagaggtagcattaataaactatctagtataccattaaataagtttgtggtgattggtgattcaacacccgaatcatctaggtaaatcctgaaaaactcatattttattaattgcttctccttccccttctttccccgtccccactcctttctcgtctctttccccccctctccttttctcccatctttcacttctaatttcagtgaaattggagcgatttgaaattccaatcaaggttcgattaagcccagagccatggacccctgaaactggtttggtaactgatgctttcaaactgaaaaggaaggagctgaggaaccattacctcaaagacattgaacgaatgtatgggggcaaataaaatgttgttgtcttattgacagttgtgcaggaggtagcctggtggttttcaacctctagaattttaagcctttgttgaactgttagaatgtaaggtatatcattctaaagatagagtaaaaagaaaacaaaaccaaaagttattaaaattgttgtccggtttactttaacttagttttgcatagttctagtgcagctgaaattgaaaagttatttccctttagctgtgttattatagagcagaaattctgtttttaaaaattagcctaagatatacttgtttttgtaaagaaaaatatttaatgttgaacaaaataaattggagttggagtagaatgtagtttgaggaaatttgcagcttccaatgcctcttgtcttcctatttcagaagtttaaatattaagcatgacagaaaatatgtattaacactactcaaagcaaaagtgctgcagggctttaaaattctcttccaaccatttatcttgaaggaaaaattcaatagtaatataatacacaaaatcaaataataccttagaaggtattaagattataattgttgcataggttagatatagagtcattgtaatgttgtgaataattacagtgcctaaaataagaatagaacaacatatacaacaccaaaaaatatctagtaatatatttaaagggaaattgagctgctttttttgaaactttgagatctaaaaataactgtaattatttgaatgactaagaggaaagtacattttttgaaatgctgaaaattgcctttctgtgtttattcaaactgaaaagctgagaccaagagcaaggaaggtaaaaagttaacaggcaaacattttctcttagaaaaggtgataaaatcataagtatttggaattagaacccttgcacagcactgaacctgggaaagagatttaaactctgaatttatctttgataacagggattgattttaaaatgtacatgtattaaattacatttgtaatttaaggtctgtttgctgttgctgattttattcttgatcagtagtttgcatttcagaaagcctttcattttgctttaattttagcaaagcgggttataatgaatgacttccccaatatcttgcttgaacttacaggtgattaacttggatgagttttgggaagttaaagggaagaaaacactgttatcattttttcctgtttgggaagagcttagaaactggaaatactagatttgggagaagggcagagttacttgataagggactgatgtttgtgcagtaacttgggagtgtggtttctttttgaatctttaattaaaacctgggattatatatccctgataaatattcacacttgaaccatagttactgtaaaatgcaaaaaatcttaatactgttattctttgcactttttcttaatcattttttatatatatgcatatatatatgtgtgtgtgtgtgttgcttatgttgttttgtacagatgtgggccaccattgcaacaaaatacattctttttgctctaaaatatttatgaagaaaatacttaaatgttatgtatatggtggtaataagggaaaaatcaagtattataaacaagaatgaaggtttttgtaaagatttctgttcagcgttttgcaaggtaaaattttaggcaagttttccctgaagttatgtgtatgtgagtattctcattcttcccaacttgcctttgaagagtgaaataccattattatcaagtagactactgttcagcttttattcctgccctgctgtttatcccttaagaatgagtttcttagacttttccaatatgtgattttttttcccatttagaatggtgattttaaatgtgtgagtgcatgtactatcttatctcagatatttgcacccccaatctgcccccaactcccaaaagctagaacactgccaactgatctgttataggtcctttagaaacacataattaacacttaaggttgggtgctgctaattctttgcaaaaatccaaatattgttaagggaccagggagatgccactaccccttgattttccatctaaaaatatacatgtttatgtaaacaaatctttccatatccatagtgacttttcaagtatttaagcctaaagattttgatctcacatttttatacctgtttaaattgctcacagttattacatacacatcagccatcaactaaagttgtactttaaaaatttactacaatatgtacatttctaagtcaaacacttgtgacttttgctttaattccatgaatgttcctgcctccttgatatttgtatttattctttttttctctagagtagaggtataattgtgtgatatttcagaaatacagataaatgattcaaaaagtcacagttaaggagaatcatgtttctttgatcatgaataactgattagtaagtcttgcctatattttcctgatagcatatgacaaatgtttctaaggtaacaagatgagaacagataaagattgtgtggtgttttggatttggagagaaatattttaatttttaaatgcagttacaaattataatgtattcatatttgtactttctgttaaaatgcatgattgcagaattgtttagattttgtgtttattcttgatgaaaagctttgtttgttcttgtttttaagtttgcactcaaatcttaagaaataaatccacccatgttatcaagccaa

SEQ ID NO: 10461 - DNA, 5709 bp, Homo sapiens
ttcattccttctttttttttttttttactgtaagttctagggtacatgtgcacaacgtgcaggtttgttacgtatgtatacatgtgccatgttggtgtgctgcacccattaacttgtcatttacattaggtatgtctcctaatgctatccctcccacctcccccctccccaccccacaacaggccccggtgtgtgatgttccccttcctgtgtccaagtgttctcattgttcagttcccacctatgagtgagaacatgcggtgtttgtttttttgtccttgcgatagtttgctgagaatgatggtttccagcttcatccatgtccctacaaaggacatgaactcatccttttttatggctgcatagtattccatggtgtacatgtgctacatttcttaatccagtctatcattgttggacatttgggttggttccgagtctctgctgttgtgaatagtgctgcaataaacatacgtgtgcatgtgtctttatagcagcatgacttataatcctttcggtatatacccagtagtggtatggctgggtcaaatggtatttctagttctagatccctgaggaatcaccacactgtcttccacaatggttgaactagtttacagtcccaccaacagtgtaaaagtgttcctattctccacgtcctctccagcacctgttgtttcctgactttttaatgatcaccattctgaatggtgtgagatggtatctcattgtggttttgatttgcatttctctgatggccagtgatgatgagcattttttcatgtgtctgttggctgcataaatgtcttcttttgagaagtgtctgttcatatccttcgcccacttgttgatggggttgtttgtttttttcttgtaaatttgtttgagttcattgtagattctggatattagccctttgtcagatgagtagattgcaaaaattttctcctattctgtaggttgcctgttcactctgatggtagtttcttttgctgtgtagaagctcttcagtttaattagatcccatttgtcaattttggcttttgttgccattgcttttggtattttagacatgaagtccttgcccgtgcctatgtcctgaatggtattgcctaggttttcttctagggtttttatggttttaacttaacattaaagtttagttaaagacttagcttaaagtttagttaaaaacattaaagacttaacatttaagtctttaatccatcttgaattaatttttgtataaggtgtaaggaaaggatccagtttcagctttctaaatatggctggccagttttcccagcaccatttgttaaatagggaatcctttccccatttcttgtttttgtcaggtttgtaaaaaatcagatggttgtagatgtgtggtattatttctgagggctctgttctgttccattggtctatatctctgttttggtaccagtaccatgctgttttggttactgtagccttgtagtatagtttgaagtcaggtagcgtgatgcctccagctttgttcttttggcttacgactgacttggcaatgcaggctcttttttggttccatatgaactttagagtagttttttccaattctgtgaagaaagtcattggtagcttgatggggatggcattgaatctataaattaccttgggcagtatggccattttcacgatattgattcttcctatctgtgaacatggaatgttcttccatttgtttgtatcctcttttatttccttgagcagtggtttgtagttctccttgaagaggtccttcacatcccttgtaagttggattcctaggtattttattctctttgaagcaattgtgaatgggagttcactcatgatttggctctctgtttgtctgttattggtgtataggaatgcttgtgatttttgcacattgattttctatcctgagactttgctgaagttgcttatcagcttaaggagattttgggctgagacaatgaggttttctagatacacaatcatgtcatctgcaaacagggacaatttgacttcctcttttcctaattaaataccctttatttctttctcctgcccgtttgccctggccagaacttccaactatgttgaataggagtggtgagagaaggcatccctgtcttgtgccagttttcaaagggaatgcttccagtttttgcccattcagtatgatgttggctgtgggtttgtcataaatagctcttattattttgagatacatcccatcaatacctaatttattgagagttcttagcatgaagggctgttgaattttgtcaaaggccttttcggcatctattgagataatcaggtagtttttgtctttggttctgtttatatgctggattacatttattgatttgcatatattgaaccagccttgcatcccagggatgaagcccacttgatcatggtggctaagctttttgatgtgctgctggattcggtttgccagtattttattgaggatttttgcattgatgttcatcagggatattggtctaaaattctctttttttgttgtgtctctgccaggctatggtatcaggatgatgctggcctcataaaatgagttagggaggattccctctttttctattgattggaatagtttcagaaggaatggtaccagctcctccttatacctctggtagaattcggctgtgaatccgtctggtcctggactttttttggttggtaagctattaattattgcttcaatttcagctcctgttattggtctattcagagattcaactttttactggtttagtcttgggagggtgtatgtgtccaggaatttatccatttcttctagattttctagtttatttgcatagaggtgtttatagtattctctgatggtagtttgtatttctgtgggattggtggtgatatcccctttgtcattttttatttcgtctatttgattcttctctcttttcttcttattagtcttgctagtggtctatcaattttgttgatcttttcaaaaaaccagctcctggattcattgatttttaaaggttttttgtgtctctatctccttcagttctgctctgatcttagttatttcttgctttctgctagcttttgaatgtgtttgctcttgcttctctagttcttttaattacgatgttagggtgtcaattttagatctttcctgctttctcttgtggacatttagtgctataaatttccctctacacactgctttgaatgtgtcccagagattctggtatgttgtgtctttgttctcattggtttcaaagaacatctttatttccgccttcatttcgttatgtacccagtagtcattcaggagcaggttgttcagtttccatgtagttgagtggttttgagtgagtttcttaatcctgagttctagtttgattgcactgtggtctgagagacagtttgttataatttctgttcttttacctttgctgaggagtgctttatttccaaccatgtggtcaattttggaataagtgcgatgtggtgctgagaagaatgtatattctgttgatttggggtggagagttctgtagatgtctattaggtctgcttggtgcagagctgagttcaattcctggttatccttgttaactttctgtctcgttgatctgtctaatgttgacagtggggtgttaaagtctcccattattactgtgtgggagtctaagtctctttgtaggtctctgaagacttgctttatgaatctggatgctcctgtattgggtgcatgtatatttaggatagttagctcttcttgttgaattgatacctttaccattatgccattatgtaatggccttctttgtctcttttgatctttgttggtttaaagtctgttttatcagagactaggattgcaacccctgcctttttttgttttccatttccttggtagatcctcctccatccctttattttgagcctatgtgtgtctctgcatgtgagatgggtttcctgaatacagcacactgatgggtcttgactctttatccaatttgccagtctgtgtcttttaattggagcatttagcccatttacatttaaggttaatattgttatgtggaatttgatactgtcattatgatgttagctggttattttgctcgttaattgatgcagtttcttcctagtctcggtggtctttacaatttggcatgtttttgcagtgactgttactggttgttcctttccatgtttagtgcttccttcaggagctcttgtagggcaggcctggtggtgacaaaatctcagcatttgcttgtctgtaaaggattttatttctccttcacttatgaagcttagtttggctggatatgaaattctgggttgaaacttcttttctttaagcatgttgaatattggcccctactctcttctggcttgtagagtttctgccgagagatccgctgttagtctgatgggtttccctttgagggtaacccgacctttctctctggctgcccttaacattttttccttcatttcaactttggtgaatctgacaattatgtgtcttggagttgctcttcttgaggagtatctttgtggtgttctctgtatttcgtgaatttgaatgttggcctgctttgctaggttggggaagttcttgtggataatatcctgcagagtgttttccaacttggttccattctccctgtcactttcaggtacaccaatcaaacgttgatttggtctgttcacatagtcccgtatttcttggaggctttgttcatttctttttattcttttttctctaaacttctcttctcccttcatttcattcatttgatcttcaatcactgataccctttcttccagttgatcgaatcggctactgaagcatgtgcattcgtcacgtagttctcgtgccatcgttttcagctccatcaggtcatttaaggacttttctacactggttattctagttagccatttgtctaatcttttttcaaggtgtttaagttctttgcaatgggttcgaacttcctcctttagcttggagaagtttggtcatctgaagccttcttctctcaactcatcaaagtcattctctgtctagctttgctccgttgctggtgaggagctgtgttcctttggaggaggagaggtgctccgatttttagaattttcagtttttctgctctgttttttccccatctttgtggttttttctacctttggtctttgatgatggtgatatacagatggggttttgatgtggatgtcctttctgtttgttagttttccttctaacagtcaggaccctcagctgcaggtctgttggagtttgctggaggtccactctagaccctgtttgcctgggtatcagcagcggaggctgcagaacagctaatattgctgaacagcaaatgttgctgcctgatcgttcctctggaagtttcgtcttagagggctacccggccatgtgaggtgtcagtctgttcctactggggggtgcctccccccaagttaggctacttgggggtcagggacccacttgaggaggtagtctgtccgttctcagatctcaaactccgtgctgggagaaccactactctcttcaaagctatcagacagggacatttaagtctgcagaggtttctgctgccttttgtttggctatgccctgtccccagaggtggagtctacagaggcaggcaggcctccttgagc

SEQ ID NO: 10462 - DNA, 6061 bp, Homo sapiens
accattttgtttttttttttttttcttttttttttttattatactttaagttttagggtacatgtgcacattgtgcaggttagttacatatgtatacatgtgccatgctggtgcgctgcacccactaacttgtcatctagcattaggtatatctcccaatgctatccctcccccctccccccaccccacaacagtccccagagtgtgatattccccttcctgtgtccatgtgatctcattgttcaattcccacctatgagtgagaatatgcggtgtttggttttttgttcttgcgatagtttactgagaatgatgatttccaatttcatccatgtccctacaaaggacatgaactcatcattttttatggctgcatagtattccatggtgtatatgtgccacattttcttaatccagtctatcattgttggacattcgggttggttccaagtctttgctattgtgaataatgccgcaataaacatacgtgtgcatatgtctttatagcagcatgatttatagtcatttgggtatatacccagtaatgggatggctgggtcaaatggtatttctagttctagatccctgaggaatcgccacactgacttccacaatggatgaactagtttacagtcccaccaacagtgtaaaagtgttcctatttctccacatcctctccagcacctgttgtttcctgactttttaatgattgccattctaactggtgtgagatggtatctcattgtggttttgatttgcatttctctgatggccagtgatgatgagcattttttcatgtgtttcttggctgcgtaaatgtcttcttttgagaagtgtctgttcatgtccttcgcccactttttgatggggttgtttgtttttttcttgtaaatttgtttgagttcattgtagattctggatattagccctttgtcagatgagtaggttgcgaaaattttctcccattttgtaggttgcctgttcactctgatggtagtttcttttgctgtgcagaagctctttagtttaattagatcccatttgtcaattttggcttttgttgccattgcttttggtgttttggacatgaagtccttgcccatgcctatgtcctgaatggtcatgcctaggttttcttctagggtttttatggttttaggtctaacgtttaaatctttaatccatcttgaattgatttttgtataaggtgtaaggaagggatccagtttcagcttcctacatatggctagccagttttcccagcaccatttattaaatagggaatcctttccccattgcttgtttttctcaggtttgtcaaagatcagatagttgtaggtatgcggcattatttctgagggctctgttctgttccattgatctatatctctgttttggtaccagtaccatgctgttttggttactgtagccttgtagtatagtttgaagtcaggtagcgtgatgcctccagctttgttcttttggcttaggattgacttggtgatgcgggctcttttttggttccatatgaacttgaaagtagttttttccaattctgtgaagaaagtcattggtagcttgatggggatggcattgaatctgtaaattaccttgggcagtatggccattttcacgatattgattcttcctacccatgagcatggaatgttcttccatttgtttgtatcctcttttatttccttgagcagtggtttgtagttctccttgaagaggtccttcacatcccttgtaagttggattcctaggtattttattctctttgaagcaattgtgaatgggagttgactcatgatttggctctctgtttgtctgttgttggtgtataagaatgcttgtgatttttgtacattgattttgtatcctgagactttgctgaagttgcttatcagcttaaggagattttgggctgagacaatggggttttctagatatagaatcatgtcatctgcaaacagggacaatttgacttcctcttttcctaattggataccctttatttccttctcttgcctaatttccctggccagaacttccaacactatgttgaataggagtggtgagagagggcatccctgtcttgtgccagttttcaaagggaatgcttccagtttttgcccattcagtatgatattggctgtgggtttgtcatagatagctcttattattttgaaatacgtcccatcaatacctaatttcttgagagtttttagcatgaagggttgttgaattttgtcaaaggctttttctgcatctattgagataatcatgtggtttttgtctttgcctctgtttatatgctggattacatttattgatttgcgtatattgaaccagccttgcatcccagggatgaagcccacttgatcatggtggataagctttttgatgtgctgctggattcggtttgccagtattttattgaggatttttgcatcaatgttcatcaaggatattggtctaaaattctcttttttggttgtgtctctgcccagctttggtatcagaatgatgctggcctcataaaatgagttagggaggattccctctttttctattgattggaatagtttcagaaggaatggtaccagttcctccttgtacctctggtagaattcagctgtgaatccatctggtcctggactctttttggttggtaaactatcgattattgccacaatttcagctcctgttattggtctattaagagattcaacttcttcctggtttagtcttgggagagtgtatgtgtggaggaatttatccatttcgtctagattttctagtttatttgcatagaggtgtttgtagtattctctgatggtagtttgtatttctgtgggatcagtggtgatatcccctttatcattttttattgtgtctatttcattcttctctctttttttctttattagtcttgctagtggtctatcaattttgttgatcctttcaaaaaaccagctcctggattcattgattttttgaagggttttttgtgtctctatttccttcagttctgctctgattttagttatttcttgccttctgctagcttttgaatgtgtttgctcttgcttttctagttcttttaattgtgatgttagggtgtcaattttggatctttcctgctttctcttgtgggcatttagtgctataaatttccctctacacactgctttgaatgcgtccgcagagattctggtatgttgtgtctttgttctagttggtttcaaagaacatctttatttatgcgttcatttagttatgtaccagtagtcatttaggagcaggttgtttagtttccatgtagttgagcggctttgagtgagattcttaatcctgagttctagtttgattgcactgtggtctgagagatagtttgttataatttctgttcttttacatttgctgaggagagctttacttccaactatgtggtcaattttggaataggtgtggtgtggtgctgaaaaaaatgtatattctgttgatttgggttggagagttctgtagatgtctattaggtccgcttggtgcagagctgagttcaattcctgggtatccttgttgactttctgtctcgttgatctgtctaatgttgacagtggggtgttaaagtctcccattattaatgcgtgggagtctaagtctcttcgtaggtcactcaggacttgctttatgaatctgggtgctcctgtattgggtgcatatatatttaggatagttagctcttcttgttgaattgatccctttaccattatgtaatggccttctttgtctcttttgatctttgttggtttaaagtctgttttatcagagactaggattgcaacctctgcctttttttgttttccatttgcttggtagatcttcctccatccttttattttgagcctatgtgtgtctctgcacatgagatgggtttcctgaatacagcacactgatgggtcttgactctttatccaatttgccagtctgtgtcttttcattggagcatttagtccatttacatttaaagttaatattgttatgtgtgcatttgatcctgtcattatgatgttagctggtgatattgctcgttagttgatgcagtttcttcctagtctcgatggtctttacattttggcatgattttgcagcggctggtactggttgttcctttccatgtttagtgcttccttcaggagctcttttagggcaggcctggtggtgacaaaatctctcagcatttgcttgtctgtaaagtattttatttctccttcacttatgaagcttagtttggctggatatgaaattctgggttgaaaattcttttctttaagaatgttgaatattggcccccactctcttctggcttgtagggtttctgatgagagatccgctgttagtctgatgggcttccctttgagggtaacccgacctttctctctggctgcccttaacattttttccttcatttcaactttggtgaatctgacaattatgtgtcttggagttgctcttctcgagaagtatctttgtggcgttctctgtatttcctgaatctgaacgttggcctgccttgctagattggggaagttctcctggataatatcctgcagagtgttttccaacttggttccattctccccatcactttcaggtacaccaatcagacgtagatttggtcttttcacatagtcccatatttcttggaggctttgctgatttctttttattcgtttttctctaaacttcccttctcgcttcatttcattcatttcatcttccatcgctgataccctttcttccagttgattgcatcggctcctgaggcttctgcattcttcacgtagttctcgagccttggttttcagctccatcagctcctttaagcacttctctgtattggttattctagttatacattcttctaaatttttttgaaagttttcaacttctttgcctttggtttgaatgtcctcccgtagctcagagtaatttgatcgtctgaagccttcttctctcagctcgtcaaagtcattctccatccagctttgttccattgctggtgaggaactgtgttcctttggaggaggagagacgctctgcgttttagagtttccagtttttctgttctgttttttccccatcattgtggttttatctacttttggtctttgatgatggtgatgtacagatgggttttcggtgtggatgtcctttctgtttgttagttttccttctaacagacaggaccctcagctgcaggtctgttggaataccctgccgtgtgaggtgtcagtctgcccctgctggggggtgcctcccagttaggctgctcgggggtcaggaacccacttgaggaggcagtctgccggttctcagatctccagctgcgtgctgggagagccactgctctcttcaaagctgtcagacagggacatttaagtctgcagaggttactgctgtctttttgtgtgtctgtgccctgcccccagaggtggagcctacagaggcaggcaggcctccttgagctgtggtgggctccacccagttggagctgcccgctgctttgtttacctaatcaagcctgggcaatggcgggcgcccctcccccagcctcgctgccgccttgcagtttgatctcagactgctgtgctagcaatcagcgagattccgtgggcataggaccctccaagccaggtgtgggatataatctcgtggtgcgccgtttttaagtcagtcagaaaagcgcagtattcgggtgggagtgacccgattttccaggtgcgtccgtcacccctttctttgactcggaaagggaactccctgaccccttgcgcttcccaggtgaggcaatgcctcgccctgcttcggctcgcgcacggtgcgtgcacccactggcctgcgcccactgtctggcactccctagtgagatgaacccggtacctcagatggaaatgcagaaatcacccgtcttctgcgttgctcatgctgggagctgtagaccggagctgttcctattcggccatcttggctcctccctccccacaccattttg

SEQ ID NO: 10463 - DNA, 6056 bp, Homo sapiens
ttattatttttttttataattgtgaagcttttttttttattatactttaagttttagggtacatgtgcaccttgtgcaggttagttacatatgtatacatgtgccatgctggtgcgctacacccactaactcgtcatctggcattaggtatatctcccaatgctatccctcccccctccccccaccccaccacagtccccagagtatgatattccccttcctgtgtccatgtgatctcaatgttcaattcccacctatgagtgagaatatgtggtgtttggttttttgttcttgcgatagtttactgagaatgatgatttccaatttcatccatgtccctacaaaggacatgaactcatcattttttatggctgcatagtattccatggtgtatatgtgccacattttcttaatccagtctatcattgttggacatctgggttggttccaagtctttgctgttgtgaataatgccgcaataaacatacatgtgcatgtgtctttgtagcagcatgctttatagtcatttgggtatatacccagtaatgggatggctgggtcaaatggtatttctagttctagatccctgaggaatcgccacactgacttccacaatggttgaaccagtttacagtcccaccaacagtgtaaaagtgttcctatttctccgcatcctctccagcacctgttgtttcctcactttttaatgattgccattctaactggtgtgagatggtatctcacagtggttttgatttgcatttctctgatggccagtgatgatgagcattttttcatgtgttttttggctgcataaatgtcgtcttttgagaagtgtctgttcatgtccttcacccactttttgatggggttgtttgttttattcttgtaaatttgtttgagttcattgtagattctggatattagccctttgtcagatgagtaggttgcgaaaattttctcccattttgtaggttgcctgttcactctgatggtagtttcttttgctgtgcagaagctctttagtttaattagatcccatttgtcaattttgtcttttgttgccattgcttttggtgttttggacatgaagtccttgcccatgcctatgtcctgaatggtaatgcctaggttttcttctagggtttttatggttttaggtctaacgtttaaatctttaatccatcttgaattgatttttgtataaggtgtaaggaagggatccagtttcagcttcctacatatggctagccagttttcccagcaccatttattaaatagggaatcctttccccattgcttgtttttctcaggtttgtcgaagatcagatagttgcagatatgcggagttatttctgagggctctgttctgttccattgatctatatctctgttttggtaccagtaccatgctgttttggttactgtagccttgtagtatagtttgaagtcaggtagtgtgatgcctccagctttgttcttttggcttaggattgatttggcaatgcgggctcttttttggttccatatgaactttaaagtagttttttccaattctgtgaagaaagtcattggtagcttgatggggatggcattgaatctgtaaattaccttgggcagtatggccattttcacgatattgattcttcctacccatgagcatggaatgttcttccatttgtttgtatcctcttttatttccttgagcagtggtttgtagttctccttgaagaggtccttcacatcccttgtaagttggattcctaggtattttattctctttgaagcaattgtgaatgggagttcactcatgatttggctctctgtttgtctgttattggtgtataagaatgcttgtgatttttgtacattgattttgtatcctgagactttgctgaagttgcttttcagcttaaggagattttgggctgagacgatggggttttctagatatacaatcatgtcgtctgcaaacagggacaatttgacttcctcttttcctaattgaataccctttatttccttctcctgcctaattgccctggccagaacttccaacactatgttgaataggagtggtgagagagggcatccctgtcttgtgccagttttcaaagggaatgcttccagtttttgcccattcagtatgatattggctgtgggtttgtcatagatagctcttattattttgaaatatgtcccatcaatacctaatttattgagcatttttagcatgaagcgttgttgaattttgtcaaaggctttttctgcatctattgagataatcatgtggtttttgtctttggctctgtttatatgctggattacatttattgatttgcgtatattgaacaagccttgcatcccagggatgaagcccacttgatcatggtggataagctttttgatatgctgctggattcggtttgccagtattttattgaggatttttgcatcaatgttcatcaaggatattggtctaaaattctcttttttggtggtgtctctgcccggctttggtatcagaatgatgctggcctcataaaatgagttagggaggattccctctttttctattgattggaatagtttcagaaggaatggtaccagttcctccttgtacctctggtagaattcggctgtgaatccatctggtcctggactctttttggttggtaaactattgattattgccacaatttcagctcctgttattggtctattcagagattcaacttcttcctggtttagtcttgggagagtgtatgtgtcgaggaatttatccatttcttctagattttctagtttatttgagtagaggtgtttgtagtattctctgatggtagtttgtatttctgtgggattggtggtgatatcccctttatcattttttattgtgtctatttgattcttctctctttttttctttattagtcttgctagcggtctatcagttttgttgatcctttcaaaaaaccagctcctggattcattgattttttgaagggttttttgtgtctctatttccttcagttctgctctgattttagttatttcttgccttctgctagcttttgaatgtgtttgctcttgcttttctagttcttttaattgtgatgttagggtgtcaattttggatctttcctgctttctcttgtgggcatatagtgctataaatttccctctacacactgctttgaatgtgtcccagagattctggtatgttgtgtctttgttctcattggtttcaaagaacatctttatttctgccttcatttcgttatgtacccagtagtcattcaggagcagattgttcagtttccatgtagttgagcggctttgagtgggattcttaatcttgagttctagtttgattgcactgtggtctgagagatagtttgttataatttctgttcttttacatttgctgaggagagctttacttccaagtatgtggtcaattttggaataggtgtggtgtggtcctgaaaaaaatgtatattctgttgatttggggtggagagttctgtagatgtctattaggtccgcttggtgcagagctgagttcaattcctgggtatccttgttgactttctgtctcgttgatctgtctaatgttgacagtggggtgttaaagtctcccattattaatgtgtgggagtctaagtctctttgtaggtcactcaggacttgctttatgaatctgggtgctcctgtattgggtgcatatatatttaggatagttagctcttcttgttgaattgatccctttaccatgatgtaatggccttctttgtctcttttgatctttgttggtttaaagtctgttttatcagagactaggattgcaacccctgcctttttttgttttccatttgcttggtagttcttcctccatccttttattttgagcctatgtgtgtctctgcacgtgagatgtgtttcctgaatacagcacactgatggatcttgactctttatccaatttgccagtctgtgtcttttaattggagaatttagtccatttacatttaaagttaataatgttatgtgtgaatttgatcctgtcattatgatgttagctggtgattttgctcgttagttgatgcagtttcttcctagtctcgatggtctttacattttggcatgattttgcagcggctggtaccggttgttcctttccatgtttagcgcttccttcaggagctcttttagggcaggcctggtggtgacaaaaactctcagcatttgcttgtatgtaaagtattttatttctccttcacttatgaagcttagtttggctggatatgaaattctgggttgaaaattcttttctttaagaatgttgaatattggcccccactctcttctggcttgtagggtttctgccgagagatccgctgttagtctgatgggctttcctttgagggtaacccgacctttctctctggctgcccttaacattttttccttcatttcaactttggtgaatctgacaattatgtgtcttggagttgctcttctcgaggagtatctttgtggtgttctctgtatttcctgaatctgaacgttggcctgccttgctagattggggaagttctcctggataatatcctgcagagtgttttccaacttggttccattctccccatcactttcaggtacaccaatcagacgtagatttggtcttttcacatagtcccatatttcttggaggctttgctcatttctttttattcttttttctctaaacttcccttctcacttcatttcattcatttcatcttccattgctgataccctttcttccagttgatcgcatcggctcccgaggcttctgcattcttcacgtagttctcgagccttggttttcagctccatcagctcctttaagcacttctctgtattggttattctagttatacattcttctaaatttttttcaaagttttcaacttctttgcctttggtttgaatgtcctcccgtagctcagagtaatttgatcgtctgaagccttcttctctcagctcgtcaaaatcattctccatccagctttgttccgttgctggtgaggaactgcgttcctttggaggaggagagacactctgcgttttagagtttccagtttttctgttctgttttttccccatctttgtggttttatctacttttggtctttgatgatggtgatgtacagatgagttttcggtgtggatgtcctttctgtttgttagttttccttctaacagacagcaccctcagctgcaggtctgttggagtaccctgccatgtgaggtgtcagtgtgcccctgctggggggtgcctcccagttaggctgctcgggggtcaggggtcagggacccacttgaggaggcagtctgccggttctcagatctccagctgtgtgctgggagaaccactgctctcttcaaagctgtcagacagggacatttaagtctgcagaggttactgctgtctttttgtttgtctgtgacctgcccccagaggtggggcctacagtggcaggcaggcctccttgagctgtggtgggctccacccagttcgaacttcccggctgctttgtttacctaagcaagcctgggcaatggcgggcgcccctcccccagcctagctgccgccttgcagtttgatctcagactgctgtgctagcaatcagtgagactccgtgggcgtaggaccctccgagccaggtgtgggatatagtctcctggtgcgccgttttttaagccggtctgaaaagcgcaatattcgggtgggagtgacccgattttccaggtgcgtccgtcacccctttctttgactcggaaagggaactccctggccccttgcgcttcccaggtgaggcaatgcctcgccctgcttcggctcgcgcacggtgcgcacacccactggcctgcactcactgtctggcactccctagtgagatgcacccggtacctcagatggaaatgcagaaatcacccgtcttctacagctcaccctgggagctgtagaccggagctgttcctattcggccaccttggctcctcccctt

SEQ ID NO: 10464 - DNA, 42488 bp, Homo sapiens
gacgatggggttttctaaatatacaatcatgtcatctgcaaacagggacaatttgacttcctctttccctaattgaatatgctttatttctttctcttgcctgattgccctggccagaacttgcaacactatgttgaataggagtggtgacagagggcatccttgtcttgtgctggttttcaaagggaatgcttccagtttttgtccattcattatgatattggctgtgggtttgtcataaatagctcttattattttgggatacgttccatcaatacctagtttattgagagtttttagcatgaagagctgttgaattttgtcaaaggccttttctgcgtctattgagataatcatgtgttttttgtcattggttctgtttatgtgatggattacttttattgatttgcatatattgaaccagtcttgcatcccaaggatgaaagtgacttgatcgtggtggataaggtttttgatgtgctgctggattcagtttgccagtattttattgaggattttcgcattgatattcgtcagggatattggtctaaaattccctttttttgttgtgtctcctccaggctttggtgtcaggatgatgctagcctcataaaaagagttagggaggattccctctttttctactgattgaaatagtttcagaaggaatggtaccagctcctctttgtacctctggtagaatttggctgtgaatccatctgatcctggactttttttggttggtaggctattaattattgcctcaatttcagagcctgttgttggtctattcagagattcaacttcttcctgttttagtcttgggagggtgtatgtgtccaggaatttatccatttcttctagattttctagtttatttgtgcagaggtgtttatagtattctctgatggtagtttgtgtttctgtgggatcgatggtgatatcccctttatcattttttattgcatctatttgattcttctctcttttcttctttattagtcttgctagcagtctatcaattttgttgatcttttcaaaaaaccggctcctggattcaatgatttttttgaagggttttttgtgtctctgtctccttcagttctgctctgatcttagttatttcttgccttctgctagcttttgaatgtgtttgccctgcttctctagttcttttaattgtgatgttaggatgtcaattttagatctttcctgctttctcttgtgggcatttagtgctataaatttccctctaccctctgccttaaatgtgtcccagagattcttgtacactgtgtctttgttctcattggttttaaagaacatctttatttctgccttcatttcattatttacccagtagtcattcaggagcaggttcttcagtttccatgcagttgggtggttttgagtgaatttcttaatcctgagttctaatttgattgtgctgtggtctgagagacagtttgttgtgacttctgttcttttacatttgctgaggagtgctttacttccaactatgtggtcaattttagaataagtgtgatgtggtgctgagaatgtatcttctgttgatttggggtgtagagttctgtagatatctattaggccttcttggtccagagctgagttcaagtcctagatatccttgttaatcttctgtctcattgatctgtctaatattgacagtggggtgttaaaatctctcattattactgtctgggagtctaagtctctttttaggtctctaaggacttgctttatgaatctgggtcctcctgtattgggtgcatatatatgtaggatagttaactcttcttgttgaattgatccttttaccattatgtagtggtcttccttgtctcttttgatcttcgttggtttaaagtctgttttatcagagactagaatcacaacccctggtttgttgttgttgttgttgttgttgttgttgctttctatttgcttggtagatcttcctgcattcctttattttgagcctatgcgtgtgtttgcatgtgagatgggtctcctgaatatagcatactgatgagtcttgactctttatccaatttgccagtctgtgtcttttaattggggcatttagcccatttacatttaaggttaatattgttatgtgtgaatttgatcctgtcgttatgatgttagctggttattttgcccattagtttatgcagtttcttcatagcttggatattctttaccatttggcatgtttttgcagtggctggtaccggttgttcctttccatgtttagcacttccttcaggagttcttgtaaggccggtctggtagtgacaaaatctctcagcatttgcttgtctgtaaaggattttatttctccttcatttatgaagcttagtttgactggatatgaaattctgagttgcaaattcttttctttaagaatgttgaatattagcccccactctcttctggcttgtatggtttctgccaagagatctgctgttagtctgatgggcttccctttgtgggtaacctgacctttctctctggctgcccttaacgttttttccttcatttcaactttagtgaatctgacaattgtgtgtcttggggttgctctactcgaggaatatctttgtggtgttctctgtatttcctgaatttgaatgttggcttgccttggtaggttggggaaattctcctggatagtgtcctgaatagcattttctacactgtgttccattctccctgtcactgtccagtataccaatcaaacgtagatttggtcttttcacatagtcccatatttcttggaggctttgttcgtttcttttcactcttttttctctaatcttgtctacttgctttatttcattaatatgatcttcaatcactgatatcctttcttccacttgattgaatcagctattgaagcttgtgcttgcatcaagaagttctcatgccatggttttcagctccatcatgtcgtttaaagtcttctctacagtgtttattctagttagccattcgtctaaccttttttcgaagtttttctcttcgttgcaatgggttcaaacatcctcctttagtttggagaagtttgttattaccgaccttctgaagcctacttctctcaactcatcaaagtcattctccatcccgtcttgttctcttgttggcgaggagatgcaatcctttgaaggagaagtgacgctctggtttttggaattttcagcttttctgctctggtttcttcccatctttgtggttttttatctacttttgttctttgatgttgctgacctacagatggggttttggtgtgggtgtcctttttgttgatgttgatgctattcctttctgtttgttagttttccttctaacagtcaggtccctcagctgcaggtctgttggagtttgctggaggtccactccagaccctgtttgcctaagtatcaccagcgaaggctgcagaacagctagtattgctgtctgatccttcctctggaagcttcatcctggaggggcacccacctgtttcagttgtctgtcggcccatactgggaggtgtttcccagtcaggctacacaggggtcaggggcccacttgaggaggcagtctgtccattcttggagctggaatgctgtgctgagagaaccactgctctctttagtgctgtcagacagggaagtttaagtctgcagaagctgtctgttgccttttgttctactatgccctgcccccagaggtggaatctatagtggcagtaggccttgctgagctgggatgggctccacccagttcttgcttccaggcctctttgtttacactgtgagctactcaagcctcagcaatggaggacgcccttccccctatttcaatagatatttaaaaagcattcaagaaaattgaacatcacttaatgaaaaaaactctcaaaaaattggtgaagaaacatacttcaacttgataaggaccatgtatgacaaatccacagttaatatcatactgaatggggaaaaattgaaagcctttccactaagatctggaacaagacaagaatgcctactttcatcacttttattcaacattgtactgaaagtcctagctagagtaattagacaagattaaaaaaagtaaagggcatccaaactggaatgaagtcaaattgtacttgtttacagatgaaacaaacttatatttagaaaaacctaaacactcgactcagaaactactagaactgattaaggaattctacaagctataggatacaaaataaagctggagatatcacactatctgacttaaaattatactataaatctatagtaaccaaaacagcatgtactggtacaaaaacagacccatagaccattggaacagaatagagaacccagaaataaatccacacacttagggcaacttatttttgacaaagacatcaagaacatacattgggagaaaggataatctctaataaatagtgctgagaaaactggatatctgtatgtagaagaatgaaactggatctccatcttttaccacaaagaagaatcaactcaaaatggattaaagacttaaatgtaagacgtgaaactatgaaaccactaaaagaaaacactggggaaacactacaggacattgatctgggcaaagagattttgagtaagacctcaaaagcacaggcaacaaaggcaaaaatatacaaatgggattacatcaagccaaaaagcttctgcacagcaaaggaaatggtaaaagaagtaaagggataacctgaagaatgggagaaaatatttgcaaactctccatccaacaagggattaatatctagaatataaaggaaactcaaatgactcgataccaaaaaacaaacaatctggttttaaaaatggattaaatacctgaatcgacatttctcaaaacaagaaatacaaatggccagtagatatatgaaaaatggccaacatcactaatcatcagggaaagcaaatcaaaaccacaatgagataccatctcactcagttagaatgactgttatcaaaaagacaaaaaataacaaatgctggcggggatgtggagaaaagggaacatgcatacactgttggggaggaaagtagtacacagttatgggaaaagtatggaggttcctaaaaaaactaaaaataaaactactatatgatccagcaattccactgctaagtatataaccaaaagaaaggcaatcagtatctgaaagcaatatcttcactcccatatttattgcctcattattcacaatacccaagataaggaaccaatctaagtgtcccttaatgaataaattcataaagaaaatgtacctatacagaatggaatattatttgaccataaaaaatgaaaccttatcatttaaagcaacatagatggaactggaggtcattatggtaagagaaacaagccaggcacagaaagacaaacatcatgtgttttactcatatgggagagcttagaaggtggatgtcatggaaggaaaggatagaatggtggtcaccaaaggctgggaagggaaaaggaaagggaggtacgaagataaatggattaaggggtaaaaatatacagttagataaaagaaataagttctcgtattcactagtatagtagggaaattatagttaacaataattcattgagaagaattctaacatttccaacacaaagaaaaggtaaatgtttgaggtgatgtatatcccaatgatactaatttgattattacacattgtataaaggtatcaaaatatcacacatacccctaaaatatgtactactataatatagcaacaaaacattaaaaaaaaagaatacaagaagaagaagacccattttcgtggagggaatcagataataaaacaggacacatagtaggcaagttggtgatatgtgatttggaggaaaataaaacaatggagtcttagaagagagtcacaatttaaatagggaggtcagataaggccttacaactcagttgatctctgagaaaaggagagagggaaggagccatcttggtttctgggggcagagtacctggttggaggaaatagcaactgtgcagagcctgtagtgggaacctgcctagattatttgaggtctttgtggctggaagggagttagttaggggaagggcagggggactagaatgtattgttttatgggccattgtgggaaccttggcttttactcttaaggaaatgaggattttgaacagagttgtgacatactatggcttgtggtttagcagaaggtgatataaaaaatacatgtggtcttcatctccagtttctggcacagaattcctaaaacctttggaatttgctgagtgatgggagtgttttttgtatgtaaacaagatgattcaaggggtgggaaagccctagagagtttcagggtggggctggtcaccagaataacaaacccttgcttagagggttagaacttccagacttacctcctagctctagggagaggaatgggactgcagatggagttcattctccagtggccaatgatttaatcaaaactgcctatggaataaaagctccattaaaactctgaaactactagagtaggtgagcttccaggtggatgaacatattgatgtgctgggaagttcaactgcctggagaaggcacagaaattctgcacaccccaccctcaatcttccaatgccttcacctgtgcatctcttccctttggctgttcctgagttgtagcctttgtaacaaaactgtaatggtaagaatagcactttccttagttctgtgaatcaccctagtgaattatcaaactgaaggagagagagcagtcgtgggaactcttgaattagtagttggccaggaagaagtgcaggtagcctggggaccccatttgtggctgggccctgaagtacaggcagtcttgtgggacttgtagaacccttaacttgtggaggtctgtgctaactctgggtagttagtgtcagaaatgaattgaattataggaaactcagttggtatcagagaactagagaattggttattggaaaagagacaaaacaccgaatgactctgactcttgtgtggagggtagtaggaaggggaccaacagcagaagagtcagggagacaaaccagccacctaatgtaagtaactgggagagacagcagcagtcatgataagacatacttgtgatgcagtgtgggcaagccccaaatttggggcttagccagggagagttcttggcttcacccaggaaataattcaagggtgaggtggtggtggtagcagctgttattgaagtggcagtgtatggccgcagcagaggtcctgctccttgcagagcagggctaccccataaggcagtgcgcccagagcagcggctcaggggcagttctgcagtcacatttataaccacttttaattatatgcaaattaagggatggagtattcagaaatttctagtaaggggcagtaacttctcgtgttgccatggaaaggggtggtaaatcttaggcgttgccatggcaatggtaaactgacatggaacactggtggggtgtcttatggaaagctgctttccataagaccctgtcttaactagtcctcaatttggtccagtgtctgagccttcctcctacctcacttggattatggatgtattttgaagagaaaatcactgtgatttgcttatgggttccatctgggatgggagagaaagaggaattgagactgattcaaggaattgggcatgtggaaatacaatgtaactctcaatgccccagtgaaggaagtgtctctggagccctctggaaacatattgttaagggctgggttagcaggtcacacaagattgtcaaaagacaaaattacaacaaattcagtttgaagatcttaattggtttttatctgcaattctagaataaggcaacaactcataaaacaaaatgagtgttccgttgagccaagcaaaggaggttggttttatagacagtaaagggctgaggaaagcataaacagaacaaaaaatgggttggttgtttcaaagttacttttcttctaaagcagaaagaactttttaaaattatgctggcttaaactggcctgtttggagatttggttattctctctctctcctgatttcttggaaagttagattaacagcttaatttcagcttggtggtatggaacttcagcaagagtgacttcagtttgatttggtttgttgggcctggtgcaaaagttcagttcaaacaaataaatagcctcctctaaatcttatttagcataataaatcccttccaacactcccatcctcctatgcctgtgaatttcttctcctatattgtaccaaggaatttctggcatttacactacattcagtgtaagtcaccatttagtccactctcactcaaccaaataagccacagttagaaccatagctgtctccagcacactgaatccagagagtctagtaagtgcattcacattgatggatgcagatggaactacaactgcttctgcctcctgtgcacattcttctggcaagttatctggtggcttcttgctcctgcaacccacctcctccaggaaatgttccctgagtcattgccagcacagtgacaagctccccagagaggcagcccactcgtgagcccagctcacttatctcatcttcctgcgttggggaggaaactgcctccagagaccggaattcctggggcctgcagggatacccccgatgctgcagggggagggacggagctcccaggccccttcctaccagaacgttctacaacccccatataaattcttagaacccagagttccacggagcatgaaacagtcatctgctttcactttcatgttattgaaatcatgtgacatcacaaggtcacagggctggaccaagaagggaacaagacttggatctccttccaaggtgtgcaagagggccatgttgtaacatattaacagtatctttcataaaagaggggagacagccagtggtgatgaagagagattttttttttaagttttcaattaaggaacttgaaattctgaacatttacatgtgaaattcagctgcagcatatctggatataaataatacattgaaatttatgtagttaagctttacaggagtcggacaagctctgaaaggatttgcatttcattccgttttttaaaaaatgtgttaactaaaaataaaataatttcaggcatataaagtaactaagtcagtaaggagaatttgcaatagaaaatgagtcacatttaattcagtgcctgtgtcttaaaccattcatgggattaatttacaggataaagtcaccctgggggtgggagagggaggaggctgctctgaattataagccaggacattggttctggcctccggattggttccatcttattcttccctgctcttcttagaactagctctcctttttgtttaaacaatgcctggtaaatatttctgcagctggagaggtcgcaggtgtggcaaagaaggacaggaggtgagaggagaggaatagatggggagacccataggctgggctctctccacattcatcttttccttgatccatcgcttagggctgcttttctcctgagtgttcaattccgagcaggcattcaacagccttttggtgattatatgagtctcctgagaggctataacaaagcatgacaaactgggggcttcaacgaaggaaaatttatttgttacagttctggaggccgaattccaagagcaaggtgcaagctgattcagtgcctggtgagggtctgtttcctggttcatagatggccccttcttactgtgtcttcccatgacagaaggggctaggtaggctctctagggtctctttttaaagagcactaatcccagtcatgacctgatcacttcccaaaggccgctaatacaatcactttgggggttaactttcaacatatgaattttgagttgggggcacagacgttcagaccatggcagtaggttttcagttctcctgagactgtgctgaagagtggaatttctgggttgtatggtaactctgtggttcatgttttgaggaaccactcctttttttttttctcatttaacatgtaaggaaatggaggcttggatagtttaggtcaactggcaaatgcagctagtaagccaaactgctgggagtccaggccagcagttttcacccggaccccgtgcacggaactcctccatcacactgacttgccgtgcatccggaaggactggaagttattttggtgaatgggggcaggaaggactcctgggaagatgtgttacatcctagaagtatgggaggactttttgcatttatgtgggaggagaacaactagaccatgcattttgtgggatgaactgacagaacagaggttgaaggagctgttccttgaagggccttgcataccatgctcaggaattgaatgcagaaagattttaagcagaagcgtaagtatgaaaaatatatgcatgtaaaagaaaaatgaaacccaacctcatatgaaaaggcaaacacagaggaaaaaatatttgcagccacatgacattgggttaatagctttgttatataaaggactcttaaaactgatgatgaaaacatttaaacctaactagataaatgggcaaaggacatgaacagatgattcacaaaataagaaatgcaaagcagtaaacaaacatatggaaacatgttcaacttctagtataatcaaagacatgcaaatttaaacaacagtaagggaagcaattctttgcctatcagattagcaaatgtttgtcaaaatgataatagtcgattctggcaagagggagctataagagaggaattcccgcgcatccttggtatgttcaaatcccggatgccaaatgctcccttcctcgtagctctgtaattctgatctggcaattagttccctcagaagctccatctacatactgtttacaataaagacaaaaattagaaacaagaaggcagagggtgtaggagaccaaagttcagcgcatcatctacatgtgaacgtcaggggggtcactctagccctgacatctcaaggagctccagaactatgcaagtaaaactttattgttttatccaaacttgctttgccacactgattttttctttctttccaacttttagtttaggttcaaggggtacaagtgcaggtttgttatgtggataaattgcatggagtggggatttggtatacagatcattttattaccccgatactcagcataatacccgataggtagtttttctatcctcaccctcctcccaccctccacccccaaataggccctggagtctgtttctccttctttatgtccatggatactcagtgtttagctccacttataagtgagagcatgtggtatttggatttctcttcctgcattaattcacttaagataatggcctccagctccatccatgttgctgcaaaggacgtgattttattcttttttttttgtggctgtgtagtattccgaagaccactcccattcttaagtttccttaacagtatcactggctgaattgtaatccatttctctcctcctcttttccttcatttaatctattcccctcaaattttatagttataccccagaaagccccttgaatctgttctctcaccttctttctaattgccattgctttaaaccatcccttattttctcactcctcaattatttccagagcctcctctcacaggctgtatctcctgtctcctgtcccagggggtatggagtgagaaggaaggggaagtatcaaggaagagacacaataaggccttcaacagtatctgtatgcttttatttcttatttttagaatatctgaagcaaatatcccaaaagggtaggatttattgaatctattatattaaccagatattcagtacattctctaaatttggagtatttaataacaaaatgtttcgcatctcttgtctgatctcctatttggaaattcccctttattctctttcttctttcacaattcctttaaatattttaataataagtaaatctgattatgtcacccttgacttgaaaatttccattagcttagctttctgtttcttacagaataaaatccaaactcattagcttgacacaacgggctcttcataccctatacccaagccatgctacactttatagttccccaaaccctaacctaaatgactctagcccctaccccgcacctctgcacataccctgcctagcacatccactctccagctccccatctggcagctcgcaacccacttttcaaagtcaaggtcaagcatctcttccagaagaaagctttctctgatgttctcaaagcagagtttggtcattcctttctttagcttctcaaaaatattttgttcatgacatttatcattgcttttaccacactgctttgaaatttgtcttcattgtttcctgtaataacagattgtgagttctgcaaggacagggctggtgtcctattcatcttgcaaatcccaggctgagtgcagtgccaagaacattgggagccctgtgagtgccattagaatggaggaaagaggagaagcagagagtccgtgtgcaccagaacaggtttttccctcctcaatggaaataagagtgcagaccaaagtttgtgtagactcagtttggatggcaggtagagccaagccagtgaacagagagtactgttggaagagaacctattccaatggcagaaggcaggatggaaatgttgaaagtttgagggcattctgtgagggcagacgtgcatcctggaccaatcaggcatacccctggccttcagtgatacagaaaatgtggtggcttgatgctcagatctgctttagatttgaggcatctgttcccttagctgcagggagtgtggcaaccaaccactcttggttgagtagctttgtaggacttgccctcagcccaagaaagccacctcatctaagttcatgccccttcctgaggtcaatgactgggctggccaatgagggatgcaaaggtccagcctgcttgcctccaggctgggcaactaagggtaactctagcaccagagctccacatgggatcatttgaggcttttttgtttctgcaacaaagttcaccttttccccttacccatttctgctttcttcactgtcaaacaggtgctaattcctaagtcactctttaataaacttctggcatgaaaatctccatctcagtctgtttcccagagaactgacctaagacaagtgatgttgcaagcgtttatgtttctattccaatctttttactacgttggaaaatgcttccttatacacagctaccaacattcgctccccaaatttttgaagttttttttttaatcattttgttattggtccgaaggttactgaccaatgatcccacctcctcttcttaagacctgagtaaatgttttcttgtttttgtttttgtaaagattgctaaagtgtcacttatttacttacttgagttgcattatatttcatcatatagaggtttgaaattaaaacaaattggcattgaactaggaaggtatagacaacttcgatatttggttcccctctctattagctaaattgttagggaaaaaaccttttaaaacttcttagaatactccaattttaaaggaaaaataactttgaccagacatatttttattcccagtgagttgactttgagggatgaaggcctgtctatatgagctgagtgataggctgtggtttgagggagctggctataaagtatgtttgagatttttaattcgtgggttggaatgccaattgtttatttggaacagcaaaggctgagatggtcaaacatccaaacatggtggtatgtgcccttgaatggcccgtttcaacaacgggctttgctttgaggatgtgtgtggctatggtgttgcattggaaagaagatagaatttgtgggaggaaactttggaaagctgtcagaaaatgagaccctccttcctcccttttctctttagaatgaactttagtccatttttctcaatcctgcctgggactttgtcctcatttttgagccccaatccaacagggtcccttctctccagcagtctctacagttctgctccttcacccatatcctattcatgtcatggcagattttctatgtgttctgcaacagattgtttcatagaattgttttttagtatttgtgaattcatttggaatgcagacattgcaatcatgggtaagattgactattaggagaaatactctctcctcccctcccttggagcaattgaatagcatgccacacatcagatcaaacgaacaggctttagcttcattggtaaacagtttacactgcagagctactgccatcttgccaaatcgcctaagaattagatatggattccagctcaccttgctaattaattcagaatgagaagatattccaaaaagcaacattcttttataccggtggagagtcacacagacatttaaaaatgcttgaaaactggggtgggtggaatatctatcctgcctgttatttttagcttaagaagatttctttgccaaagtctgtttccaaaattttatcactttctgagaaaaatagtgtgcataaaagcatttgggtattatggctgactgattcatctttgaaacaccagcacctagcatagttctgggcatattgtaaacatttggttgttatggtattgaattaaatcctaatgtgcttcaatagtgtggtagccaattcaggaattcacggggataactgagatgaatttcagtacatttccaagtaatgcttattccatgtgcttttgtaaccaactctctaggaatggaacttacctaaggccccattgttagtaggcaggggacctaggggaccagattttgaatttagtactggttgattccacagtttgcaatgtctccttctcgtcctgctggagaatctgttttcaagatctcttgtcagttttgtttggtcttaggtatacgtatgttcttgctgtttgaaacacttatgcctgtattcagagcccctagtcagacatccagtgatttcacccttcctggactgtaatgagaatgggaaaagagggtatgatcaatagacttttattaaaatgctaccttcatgagggtgtttgcattttaaatgggaacctggaaaagtagagttttaagttactaaaaaatgtacactcaacagcctgagggatcttttagaaatatacataaagtcatgtcatttcctgtcttaaaatctcccagttggcctcttactgtacacagaagcatgtaccaagttctgtaccatggcctgcaaggccccacatgatctggcctctgcccacctccctggtcctatatcatcccacttgcaccttgattctaaactttctggttccctgaaaacactgagctcattcacaactcaaaccctctacaactcactgatctctctgcctggaatactcctccctcagatatttttcatgtctgctttctaatttttcaggtctccttagataagctttccttttttgcccaatccaaaggtgcctgcctccacccaatacccagtcactgtttctccttatggtcctcttctaatttctttatggtacttattgctgtctcatttgtttgtgtgttgtctgtctcttccatcaggatgtaaattccctgattgcagggacctcatctgccttgttcactgcctgtatcctccatgcccagaatagtgccaggcactattttccttattatatttctgaaaaatgaacgaatgtcttcaaaggtgaaattcaggctttgtaggagtagaatggaggagaaaggggctttagaggtcagaaaacatctctggaggcatccagttccctcgccccatctctagatgggcttgcctctggttctgaaccttattgctgacctggagctgtgattggagtctgggagctgatctatgtgggtggctgttgcctgcaaagtgcttggcagggagcagagggagaggttcagtgggtgggaggttgtacaatgccagtggctgcattgtgctttagagccctttattatgtcaggtacatgtgaagcaaggaactacattttggtgaggatttagagtttgaggatgcaggaagggtagttctgcttctgttgagaggttaaagttcctttcatgtgtcctctcctctctgattatgaagcttccagtgaaccatgtgcgtggagagcactgggcaatagcagaaaagtaccggctgtcccctattttctccagaggtaaaagaagcagatatttatggagggaagaaaggagaattttagtaattaattggattgactaatcactctgcagctattttaacgaaataagttcttgagctaactgacacacttaaaagctggtttaaaacgttgtttgcctttcttcctttaaaatttttttaaatttctgtggatcatagtaggtgtatatatttatggggtacatgagctattctgatacacgcttccaatgcataataattatgtcatggtaagtggggtatctatcttaaacatttatcctttgtgttatagacaatccaattatactattttagttattttaaactatgtaattactaatgactatagtcacattgttgtactatcaaataataggtcttattcattctttctattttttgtacccattaaccattcctcactcccatgacaacccacctcccacccccactacctttcccagcccctggtcatagcaacggggctgtcttgctgtccgtggtgctgaaacaaattttctttccacgagtgcctgaatggaaataacatttctgtggttttccacttctttcacactacagggaaatttatgggtttcaaactcttttcacacatatcttatgcctttttcctgagagttctctagactatgtagggaaggcagttccctttcccctcacattatggattaaaaatctttggcttgaatctaaaaatctctagtcttatcggaatttctctcatttccatggatgtcttgtaaaacaaatatttttaatatatgcaagcaaagttaattgtgggaatttttcagaaatgcagataaacaaaaaataaaatgaaaatatggccccacacccatagagaactactaacattttggtaaacatcccttgatatagatagatagatagattaatagaagatatatgatataatcctgcatatattgtctttacagttgttatatcagccttttattttttctaaatacagtacaattttataaaccatagtcttcatgttgtacattaactctctagacgtgttcatcctacatgtctgctactttgtatccttcaacttacattttcccatttcctccctgctaccagctctcggaaaccacagttttatctcaatctttatatatttgacttttaaaaagattcctcacataagtgagatcatgcaatatttttcttctgtgcctggtttattttacttagcatgatatcttccaggtccattcatgttgtggcaaatggcaggatctctttttatgaggctgaataatattgtattgtttgtctatatgcactgtgtgtgtatatgtgtgagtgtttatttttacttatatctcacattttctttatccattcattcattgatgaacatttaggttttttcatatcgtggctactgtgaataacactttaatgaacatgagactgcagatatcttaatgaggtggcgatttcatctcatttgggtatatggccagaagataaattgctgagccatatggtagttctaattttaatttccttaggaacttccatacttttttccataatggctgtgcaaatctgcatttctatcaacagtgtactagggtccccttttactccactgtcaccaatatttgttggttcttgcctttttgagaataaccatcccaatgggtgtgaggtaatatctcatggtgtttttaatttgcatttacctgatgattagtgatgctgagcaccttttcatatacctgttggtcatttgtatgtcttctttggagaaatgtctgtttaggtcctttgcttattttttaatttggatatttcttttactgctattgagttgtaagaattcttactaaattttggatattaacccctgatcagatatgtgggtggcaaattttttttccagttcataggttgcattttcattttgttgattgcttccttcacggtggagaatctttttcgtttgatatagtatcatttatttatttttccttttgtagcctgagctttggtgtgataccccaaaaatcatttccaagaacaacatcaatgagctttccccttatgctctcttttaggagttttatagattcaggtgttgcatttaggtcttttattcactttttgttaatttttgttagtggtatatgataagggtccaattttgttattttgcatgtggaagtcaagttttcccagcaccatttattgaagagactatcctttccccattgtgtccttttggtgcccttgtcaaaaattagtggaccatatatgttcggatttatttctgggttctctattctgttccattagtctatgtttctgtttttgtgccggtaccgtactgtttaagttgctatagctttgtaatataattttaagtcaggaagtgtgttgtctccaagtttgtttttctttctcagaattgctttggctattcatggttttctgttattctctttgaattttagaatgtttttgtctctttctataaagaatgccattggaattttaataaggtttgcattaaatctgtatattgctttgggtagtatggacactttaacaacattaattctttcaatccatgagcgtgggatacccttcattttaatcaaggttttaaagttttcagtgtacatatctttcacctccttgattaaatttattcttatcttttttgatgctatcataaatgggattattttcttgatttctttttagctaggttattatttgtgtatagaaatgttactgatgtatgcagtttgatttttatatcctgcaactttactgaattaacttattagttctaacagttgttttgtaaaatatctggggctttctacatataagaccatgtcatctgcaaatagagataatttcacttcttttgttctgatttgggtgtcttttttttttttcttttctgattgctcttgctagtacttccagttctatgttgaatagaaatggtgagagtgggcatctctgccttgtactgaatctcagtgagaacgctttcagttgttccctgttgattatgatgttagctgtaggtttttaataaaacacctctattccgttgaaggacttttcttctatacctaaactgttaagagtttttatcaagaaaggatgctggactttgtcaatgcttttcctgcatcagttgagatgatcaaaatttttatttttcattctgttaatgtgatgtattacattgattgatttgaatatgttaaaccagccttgcatgctagagatttatcccacttggttgtgatgtaaaatcttattgacatgttgttgaattcagtttgctaatattttactgaggattttggcatcaatattcatcagagatattggcctgtagttatctcagagatattgacctgtagttttattttcttgtaatacctttgtccagcttaggtatcaagatgacacttgccttgtaaaatgtgtttggaagtattctccagctctatttcttttttgcaagactttaattagtattgataataattcttctttagatgtttggtagattcagctgtgaagctgtattagttcattctcacactgctataaagaactacctaaaactgtgtaatttttttttaaaaaagggaggtttaatcagctcatggttatgtgggctatacaggcttctgctactggtgaggcctcaggaaacatacaatcatggtggaaggtgaaggggaagcaagcacatcttcatatggcagcaggagagagaaggggaggtgcgacacacttttaaacaaagagatttcaagagaattctatcacaagagcagcaaggggaaagtctctccccatgattcagtcacctcccaccaagcccctcctctaacattgaggattacaattagacatgagatttggatggggacacagaggcaaaccatatcattctgcccctggcttttcccaaatctcatgtccttctcacatgtcaaaacacaatcatgccttccaaacagtttcccaaagtcttcacttattccaacattaactcaaaagttgaaggtccaaagtctcatctgagacaaggcaagttccttcctcctataagcctgtaaaataaaaaacaagttagttacttccaagatacaatggggctacagacattgggtaaatgctcccattccaaaagggagaaattggccaaaacacaggggctacaggctccatgcaagtccaaaacccagcagtcattacatcttaaagccataaaatattcttcttttgactccatgtcttacatccaggccacactgacacaagaggtgggctcccaaggccttgggaagctctgcctccatggctctacagggtatagcccctatggctgattttacaggttggtgatgagtgcctgtggcttttccaggaagatggtacaagctgtcagtggatctaccattctggggtctggaggccggtggccctcttctcacagctccactaggcagtgctccaatgggatctctgagtgggggctccaaccccacatttcccctctgcactgccctagtagaggttttccaggagggctctgcccctacagcagacttctgcctggacatccaagcatttctgtacatcctctgaaatgtaggtggaggctcccaagcctcaactcctgccctctatgcacccacaggcttaacaccacgtggaagtcaccaaggcttgctgattgcaccttttggagcagtggcctgaggtgtatctgggccctcttagccatggctgcagctggagtggctgggattcaggatgtcatgtcctgaggcttcacagagcagcaggaccctgggccttacccacaaaaccatttctgcctcccaggtcttcaggcctgtggtgggaggggctacagctaaggtctctgaaggcactttccccattgtcttgtctattaactttcagctcctgttatgcaaatttctgcaaccttctggatttcctccttggaaaatgagtttttcttttctaccacatgatcatgctgcaaatttttcaaacttttatgctcttcttcccttttaaatataaattccaatttcaggtcatttctttgtttatgcagatgcgtgtaggcttttagaagcagccaggtcacatcttgaattattttctgcttagagatttcttctgccagataccctaaatcatcactttcatgttcaaagttccagatctctagagcaggggcctaaagctgcttgtcttttcactgaggcatagcaagagtgacctttaccccagttcccaaaaagcttctcatctccatctgagaccacaatgtgtccatatcattatcagcattttggacacaactatttagcaagtctctaggaagttccaaactttccctcatcttcctgtcttcttttgagccctccaaactgttacaacctctgcccattacccagttccaaagttgtttccacatttttaggtatctttatagcaataccccactcttggtaccagcttttttgtgtgagtttattctcacactgctataaagaactacctgaaactgggtaattttttttttttaaagaagagttttaattggctcatggttctgtgggctgtataggtttccacttctgggaaagcctcaggaaacataaagtcatggcagaaggtgaaaggaaagcaaacacatcttcacatgatgacaggagggcaggggtggtgctacacacttttaaacaagcagatctggggagaactctatcagaagaacaccaagggggaagttctctcccatgattaaatcacctcccaccaggtttctcctccaacattgaggattacaattcaacatgagatttgggtggggacacagagccaaacaatatcagaagccatctggtcctgggcttttctttattgttactagtctgttctggttttctgtttcttcctaactcaatctcagtaagttataatttcccaggaatttatccatttctcaagtttatccaatttattggcatataattgttcataatagtcatttatgatccattttatttattaagtgagtgttgtaatgtctccactttcatttcttgagtcttatctctctctcttttagttagtctagcttctagaagttttccatttatttatttagagacagagtctcactctgtcacccaggctggagtgcagtggtgcaatcttggctcactgcaacctccgcctcccaggttcaagtgattctccttcctcagcctcctgagtagctagtattacaggtgcatgccaccacacctggctaattttttgtatttaaagtagagatggggtttcactgtgttagccagtctggtctcgatctcctgatgccatggtccacccacctcggcctcccaaaatgctgggattacaggcaagagccaccatacctggttgaattttgtttattttttcaaaaaaccaacttgtggtttcattattctttcctataggttttctgttctctatttgatttattctcttctgatctttattatttccttccttctactagctagtttattttgtctttttttttttatttccttgagatacagtgttaggctattcatttggaatctttctttttagtggaggcatttatttttctaaacttcccacttagaatgcttttactggccaggcgcagtggctcatgcctgtaaacccaacactttgggagcctaaggtaggaggctcacttaaggtcaagagtgtgagactagcctggacaacattgcaagatcccctctctaaaaaaattgaaaaattagctgggtgtggtggcacatgcctttagtcctagttactcagggggctgaggcaggaggatcacttgaacccaggaagttgtggctgcagtgatccatcagtgaatcatgatcacatcaccgcactccagcccaggttacaaagtaagaccccctctaaagaaaaaaaaaattgattttgctgagtcttataggtttttggtgtattgtgtttctattttcatttgtctcaagtttttttttcattttgatttattctttgacccattggttgttcagaaagatattgtttaatttttacatatttgcaaaatttccaagatttctcctgttattaatttctagtttcatactattgtgatcagaaacaatagtagatataatgttaatcttcgtgaacatgtttagacttgttatgtgtcctatatatggtctatcctggaaaacattccatgtgcactacagaatatgtatttttctggtattaggtggaaaatgatatatatgtctgttaggtccatttggtctaaagtgcagttcaagtccagtattttctcattaattttctgtttgttgatctattcattgttgaaagtgggatattaaattttcctactattattgcattctatttattccttcatgtcattaattttgctttatttatttgggtactttcatattggatgcatacatatttctaatttttctgtgctcctgaataattgactccgctatcattaaataatgaccttctttatttctagtagtagttttgacttgcaatccattttacttgatattaagtataactacctttgctctcttttggttattatttgcatggaatatctgcatcccttcatttttagcctatgtttgtccttgaagctaaaataggtctcttgtatgcagcatatgattggatctttaaaaaaatctgtgcagccactttatgtcttaagagtttaaacaatttacatttaaggttattattgataggtaaggacttatacctgctattttgttgtcttatggttgttttgtagctcctttgttcctttcttcctctcttgttgtctacctttgtgatttggtgattttcttatagtgctaagttttaattcctttctctttcttgtttgtgtatctgctgtagtttatgctttgtggtgaccatggggcttacataaaactttttacagttgtaatagactatttaagctgaaaacaacttaacttcagtcacataaaaatactctagacttttacgtctgccccaaaatttatatttttattgttacagtttacatctttttatatcgtgtattccttagcaacttattgtagccgtatttattcttttgccattttgatttttaacttttatactacagatttgaaagatttacacaccaccattgaagtaatgaagtattctgaatttgacaatgaatttacctctaccaatgagttttatagttttatatattttcatgatagtattgtcctttcatttctagttgaagaattccttcccttaagaatttcttatagggcaggtttagtggtaataaattttctctctttttgcttgtctggtaaagactttagttctctttcatttctgaagaacagctttgctgggtagagtattctcggctgacagtcttttttattttcaggatttcactacgccatcccattctctcctggcctacaaggtttctgctaagaaagccattgatagtctaactgggattatcttgtgtcacttgacactttactcttcttgcttttaaaattctctttgtctttggcttttgacattttgattataatgtacctcagtgaggacctctttgggttgaatctgttcccaacctttgagttttatgcatatgaatgtccatatctctcccaagactttgtagttttcagtaactatttcattaaataagctttctgtgcctttctctatctcttctctcttccataatatcactatttgtttgctttatgctgttgcatagatcctgtaagttttcttcactctttttcattcttttttttttttcctctgactgggttatttcaaaagacgtgtcttcaagttcagagattgtttcttgttcttaacctatctgttgttgaagctgccaattgtatttttatttcattcattgaattcttctgctccaagatttatatttggttctttttatgatgtcaatctctttgttgaatttcttgcttaggtcatgaattgtttttctgattttattgaattgcctactgtattcttttgtatctcagtgtatttccttaagatcattatgatgagttccttttcaagcaatttgtaaattttcgttttttggagggtgggtcaattattggataattattgtgttccttttgtggtatcatatgtccttgctttttcatgttttctatgtccctgcattaatgtctgcacatctggtggagctgttacatcttctagactttacagagaaaactctcatgaggaaataatttcacctgccaatgggtctagggtgacagttgggaaggatgtagtggatctgtttctaagcgaatgcagtggcttagcttctgtacaggttcttcatctgagatcaattttggtgatgactgtgggtatctcagtggcctagattgcaggagtttatggctgaagggatcccctatggtgtcagttcagttatggctcataggcagccacagtggttctggggtccagggtgcaggttcccagagcagctatagagtggaggttctagactcaggatctcaccactctactatggtgtctggtacttcaggtgcaaggtcactgtctcaggcatgagtagatgcaggctgatcacagaactagagtctgtgactctgaggcacactccagccacttggacttaaggagctaggttgtagccgtgactctaacccagctctggggaagaagaggtgctctacagtttcaggctccagggagcaaggcacagcagcaattcaggaatcagagtcagtagggcacagtggaaactcaggccttgcgggatgaggcaccacatagtggtggctctggaccctgggatggtgggacgggacacagcagtatctcaggctctgtaaggctaagtgcagtggcagtaagaatccaggaatgctgtggcacagctgtagcctgggtcctgaggggcagggaacagtacagcaatgattccaccacccagggaggtgggatgcctcaacagctcagaccctgggggctagtccagttccagggaatcagggtactatcgttgcttggcctggagggtgaggtgtcccagctcagttggtgctctgtttccctgggacacagagtgccacattggcccagctctgagaggtgcagctactcacctcagccaagacactgataaactcatgaagcagggcactatttcagctctgatgccaaggggtgtgactgctgtgggaggcaaaggcactgtttccctagggggtgggtgctgtttcagcacaggtgtcaaaagggcagggtgcagcagtgactgggatgggaagggcacagctgtctggcttgacttgtatatggtgagccaccaggcagggatgttcagtggtgacaaaccctccgaaatggaagggtgtaatagctacttgcccctggagcagagcacactccagcaatggttctggttccagaatggtgcagagcagtagccacgtgggccaggaggggaggagaacaccattagttacttctctgggagaagcacagctatgtggactccagacagctcctttagctgggcacctgtgaggactacaggagtcatcaatggtgaagactgtgaccagggtggtgatgggggatgctgggttccttttgcttaccttttcccctcaggttccaactggtcctgactggggaataggatggcagaggtaagtgtttgcttcactttgctatactgccttcctgggtgtgcatctgctacaagacttctgctattcctttgctgtactttggtactcttctttagttattttcatcaaaatacagttgtttattcattgctttggatgtcttgtaggggggatgagtgcaaagggctatcttgctgacatcactcttcatttatattatttacaacaagtttttcactgagaaatttattaggtacttttccctgtgttaataaacatagttcttcaacacttcaacataggaagagtatataattgtgggtttataccatgatttatggccattattttttgttggacatttagatcatttctgttgtctttgcaataagcgatactgtaatgaaaactcttgtagctaaatgtttatgcatgttcttatttatttcttcaagataactcttagaattagaactgctgggtcacacaatttaaggcctttaatccaagttgctaaatagcccaatttgcactcccaccagcagcccatttttctctacactcatacacactgagtattattatttaaaaacatacttttcttcattttgtgggtgaaaaggcatcttgctgatttaatttgcctttcttatattactagtgagattggattttttcaagcatttttttgtcatttaaatattttgtaacttccttctcataatctcctattttcctgtttgagagttttaaaatccagatcttctaactctaaagtcaatgctgtttccttgaactcccaagggacatctgatatgaaaataaataggtgtccaagactggtccttagggtgtaacatggttctcacctttcaggatccttctccttcagatgccgccataatgtctgtgtttctttgttaccaacatatcacctcattcaattcttacaagtgttttgagaggcagatggggtaaaccatggtgtctgtacaacagggaacggaggcacattgaggctaatggatttggccaagatcacaaactattgcataagccaaggtgagccttgaaaaaggttctctcaggggtctagtgggaaaattatctgataagctaatcacacttctgtttaatgactctcataatgtattatcttttccagagttatttgcatttaaatagaggaacctgaggcgatctctatttaatgtgctccatcaagccggggaggagctatattaggatctggagcccgcccaccccttaaatcacagtgtgggtgcccacctacttcatctatgcgtggtcctcacacttctcaacatgagttgcttgaaacaccgactttgatgatctgaatatacacaatgtgaggccaaaaactgaaagaaaatagaggcagctctctctctctcatttttttctctctctctccttatctctatctctccatttttaaacagtcttctatgctctgaaaactgtttatccatgttcttcacaaattattcagaaccactcttctcttttctctgaggttagcaagttagtaagtagctctcagaaatgatctctatgcacctggaacaataagcagctggcttaaaagtcataggactctgagcagagatagctcctctcaccgactcactgtctgatgaattcaggcttctgtttgtcacagctccccagtgaccttttgtggcagatctactatagactcacagtggacaccaggcctcctcatcatagcaggtgaggatgacctgatcaccacttctctggtgctctttctgcatggtgacgtttcacatagtacaaaatcacaaagatgcatgaagacattatcagggcatgtttctccctcaccttagatgctggccttccactgacaccactgccttaggtttctccttggtaagattcacctgcaatgacttcaaatgttttatgaaagaggcatctttgcaattttttggtgatatttttatagaatttttttgtaatattttactcatgttcttttaataatgattgaagaaaattgcttatttcaatgaccatctagtgccctgcccatattccctctatctctgtaccacttttttgagggattttctaaaggtctttgttggtactttaattttttgtcaattgacacactcatgttaagaatcctgaggcttggatacaaaatcaatatgcaaaaatcactagcattcctatacatcaacaacaggcaagccaaaagccaaatcacaaatgaactcccattcgcaattgccacaaaaagaataaaatacctaggaatacagctaacaagggaagtgaaggacctcttcaaggagaactacaaaccactgctcaaggaaatgagagaggacacaaacaaatggaaaaacattccatgctcatggataggaagaatcaatatcatgaaaatggccatactgcccaatgcattttatagattccatgctattcccattaaactaccattgacgttcttcacagaattagaaaaactatttaaaaattcatatggaacaaaaaaacccgaatggccaaaggcaattctttatttttatttatttatttatttttgagatagagtctccctctatcaccccagctggagtggagaggcctgatcttggctcactgcaacgtctgcctcctgggttcaagtgattctcctgcctcagcctccccaggtagctggggctacaagcatgcaccaccacatgcctgcccagacaaaggcaattctaagagaaaacacacacacacacacacacacacacacacacacacacacacacacaaccaaagcaaagctggaagcatcatgctacccaacttcaaattatattacagggctacagtaaccaaaacaacatggtactggtacaagaacaggcataaagacccatggaacaaaatagagaatgcagaaataagatttcacacctacagccatctgatctttgacaaaccttacaaaaacaagcaatgtgggaaaggattccctatttaataaatggtgctgggaaaactgcctagccatatgcagaaaattgaaactggaccccttccttacaccttgtacaaaaatcgactcaagatgacttaaagacttaaatgtaaaacccaaaactataaaaaccctagaagaaaacctaagcaataccattcaggacataggcacaggaaaagattttgtgacaaagatgccaaaagcaattgcaacaagagcaaaaatagacaaataggatctaattaagctaaagagcttctggacagcaaaagaaactatcaacagaataaacagacgacctacagaatgggagaaaatttctgcaatctatgcatctgacaaaggtctaatatccagcatctataagaaacttaaacaaatttacaagaaacaaacaaccccattacaaagtgggcaaaggacatgaacagacacttctcaaaagaagacattcatgtggccaagaaacatatgaaaaaaggttcaacattactgatcattagaaaaatgcaaatccaaactacagtgagataccatctcacacaagtcagaatggctgttattaaaaagtcaaaaaaacaacagatgctggcgaggttgtggagaaaaaggaatgcttttacgctgttggtgggaaagtaaattagttcaaccactgtaaaagacagtgtggcaattcctcaaagacctagaggcagaaatgccattagacccagcaatcctatcactgtgtatatacccaaaggaatataaagctttctattataaagacatatgcatgtgtatgtttattgcagcactattcacaatagcaaagatatggaatcaacctaaatgcccatcaatgataggctggataaagaaaatgtggtacatatacactgtggaatgctatgcagccatggaaaggaatgagatcatgtccttttcagggacatggatggagctggaggtcattatcctcagcaaactaaagcaagaatagaaaactatatactgcatgttctcacttctaagtggaggctaaatgatgagaacacatggacaaattgtgggggtgggtgtggaacaacacacaatggggcctgtcggaggctgggggaaggtaagaggagggagaggatcaggaagaataattagtggacactaggcttaatacctaggtgatgggatgatctgtgcagcaaaccaccatagcacacatttacttatgtaacaaacctgcacatcctgcacatgtacccctgaacttaaaataaaagttagaaataaattaaaacaaaaagaatcctgagccttgaggtagactgataacattatgagttttttcttcttgtgaagttgtgaggattgacacacagttactcaaaattggctgatgattgcaggaaggaagggggtcactgatccatactttgattattaatgcagttaacttttttaatccagtgatggagtaaccatggtcaaggtaaggaagggctaggagtggtctcacatctccagggtaaataatcaggtggcagataatcactactaattgacacctctcgtgtgtgtgtgtgtgtgtgtgtgtgtgtgtgtaacaggaggtcatactatctgtataagtttgctgactcatcttgcagcttttcatgatctacagtttttttcttctccatcaaatggtgatgataatctctgccacataaacctaataggtgaaagtcaagtttaacatggaaggactttgagaagcagataatgctacacaaatgcaaagagattttatttcctgctgtttattggagtggatgggctcctacagggatccagagcacatggctagcaggtctgctggagctggataactgacacatcaggtgtagagctgtgaggccccatcctgaagcatctacacctttgaagaagacatttcaaaagctagaatgacaggtgcctgagaattgatttttaaaacacagctcttttcaagcaagaaaggggcccacataatttgtttcagagaaagacatgtcctagctacaagagtcaactcctctgggtatcttgggatatttcacattcatgggcatgggggttagatctgcccaggtgagtgggcagggcatggtaggcagatgttcctgctggagccagaaccatactttcttcttattttgtcagaaacaatgtgttattttggtaactctttattttccacactgtagcttcccatgtaattattgattgcaattaggtattccatactgcataattaactatctgtgcctctgacatatattaaaataaatgatcacaaaagtccatgctgaaaagcctccatccaaagaataaacccaggctttctacctacctgacagtgtgtctgaatcaggcaaaaaacaaatttaaacatcttggttccttctccatctgctatacacatgaatgaaatttaacattagcaagcagagcaaactggctttgttgacttttctttgtcattttaagctacggtttttttattctggtttacgcagatatctaaataaaacctctctatagcatgaaaaaagaagtgatggatggatcagtgtccaaggatgatccataaatccaacttaactaaccagtgcacaaggtagctgcaaggtcttgctttctctctacatcaaatttattcttgtgcccagagggaaaaaactagcaaggcatactcgagtgagagctttgcattttatacacatctatattaaccaggatacttttgattgcaagtgacagaaacccaattccaagcagcttaagcaaagatgggaatttattggtaagttactggggtatctcagagaacaaaaatgagctgcaggattgtgtgaagctcagagaccagaactggcaacttgatgacaccaaggatctatatgtctctattcatctctcgtccttggttttctccctgtcttggcttcattctcttgtacagcagacacgtcttctctatgtggctgtgatcactgctgccggaaactctgggatctcatttctgtagcttttgtcaaaggaaaaggagtgtctttcatgttagttctgttaagaaaaacaacagtgaaattctgtgagtgacctagatcgggtcaagtacccctatcaccccagaactgttgctggcttgaggagtagggaaaggtacttgattggtccagcctgggtcatatactctgccctgtgcagggaaaaaggtttgtgaccagaagaaggtgacagtgggacaggggaagcatgctgcgtaggtggcagcggtagctctggagaaaccatacatgataggatgcacatttgaggagcatctccagggcctgagagaataacccaaagtatagagaagcgagactattctgtataaaaccttagaattttgttttccattcttggaacttgtgttttctctcatgaccaggactctttattctccagtgaggctatgtagaaatgcataaaaatttcttgtcaaattattttctgaagaaacccagtatcaaaatcccagatatggtggcaaggagtggtgatagtgaggatagtcaaagcctttgggagatgggggtgagtgctgatgccttcttggcttcaagtcaagcaaggcagccatggaagaaagaacgttggttatcttagatatctcagtcataggaaggtccatgtcttatcttcctcttgtttcacttaaagattgaagattgtttgttttgttttgttttgttttgttttgttttgttttgtttttagagacagagtcttgccctgtcatccagagtggagtgcagtggcaggatgaaagctcactgcagccttgaactcctgggctcaagtgatcctcccacctcagtgtcctgagtagttaggattacaggtgcacacaaatgtactcatctaatttatttaaaaaaattgcagagacaggggttttgctgtgttgcccaggctagtcttgaactcctggcttcaagtgatcctacccccttggcctcccaaaggattgggattacaggtgtgactcactgtgcctggccactaagatcatttttgaaaaggaattttatctctttctgtagatagatagatagatagatagatagatagatagatagatagacagacagacagacagacagacaaaagtgaatgctcaatgataatgccccaaataaatgcccaacagtcatcacaaacccaacatagcaacataggactctgggtgtttctattggactataaattaattgtcacattgtctgatctgattcatgggtcttcccaatgtcttagcttagtatccacagaaagcaaggcctgaggcgaagctcatgtgttacctctttattagggagtaaaatcgcagggacaaggggagtgagccagagaaggagggagagctgtgataagttggcaactacttggtaagggtaactggttgctctattgcatggggccatcttcttcaagaccaaataaaaagataatccttagcgtagtccatctgattgagtaagggaagagagtttctgccagatacccatctctcattggcctaacctttgacctacagggcatgaatggcctagtactttgtagcctgggtgttcatgcctcagtgtcaaatgagggtgtcccaggataagaagctagtggtgggtgctgcaggcccaaggcaaaccagtgtcgggtcatgtgcctgtgaggctggggttgagttgggctgagctgctcatcacagtgctggctggggctgaacaagtgactcaaggccccgagacaggtgagagcaagaggacagaagggacgtgtggaaaacacctgtttccttcagaatcagaatttcaaacctaagagagacctttgagatacttttcagataagcaaattaaaacccagagagtgtaagaaacttgctaagaaactcacagccaaccactgcagttagtgatagagcttagaaagtgccccactcccaactctttcatttcgttgcttcttcatggctcctccaacatcagaccccccacttgtgaacatttacggcaaaatttcccaaatgcctgatgagatgagaagcaagtcaatacctcctaaatatgcatgagctgttcaacggttcaatctcggtgggtagcaatatgtctatcaggatctatttattctcatgacttcagtgctgctctggagcgatgcattatgaacaatttatggtgtgttgacaggacagatgaatgctaggagaataggctgacggggagaaaatctcactctggcaaacggaatgcagaggtgtgactctgagcaggcggaaggaagagaatgtgatggttcacgtgtttagccgattgtgtgccagcctgcagccctgtagttttgtgccacagcctctgcttgcactgcctgtcttcacaacaggacctgcagaatctccccttccccaaagggcagccctacggctggggaggtgcagttgtcagcagcctgtaagcatgaacacccttgtattcctgatgccttggtgacttttggatggagaagtcactttgttcactaagccctaaaatcatctcactcaagtttttggtgaagattaagtttctgaacatcaagactaaaagctgtggctactttgtttgatcatttagagctgctgctttggaaagtgtgtctgaggtgagagccagtaaatggcgggcattctctccagcaatgggcatctatccttctctgccatttggaatgatcatctacgtttaatacttacccagagtcagggcaggacactgcttctcttaaccctacatacctcgcttataaaagccccaaacaagttttttgtttgtttgtttttcaatgtacctgtattttctttttttgtaaattgacatcttgagtttttcaattcgtgaacatggtgtatttccccatttatgttggttttctggagtatctttaagtagttatatagttttcttcttctatgccttgcacatattttcttttttaaaaaattttattattattttactttaagttttagggtacatgtgcacaatgtgcaggtttgttacatatgtatacatgtgccatgttggtgtgctgcacccattaactcgtcatttagcattaggtatatctcctaatgctatccctcccctcttcccccaccccacaacagtccccagagtgtgatgttccccttcctgtgtccatgtgttctcattgttcaattcccatgtatgagtgagaacatgtggtgtttggttttttgtccttgcgacagtttgctgagaatgatggtttccagcttcatccatgtccctacaaaggacatgaactcatcatttttttatggctgcatagtattccatggtgtatatgtgccacattttcttaatccagtctatcattgttggacatttgggttggttccaagtctttgctattgtgaatagtgccacaataaacatatgtatgcatgtgtctttatagcagcatgatttataatcctttgggtatatacccagtaatgggatggctgggtcaaatggtatttctagttctagatccttgaggaatcaccacactgtcttccacaatggttgaactagtttacagtcccaccaacagtgtaaaagtgttcctatttctccacatcctctccagcacctgttgtttcctgactttttttttttattattatactttaagttttagggtacatgcgcacattgtgcaggttagttacatatgtatacatgtgccatgctggtgcactgcacccactaactcgtcatctagcattaggtatatctcccaatgctatccctcccccctccccccaccccaccacagtccccagagtgtgatattccccttcctgtgtccatgtgatctcattgttcaattcccacctatgagtgagaatatgcggtgtttggttttttgttcttgcaatagtttactgagaatgatgatttccaatttcatccatgtccctacaaaggacatgaactcatcattttttatggctgcatagtattccgtggtgtatatgtgccacattttcttaatccagtctatcattggtggacatttgggttggttccaagtctttgctattgtgaataatgctgcaataaacatacgtgtgcatgtgtctttatagcagcatgatttataatcctttgggtatatacccagtaatgggatggctgggtcaaatggtatttctagttctagatccttgaggaatcaccacactgtcttccacaatggttgaactagtttacagtaccaccaacagtgtaaaagtgttcctatttctccacatcctctccagcacctgttgttccctgactttttaatgattgccattctaactggtgtgagatggtatctcattgtgttttgatttgcatttctctgatggccagtgatgatgagcattttttcacgtgttttttgtctgcataaatgtcttcttttgagaagtgtctgtttatatcctttgcccactttttgatggggttgtttttttcttgtaaatttgtttgagttcattgtagattctggatattagccctttgtcagatgagtaggttgcaaaatttttctcccattctgtatgttgcctattcactctgatggtggtttcttttgctgtgcagaagctctttagtttaattagatcccatttgtcaattttgtcttttgttgccattgcttttggtgttctagacatgaagtccttgcccatgcctatgtcctgaatggtattgcctaggttttgttctagggtttttatggtgttaggtctaacatgtaagtctttaatccatcttgaattaatttttgtataaggtgtaaggaagggatccagtttcagctttctacatatggcgagccagttttcccagcaccatttattaaacatggaatgctttccccattgcttgtttttgtaaggtttgtcaaagatcagatagttgtagatatgcggcattgtttctgagggctctgttccgttccattggtctatatctctgttttggtaccagtaccatgctgttttggttactgtagccttgtagtatagtttgaagtcaggtagtgtgatgcctccagctttgttcttttggcttaggattgacttggcgatgtgggctcttttttggttccatatgaaccttaaagtgtttttttccaattctgtgaagaaagtcattggtagtttgatggggatggcactgaatctataaattaccttgggcagtatggccattttcacgatattgattcttcctacccatgagcatggaatgttcttccatttgtttgtatcctcttttatttcattgagcagtggtttgtagttctccttgaagaggtccttcacatcccttgtaagttggattcctaggtatttgattctctttgaaacaattgtgaatgggagttcactcatgatttggctctctgtttgtctgttattggtgtataagaatgcttgtgatttttgtacattgattttgtatcctgagacgttgctgaagttgcttatcagcttaaggagattttgggctgagacaatggggttttccagatatacaatcatgtcatctgcaaacagggacaatttgacttcctcttttcctaattgaatgccctttatttccttctcctgcctaaatgccctggccagaacttccaacactatgttgaataggagtggtgagagagggcatccgtgtcttgtgcccgttttcaaagggaatgcttccagtttttgtccattcagtatgatattggctgtgggtttgtcatagatagctcttattattttgagatatgtcccatcaatacctaatttattgagagtttttagcatgaaggattgttggattttgtccaaggccttttctgcaactatggagataaccatgtggtttttgtctttggttctgtttatatgctggattacgtgtattgattttcgtatggtgaaccagccttgcatcccagggatgaagcccacttgatcatggtggataggctttttgatgtgttgctggattcggtttgccagtattttattgaggatttgtgtatcaatgttcatcaaagatattggtctaaaattctctttttttgctgtgtctctaccaggctttggtatcaggattatgctggcctcataaaatgagttagggaggattctctctttttctattgattggaatagtttcagaaggaatggtactagctcctccttgtacctctggtagaattcagctgtgaatccatctggtcctggacttttttgttgttggtaggctattaattattgcctcaatttcagatcctgttattggtctattcagagattcaatttcttcctggtttagtcttgggagggtgtatgtgtcaaggaatttatccatttcttctagattttctagtgtatttgtgtagaggtgtttatagtattctctgatggtagtttgtatttctgtgggatcggtggtgatatcccctttatcatgttttattgcatgtatttgattcttctctcttttcttctttattagtcttgctagcggtctatcagttttgttgatcttttcaaaaaaccagctcctggattcactgattttttttgaagggttttttgtgtctctatttccttcagttctgctctgatcttagttatttcttgccgtctgctagcttttgaatgtgtttgctcttgcttctctagttcttttaattgtgatgttagggtgtcaattttagatctttcctgctttctcttgtgggcatttagtgctataaatttccctctacacactgctttaaatgtgtcccagagattctggtatgttgtgtctttgttctcattggtttcaaagaacatctttatttctgccttcatttcgttatgtacccagcagtcattcaggagcaggttgttcagtttccatgtagttgagtggttttgagtgagtttcttaatcctgagttctagtttgattgcactgtggtctgagagatagcttgttataatttcttttattttacatttgctgaggagtgctttacttccaactatgtggtcaattttggaataggtatggtgtggtgctgaaaagtatgtatattctgttgatttggggtggagagttctgtagatgtctattaggtctgcttggtgcagagctgagttcaattcctggatatccttgttaactctctgtctcgttgatctgtctaatgttgacagtggggtgttaaagtctccctttattattgtgtgggagtctaagtctctttgtaggtcactaaggacttgctttatgaatctgggtgctcctgtattgggtgcatatatatttaggatagttagctcttcttgttgaattgatccctttaccattatgtaatggccttctttgtctcttttgatcttttttggtttaaagtctgtcttatcagagactaggattgcaacccctgcctttttttgttttccatttgcttggtagatcttcctccatccctttattttgagcctatgtgtgtctctctgcacatgagatgggtttcctgaatacagcacactgatgggtcttgactctttatccaatttgctagtctgtgtcttttaattggagcatttagcccatttacatttaatgttaatattgttacgtgtgaatttgatcctgtcattatgatgttagctggttattttgctcgttagttgatgcagtttcttcctagccttgatggtctttacaatttggcatgtttttgcagtggctgataccggttgttcctttccatgtttagtgcttccttcatgagctcttttagggcaggcctcgtggtgacaaaatctctcagcatttgcttgtctgtaaagtatcttatttctccttcacttatgaagtttagtttggctggatatgaaattctcggttgaaaattcttttctttaagaatgttgaatattggcccccactctcttctggcttgtagagtttctgccaagagatccactcttagtctgatgggcttccctttgtgggtaacccgacctttctccctggctgcccttaacattttttccttcatttccactttggtgaatctgacaattatgtgtcttggagttgctcttctccagaagtatctctgtggtgttctctttatttcctgaatttgaatgttggcctgccttgctagattggggaaattctcctggataatatcctgcagaatgttttctaacttggttccattctccccgtcactttcaggtacaccaatcagacgtagatttggtcttttcacacagtcccatattttttggaggctttgttcatttatttttattcttttttctctaaacttatcttctcacttcatttcattcattttatcttccattgctgataccctttcttccagttgattgcatcggctactgaggcttgtgcattcgtcacgtagttctcatgccatggctttcagctccatcaggtcctttaaggacttctcttcattggttattctagttagccattagtctaattttttttcaagatttttaacttctttgccattggttcgaacttcctcctttagcttggagtagtttgatcttctgaagccttcttctctcaacttgtcaaagtcattctccatccagctttgttccattgctggtgaggagctgtgttcctttggagaaggagaggcactctgatttttagagtttctggtttttctgttctgttttttccccatctttgtggttttatctacctttggtctttgatgatggtgatgtacagatgggtttttggtgtggatgtcctttctgtttgttcgttttccttctaacagtcaggaccctcagctgcaggtctgttggagtttgctggaggtccactccaacaaactcctgggtatcagcagcagtggctgcagaacagcagatattggtgaaccgcaaatgctgctgcctgattgttcctctggaagttttgtctcagaggagtacccggctgtgtgaggtgtcagtccacccctactggggggtgcctcccagttaggctactcggggttcagggacccacttgaggaggcagtccgcctgttctcagatctcaagctgcatgctgggagaaacactactctcttcaaagctgtcagacagggatatttaagtctgcagaggttactgctgccttttgt

SEQ ID NO: 10465 - DNA, 6055 bp, Homo sapiens
tttttaagttcttttttatttatttattttttattattatactttaagttttagggtacatgtgcacaatgtgcaggttagttacatatgtatacatgtgccatgctgatgcgctgcacccactaactcatcatctagcattaggtatatctcccaatgctatccctcccgcctccccccaccccacaacagtccccagagtgtgatgttccccttcctgtgtccaggtgttctcattgttcaattcccacctatgagtgagaatatgtggtgtttggttttttgttcttgcgatagtttactgagaatgatgatttccaatttcatccatgtccctacaaaggacgtgaactcatcattttttatggctgcatagtattccatggtgtatatgtgccacattttcttaatccagtctatcattgttggacatttgggttggttccaagtctttgctattgtgaataatgccgcaataaacctacgtgtgcatgtgtctttatagcagcatgatttatagtcctttggttatatacccagtaatggaatggctgggtcaaatggtatttctagttctagatccctgaggaatcgccacactgacttccacaatggttgaactagtttacagtcccaccaacagtgtaaaagtgttcctatttctccacatcctctccagcacctgttgtttcctgactttttaatgatcgccattctaactggtgtgagatggtatctcattgtggttttgatttgcatttctctgatggccagtgatggtgagcattttttcatgtgttttttggctgcataaatgtcttcttttgagaagtgtctgttcatgtcctttgcccactttttgatggggttgttggtttttttcttgtaaatttgttggagttcattgtagattctggatattagccctttgtcagatgagtaggttgcaaaaattttctcccattttgtaggttgcctgttcactctgatggtagtttcttttgctgtgcagaagctctttagtttaattagatcccatttgtcaattttcgcttttgttgccattgcttttggtgttttagacatgaagtccttgcccatgcctatgtcttgaatggtaatgcctaggttttcttctagggtttttatggttttaggtctaacatttaagtctttaatccatcttgaattgatttttgtataagatgtaaggaagggatccagtttcagctttctacatatggctagctagttttcccagcaccatttattaaatagggaatcctttccccatttcttgtttttctcaggtttgtcaaagatcagatagttgtagatatgcggcattatttctgagggctctgttctgttccattgatctatatctctgttttggtaccagtaccatgctgttttggttactgtagccttgtagtatagtttgaagtcaggtagtgtgatgcctccagctttgttcttttggctcaggattgacttggcgatgcgggatcttttttggttccatatgaactttaaagtagttttttccaattctatgaagaaagtcattggtagcttaatggggatggcattgaatctgtaaattaccttgggcagtatggccattttcacgatattgattcttcctacccatgagcatggaatgttcttccatttgtttgtatcctcttttatttcattgagcagtggtttgtagttctccttgaagaggtccttcacatcccttgtaagttggattcctaggtattttattctctttgaagcaattgtgaatgggagttcactcatgatttggctctctgtttgtctgttgttggtgtataagaatgcttgtgatttttgtacattgattttgtatcctgagactttgctgaagttgcttatcagcttaaggagattttgggctgagacaatggggttttctagatatacaatcatgtcgtctgcaaacagggacaatttgacttcctcttttcctaattgaataccctttatttccttctcctgcctaattgccctggccagaacttccaacactatgttgaataggagtggtgagagagggcatccctgtcttgttccagttttcaaagggaatgcttccagtttttgcctattcagtatgatattggctgtgggtttgtcatagatagctcttattattttgagatacatcccatcaatacctaatttattgagagtttttagcatgaagtgttgttaaattttgtcaaaggccttttctgcatctattgagataatcatgtggtttttgtctttggttctgtttatatgctggattacatttattgatttgcgtatattgaaccagccttgcatcccagggatgaagcccacttgatcatggtggataagctttttcatgtgctgctggattcggtttgccagtattttattgaggatttttgcatcaatgttcatcaaggatattggtctaaaattctcttttttggttgtgtctctgcccagctttggtatcaggatgatgctggcctcataaaatgagttagggaggattccctctttttctattgattggaatagttccagaaggaatggtaccagttcctccttgtacctctggtagaattcggctgtgaatccatctggtcctggactctttttggttggtaagctattgattattgccacaatttcagctcctgttattggtctattcagagattcaacttcttcctggtttagtcttgggagggtgtatgtgtcgaggaatttatccatttcttctagattttctagtttatttgcgtagacatgtttgtagcattctctgatggtagtttgtatttctgtgggatcggtggtgatatcccctttatcattttttattgcgtctatttgattcttctctctttttttctttattagtcttgctagtggtctatcaattttgttgatcctttcaaaaaaccagctcttggattcgttaattttttgaagggttttttgtgtctctatttccttcagttctgctctgattttagttatttcttgccttctgctagcttttgaatgtgtttgctcttgcttttctagttcttttaattgtgatgttagggtgtcagttttggatctttcctgctttctcttgtgggcatttagtgctataaatttccctctacacactgctttgaatgtgtcccagagattctggtatgttgtgtctttgttctcattggtttcaaagaacatctttatttctgccttcatttcgttatgtacccagtagtcattcaggagcaggttgtttagtttccatgtagttgagcggttttgagtgagattcttaatcctgagttctagtttgattgcactgtggtctgagagatagtttgttataatttctgttcttttacgtttgctgaggggagctttacttccaactatgtggtcaattttggaataggtgtggtgtggtgctgaaaaaaatgtatattctgttgatttggggtggagagttctgtagaagtctattaggtctgcttggtgcagagctgagttcaattcctgggtatccttgttgactttctgtctggttgatctgtctaatgttgacagtggggtgttaaagtctcccattattaatgtgtgggagtctaagtctctttgtaggtcactcaggacttgctttatgaatctgggtgctcctgtattgggtgcatatatattgaggatagttagctcttcttgttgaattgatccctttaccattaagtaatggccttctttgtctcttttgatctttgttggtttaaagtctgttttatcagagactaggattgcaacccctgcctttttttgttttccatttgcttggtagatcttcctccatcctttattttgagcctatgtgtgtctctgcacgtgagatgggtttcctgaatacagcacactgatgggtcttgactgtttatccaatttgccagtctgtgtcttttaattggagcatttagtccatttacatttaaagttaatattgttatgtgtgaatttgatcctgtcattatgatgttagctggtgattttgctcgttagttgatgcagtttcttcctagtctcgatggtctttacattttggcatgattttgcagtggctggtaccggttgttcctttccatgtttagcgcttccttcaggagctcttttagggcaggcctggtggtgacaaaatctctcagcatttgcttgtctgtaaagtattttatttctccttcacttatgaagcttagtttggctggatatgaaattctgggttgaaaattcttttctttaagaatgttgaatattggccctcactctcttctggcttgtagagtttctgctgagagatcagctgttagtctgatgggcttcgttttgtgggtaacccgacctttctctctggctgcccttaacattttttccttcatttcaactttggtgaatctgacaattacgtgtcttggtgttgctcttctcaaggagtatctttgtggcattctctgtatttcctgaatctgaatggtggcctgccttgctagactggggaagttctcctggataatatcctacagagtgttttccaacttggttccattctccccatcactttcaggtacaccaatcagacatagatttggtcttttcacatagtcccatatttcttggaggctttgctcgtttctttttattcttttttctctaaacttcccttctcacttcatttcatacatttcatcttccatcgctgataccctttcttccagttgatcacatcggctcctgagtcttctgcattcttcacttagttctcaagccttggttttcagctccatcagctcctttaagcacttctctgtattgattattctagttatacattctcctaaatttttttcaaagttttcaacttctttgcctttggtttgaatgtcctcccgtagctcagagtaatttgatcgtctgaagccttcttctctcagctcgtcaaagtcattctccgtccagctttgttccattgctggtgaggaactgcattcctttggaggaggagaggcgctctgctttttagagcttccagtttttctgttctgttttttccccatctttgtggttttatctacttttggtctttgatgatggtgatgtacagatgggttgttggtgtggatgtcctttctgtttgttagttttccttctaacagacaggaccctcagctgcaggtctgttggagtgcccggccgtgtgaggtgtcagtctgcccctgctagggggtgcctcccagttaggctgctggggggtcaggggtcagggacccacttgaggaggcagtctgcccgttctcagatctccagctgcatgctgggagaaccactgctctcttcaaagctgtcagacagagacatttaagtctgcagaggttactgctgtctttttgtttgtctgtgccctgcccccagaggtggagcctacagaggcaggcaggcctccttgagctgtggtgggctccacccaattcgagcttcccggctgctttgtttacctaagcaagcctgggcaatggcgggtgcccctcccccagcctcgctgccaccttgcagtttgatctcagagtgctgtgctagcaatcagcgagactccgtgggcctaggaccctccgagccaggtgcgggatataatctcctggtgtgccgttttttaagcccgtcggaaaagcgcagtattcgggtgggagtgacccgattttccaggtgccatctgtcaccactttgtttgactaggaaagggaactccctgaccccttgcgcttcccgagtgaggcaatgcctcgccctgcttcggctcgcacacggtgcgcgcactcactgacctgcacccactgtctggcactctctagtgagatgaacccggtacctcagatggaaatgcagaaatcacccgtcttctgcgtggctcacactgggagctgtagactggagctgttcctattcggccatcttggctcctcccgcc

SEQ ID NO: 10466 - DNA, 6074 bp, Homo sapiens
  SITE (5787): n equals a,t,g, or c
ttcttttttttttttcttcttttttttctttttttttttttttaatgttttttttttattatactttaagttttagggtacatgtgcacattgtgcaggttagttacatatgtatacatgtgccatgctggtgcactgcacccactaacgtgtcatctagcattaggtatatctcccaatgctatccctcccccctcccccgaccccaccacagtccccagagtgtgatattccccttcctgtgtccatgtgatctcattgttcaattcccacctatgagtgagaatatgcggtgtttggttttttgttcttgcgatagtttactgagaatgatggtttccaatttcatacatgtccctacaaaggacatgaactcatcattttttatggctgcatagtattccatggtgtatatgtgccacattttcttaatccagtctatcattgttggacatttgggttggttccaagtctttgctattgtgaataatgccgcaataaacatacatgtgcatgtgtctttatagcagcatgatttatagtcatttgggtatatacccagtaatgggatggctgggtcaaatggtatttctagttctagatccctgaggaatcgccacactgacttccacaatggttgaactagtttacagtcccaccaacagtgtaaaagtgttcctatttctccacatcctctccagcacctgttgtttcctgactttttaatgattgccattctaactggtgtgagatgatatctcatagtggttttgatttgcatttctctgatggccagtgatgatgagcattttttcatgtgttttttggctgcataaatgtcttcttttgagaagtgtctcttcatgtccttcgcccactttttgatggggttgtttgtttttttcttgtaaatttgttggagttcattgtagattctggatattagccctttgtcagatgagtaggttgcaaaaattttctcccatgttgtaggttgcctgttcactctgatggtagtttcttttgctgtgcagaagctctttagtttaattagatcccatttgtcaattttggcttttgttgccattgcttttggtgttttggacatgaagtccttgcccacgcctatgtcctgaatgtaatgcctaggtttcttctagggctcttatggttttaggtctaacgtttaaatctttaatccatcttgaattgatttttgtataaggtgtaaggaagggatccagtttcagctttctacatatggctagccagttttcccagcaccatttattaaatagggaatcctttccccattgcttgtctttctcaggtttgtcaaagatcagatagttgtagatatgcggcattatttctgagggctctgttctgttccattgatctatatctctgttttggtaccagtaccatgctgttttggttactgtagccttgtagtatagtttgaagtcaggtagtgtgatgcctccagctttgttcttttggcttaggattgacttggcgatgcgggctcttttttggttccatatgaactttaaagtagttttttccaattctgtgaagaaagtcattggcagcttgatggggatggcattgaatctgtaaattaccttgggcagcatggccattttcacaatattgattcttcctacccatgagcatggaatgttcttccatttgtttgtgtcctcttttatttccttgagcagtggtttgtagttctccttgaagaggtccttcacatcccttgtaagttggattcctaggtattttattctctttgaagcaattgtgaatgggagttcacttatgatttggctctctgtttgccggttgttggtgtataagaatgcttgtgatttttgtacattgattttgtatcctgagactttgctgaagttgcttatcagcttaaggagattttgggctgagacaatggggttttctagataaacaatcatgtcgtctgcaaacagggacaatttgacttcctcttttcctaattgaataccctttatttccttctcctgcctgattgccctggccagaacttccaacactatgttgaataggagcggtgagagaggacatccctgtcttgtgccagttttcaaagggaatgcttccagtttttgcccattcagtatgatattggctgtgggtttgtcatagatagctcttattattttgaaatacgtcccatcaatacctaatttattgagagtttttagcatgaagggttgttgaattttgtcaaaggctttttctgcatctattgagataatcatgtggtttttgtctttggctctgtttatatgctggattacatttattgatttgcgtatattgaaccagccttgcatcccagggatgaagcccacttgatcatggtggataagctttttgatgtgctgctggatttggtttgccagtattttattgaggatttttgcatcaatgttcatcaaggatattggtctaaaattctcttttttggttgtgtctctgcccggctttggtatcagaatgatgctggcctcataaaatgagttagggaggattccctctttttctattgattggaatagtttcagaaggaatggtaccagttcctccttgtacctctggtagaattcggctgtgaatccatctggtcctggactctttttggttggtaaactattgattattgccacaatttcagagcctgttattggtctattcagagattcaacttcttcctggtttagtcttgggagagtgtatgtgtcgaggaatgtatccatttcttctagattttctagtttatttgcgtagaggtgtttgtagtattctctgatggtagtttgtatttctgtgggattggtggtgatatcccctttatcattttttattgtgtctatttgattcttctctctttttttctttattagtcttgctagcggtctatcaattttgttgatcctttcaaaaaaccagctcctggattcattgattttttgaagggttttttgtgtctctatttccttcagttctgctctgattttagttatttcttgccttctgctagcttttgaatgtgtttgctcttgcttttctagttcttttaattgtgatgttagggtgtcaattttggatctttcctgctttctcttgtaggcatttagtgctataaatttccctctacacactgctttgaatgcgtcccagagattctggtatgtggtgtctttgttctcgttggtttcaaagaacatctttatttctgccttcatttcgttatgtacccagtagtcattcaggagcaggttgttcagtttccatgtagttgagcggctttgagtgagattcttaatcctgagttctagtttgattgcactgtggtctgagagatagtttgttataatttctgttcttttacatttgctgaggagagctttacttccaactatgtggtcaattttggaataggtgtggtgtggtgctgaaaaaaatgtatattctgttgatttggggtggagagttctgtagatgtctattaggtccgcttggtgcagagctgagttcaattcctgggtatccttgttgactttctgtctcgttgatctgtctaatgttgacagtggggtgttaaagtctcccattattaatgtgtgggagtctaagtctctttgtaggtcactcaggacttgctttatgaatctgggtgctcctgtattgggtgcataaatatttaggatagttagctcctcttgttgaattgatccctttaccattatgtaatggccttctttgtctcttttgatctttgttggtttaaagtctgttttatcagagactaggattgcaacccctgcctttttttgttttccatttgcttggtagatcttcctccatccttttattttgagcctatgtgtgtctcagcacgtgagatgggtttcctgaatacagcacactgatgggtcttgactctttatccaacttgccagtctgtgtcttttaattgcagaatttagtccatttatatttaaagttaatattgttatgtgtgaatttgatcctgtcattatgatgttagctggtgattttgctcattagttgatgcagtttcttcctagtctcgatggtctttacattttggcatgattttgcagcggctggtaccggttgttcctttccatgtttagcgcttccttcaggagctcttttagggcaggcctggtggtgacaaaatctctcagcatttgcttgtctataaagtattttatttctccttcacttatgaagcttagtttggctggatatgaaattctgggttgaaaatccttttctttaagaatgttgaatattggcccccactctcttctggcttgtagggtttctgccgagagatccgctgttagtctgatgggcttccctttgagggtaacccgacctttctctctggctgcccttaacattttttccttcatttcaactttggtgaatctgacaattatgtgtcttggagttgctcttctcgaggagtatctttgtggcgttctctgtatttcctgaatctgaacgttggcctgccttgctagattggggaagttctcctggataatatcctgcagagtgttttccaacttggttccattctccacatcactttcaggtacaccaatcagacgtagatttggtcttttcacatagtcccatatttcttggaggctttgctcatttctttttattcttttttctctaaacttcccttctcgcttcatttcattcatttcatcttccattgctgataccctttcttccagttgatcgcatcggctcctgaggcttctgcattcttcacgtagttctcgagccttggttttcagctccatcagctcctttaagcacttctctgtattggttattctagttatacattcttctaaatttttttcaaagtttccaacttctttgcctttggtttgaatgtcctcccgtagttcagagtaatttgatcgtctgaagccttcttctctcagctcgtgaaaatcattctccatccagctttgttccattgctggtgaggaactgcgttcatttggaggaggagaggcgctctggcttttagagtttccagtttttctgttctgttttttccccatctttgtggttttatctacttttggtctttgatgatggtgatgtacagataggttttcggtgtagatgtcctttctggttgttagttttccttctaacagacaggaccctcagctgcaggtctgttggaataccctgccgtgtgaggtgtcagtgtgcccctgctggggggtgcctcccagttaggctgctcgggggtcaggggtcagggacccacttgaggaggcagtctgcccgttctcagatctccagctgcgtgctgggagaaccactgctctcttcaaagctgtcagacagggacacttaagtctgcagaggttactgctgtctttttgtttgtctgtgccctgcccccataggtggagcctacataggcaggcaggcctccttgagctgtggtgggctccacccagttggagcttccccgctgctttgtttacctaagcaagcctgggcaatggtgggcgcccctcccccagcctcgttgccgccttgcagtttgatctcagactgctgtgctagcaatcagcgagattccgtgggcgtaggaccctctgagccaggtgtggatatagtctcgtggtgcgccgttttataagccggtctgaaaggcgcataatncgggtgggagtgacccatttttccaggtgcgtccatcacccctttctttgactcggaaagggaactccctgaccccttgcgcttcccaggtgaggcaatgcctcgccctgcttcggctcgcgcacggtgcgcgcacacactggcctgcgcccactgtctggcactccctagtgagatgaacccggtacctcagatggaaatgcagaaatcacccgtcttctgcgtcgctcacgctgggagctgtagaccagagctgttcctattcggccatcttggctcctccccag

SEQ ID NO: 10467 - DNA, 5236 bp, Homo sapiens
attattattatacttgaagttttagggtacatgtgcacaatgtgcaggttagttacatatgtatacatgtgccatgtggtgtgctgcacccattaactcctcatttagcattaggtatatctcctcccccctccccacaacccacaacagtccccggtgtgtggtgttccccttcctgtgtccatgtgttctcattgttcaattcccacctatgagtgagaacatgcggtgtttggttttttttccttgcgatagtttgctgagaatgatggtttccagtttcatccatgtccctacaaaggacatgaactcatcgttttttatggctgcatagtattccatggtgtatatgtgccacattttcttaatccagtctatcgttcttggacatttgggttggttccaagtctttgctattgtgaatagtgtcgcaacaaacatacgtgtgcatgtgtctttatagcagcatgatttataatcctttgggtatatacccagtaatgggaaggctgggtcaaatggtatttctagttctagatccctgaggaatcgccacactgacttccacaatggtgaaccacaatggttccaccaacagtgtaaaagtgttcctatttctccacatcctctccagcacctgttgtttcctgactttttaatgattgccattctaactggtgtgagatggtatctcattgtggttttgatttgcatttctctgatggccagtgatgatgagcattttttcatgtgttttttggctgcataaatgtcttcttttcagaagtgtctgttcatatcctttgcccactttttgatggggttgtttgttcttttcttgtaaatttgtttgaattcattgtagattctggatattagccctttgtcagatgagtaggttgtgaaaattttctcccattttgtaggttgcctgttcactctgatggtagtttcttttgctgtgcagaagctcttcagtttaattagatcccatttgtcaattttggcttttgttgccattgcttttggtgttttagacacgaagttcttgcccatgcctatgtcctgaatggtattgcctaggttttcttctagggtttttatggttttaggtctaacatgtaagtctttaatccatcttgaattaatttttgtgtaaggtgtaaggaagggatccagtttcagctttctacatatggctagccagttttcccagcaccatttattaaatagggaatccttttcccattgcttgttttttctcaggtttgtcaaagatcagatagttgtagatatgtggtgttatttctgagggctctgttctgttccattgatctatatctccgttttggtaccagtaccatgctgttttggttactgtagccttgtagtatagtttgaagtcaggtagtgtgatgcctccagctttgttcttttggcttacgattgacttggcgatgcaggctcttttttggttccttatgaactttaaagtagttttttccaattctgagaagaaagtcattggtagcttgatgaggatggcattgaatctataaattaccttgggcagtatggccattttcacgatattgattcttcctacccatgagcatggaatgttcttccatttgtttgtatcctcttttatttcattgagcagtggtttgtagttctccttgaagaggttcttcatgtcccttgtaagttggattcctaggtattttattctctttgaagcaattgtgaatgggagttcactcatgatttggctctctgtttgtctgttattggtgtataagaatgcttgtgatttttgtacattgattttgtatcctgagactttgctaaagttgcttatcagcttaaggagattttgggctgagacaatggggttttctagatatacaatcatgtcatctgcaaacagggacaatttgacttcctcttttcctaagtgaataccctttatttccttctcctgcctaattgccctggccagaacttccaacactatgttgaataggagtggtgagagagggcatccctgtcttgtgccagttttcaaagggaatgcttccagtttttgcccattcagtatgatattggctgtgggtttgtcatagacagttcttattattttgagatatgtcccatcaatacctaatttattgagagtttttagcatgaagggttgttgaattttgtcaagggccttttctgcatctattgagataatcgtgtggtttttgtctctggttctgtttatatgctggattacgtttattgatttgcgtatgttgaacccgccttgcatcccagggatgaagcccacttgatcatggtggataagctttttgatgtgctgctggatttggtttgctagtattttattgaggacttttgcatcaatattcatcaaggatattggtctaaaattctcttttttggttgtgtctctgccaggctttggtatcaggatgatgctggcctcataaattgagttagggaggattccctctttttctattgattggaatagtttcagaaggaatggtaccagctcctccttgtacctctggtagaattcggctgtgaatccatctggtcctggactttttttggttggtaagctattgattattgccacaatttcagagcctgttattggtctattcagagattcaacttcttcctggtttagtcttgggagggtgtatgtgtccaggaatttatccatttcttctagattttctagtttatttgtgtagaggtgtttgtagtattctctgattgtagtttgtatttctgtgggaacagtggtgatatcctctttgtcattttttattgcgtctatttgattcttctctcttttcttctttattagtcttgctagtggtctatcaattttgttgatcttttcaaaaaaccagctcctggattcattaattttttgaagggttttttgtgtctctgtttccttcagttctgctctgattttagttatttcttgccttctgctagcttttgaatgtgtttgctcttgcttttctagtgcttttaattgtgacgttagggtgtcaattttggatctttcctgctttctcttgtgggcatttagtgctataaatttccctctacacactgcttcgaatgtgtcccagagattctggtatgttgtgtctttgttctcgttggtttcaaagaacatctttatttctgccttcatttctttatttatccagtagtcattcaggagcaggttgttcagtttccacgtagttgagtggttttgagtgagtttcttagtcctgagctctagtttgattgcactgtggtctgagagacagtttgttataatttctgttctttcacatttactgagaagtgctttacttccaactatgtggtcaattttggaataggtgtggtgtggtgctaaaaaaaatgtatattctgttgatgtggggtggagagttctgtagatgtctattaggtctgcttggtgcagagctgagttcaattcgtgtgtatcctttttaactttctgtctcgttgatctgtctaatgttgacagttaaacattaataattatgggtgttaaagtctcccattattattgtgtgggagtctaagtctttttgtaggtcactcaggacttgcattatgaatctgggtgctcctgtattgggtgcatgtatatttaggatagttagctcttcttgttgaattgatccctttaccattatgtaatggccttctttgtctcttttgatctttgttggtttaaagtctgttttatcagagactaggattgcaacccctgcctttttttgttttccatttgcttggtagatcctcctccatccctttatttgagcctatgggtgtctctgcatgtgagacaggtctcctgaatacagcacactgatgggtcttgactctttatgcaatttgccagtctgtgtcttttaattggagcatttagcccatttacatttaaagttaatattgttatgtgtgtatttgatcctgtcattatgatgttagctggctattttgctcattagttcatgcagtttcttcctagccttgatggtctttacaatttggcatgtttttgcagtggctggtaccggttgttcctttccatgtttagtgcttccttcaggagctcttttagggcaggcctggtggtgacaaaatctctcagcatttgcttgtctgtaaagtattttatttctccttcacttatgaagcttagtttggctgggtatgaaattctgggttgaaaattcttttctttaagaatgttgaatattggcccccactgtcttctggcttgtagagtttctgcccagagatctgctgttagtctgatgggcttccctttgtgggtaacccgacctttctctctggctgcccttaacattttttcctccatttcaactttggtgaatctggcaattatgtgtcttggagttgctcttctcaaggagtatctttgtggcgttctctgtatttcctgaatctgaatgttggcctgccttgctagattggggaagttctcctggataatatcctgcagagtgttttccaacttggttccattctccccgtcactttaaggtacaccaatcagacgtagatttggtcttttcacatagtcccacatttcttggaggctttgttcgtttctttttattcttttttctctaaacttcccttctcgcttcatttcattcatttcgtcttccatcactgataccctttctttcagttgattgcatcggctcctgaggcttctgcattcttcacgtagttctcgagccttggctttctgctccatcagctcctttaaggacttctctgcgttggtttttctagttatccatttgtctaatttttttcacagtttttaacttctttgccattggtttgaatttcctcctgtagcttggagtagtttgattgtctgaagccttcttctctcagctcatcaaagtcattctccatccagctttgttccattgctggtgaggagctgctctcctttggaggaggagaggtgctctgctttttagagtttccagtttttctgctctgttttttccccatctttgtggtttaactacctttggtctttgatgatggtgatgtacagatggggttttggtgtggatgtcctttctgtttgttagttttccttctaacagacaggacccttagctgcagg

SEQ ID NO: 10468 - DNA, 6046 bp, Homo sapiens
tttttttcttcaacttttttttttaattatactttaagttttagggtacatgtgcacattgcgcaggttagttacgtatgtatacatgtgccatgctggtgcgctacacccactaactcgtcatctagcattaggtatatctcccaatgctatccctcccacctccccccaccccaccacagtctgcagagtgtgatattccccttcctgtgtccatgtgatctcattgttcaattcccacctatgagtgagaatatgtggtgtttggttttttgttcttgcaatagtttactgagaatgatgatttccaatttcatccatgtccctacaaaggacatgaactcatcattttttatggctgcatagtattccatggtgtatatgtgccacattttcttaatccagtctatcattgttggacatttgggttggttccaagtctttgctattgtgaataatgctgcaataaacatacgtgtgcatgtgtctttatagcagcatgatttatagtcatttgggtatatacccagtaatgggatggctgggtcaaatggtatttctagttctagatccctgaggaatcgccacactgaattccacaatggttgaactagtttacagtcccaccaacagtgtaaaagtgttcctatttctccacatcctctccagcacctgttgtttcctgactttttaatgattgccattctaactggtgtgagatggtatctcattgtggttttgatttgcatttctctgatggccagtgatggtgagcattttttcatgtgtttttttgctgcataaatgtcttcttttgagaagtgtctgttcatgtccttcgcccactttttgatggggttgtttgtttttttcttgtaaatttgtttgagttcattgtagattctggatattagccctttgtcagatgagtaggttgcaaaaattttctcccattttctaggttgcctgttcactctgatggtagtttcttttgctgtgcagaagctctttagtttaattagatcccatttgtcaattttggcttttgttgccattgcttttggtgttttagacatgaagtccttgcccatgcctatgtcctgaatgataatgcctaggttttcttctagggtttttatggttttaggtctaacgtttaaatctttaatccatcttgaattgatttttgtataaggtgtaaggaagggatccagtttcagctttctacatatggctagccagttttcccagcaccatttattaaatagggaatcctttccccattgcttgtttttctcaggtttgtcaaagatcagatagttgtagatatgcggcgttatttctgagggctctgttctgttccattgatctatatctctgttttggtaccaataccatgctgttttggttactgtagccttgtagtatagtttgaagtcaggtagtgtgatgcctccagctttgttcttttggcttaggattgacttggcaatgcaggctcttttttggttccatatgaactttaaagtagttttttccaattctgtgaagaaaggcattggtagcttaatggggatggcattgaatctgtaaattaccttgggcagtatggccattttcacgatattgattcttcctacccatgagcatggaatgttcttccatttgcttgtatcctcttttatttccttgagcagttgtttgtagttctccttgaagaggtccttcacatcccttgtaagttggattcctaggtattttattctctttgaagcagttgtgaatgggagttcactcatgatttggctctctgtttgtctgttgttggtgtataagaatgcttgtgacttttgtacattgattttgtatcctgagactttgctgaagttgcttatcagcttaaggagattttgggctgagacaatggggttttccagatatacaatcatgtcgtctgcaaacagggacaatttgacttcctcttttcctaattgaataccctttatttccttctcctgcctaattgccctggccagaacttccaacactatgttgaataggagtgatgagagagggcatccctgtcttgtgccagttttcaaagggaatgcttccagtttttacccattcagtatgatattggctgtgtgtttgtcatagatagctcttattattttgaaacacgtcccatcaatacctaatttattgagagtttttagcatgaaaggttgttgaattttgtcaaaggctttttctgcatctattgagataatcatgtggttttcgtctttggctctgtttatatgctggattacatttattgatttgtgtatattgaaccagccttgcatcccagggatgaaacccacttgatcatggtggataagctttttgatgtgctgctggattcggtttgccagtattttattgaggagttttgcatcaatgttcatcaaggatattggtctaaaattctcttttttggttgtgtctctgcccagctttggtatcagaatgatgctggcctcataaaatgagttagggaggagtccctctttttctactgattggaatagtttcagaaggaatggtaccagttcctccttgtacctctggtagaattcagctgtgaatccatctggtcctggactctttttggttggtaaactattgattattgccacaatttcagctcctgttattggtctattcagagattcaacttcttcctggtttagtcttgggagagtgtatgtgtcgaggaatttatccatttcttctagattttctagtttatttgcgtaaaagtgtttgtagtattctctgatggtagtttgtatttctgtgggatctgtggtgatatcccctttatcattttttattgcgtctatttgatttttctctctttttttctttattagtcttgctagcagtctatcaattttgttgttcctttcaaaaaaccagctcctggattcactaattttttgaagggttttttgtgtctctatttccttcagttctgctctgattttagttatttcttgccttctgctagcttttgaatgtgtttgctcttgcttttctagttcttttaattgtgatgttagggtgtcaattttggatctttcctgctttctcttgtgggcatttagtgctataaatttccctctacacactgctttgaatgcgtcccagagattctggtatgttgtgtctttgttctcgttggtttcaaagaacatctttatttctgccttcatttcgttatgtacccagtagtcactcaggagcaggttgttcagtttccatgtagttgagtggttttgagtgagattcttaatcctgagttctagtttgattgcactgtggtctgagagatagtttgttataatctctgttcttttacatttgctgaggagagctttacttccaagtatgtggtcaattttggaataggtgtggtgtggtgctgaaaaaaatgtatattctgttgatttggggtggagagttctgtagatgtctattaggtctgcttggtgcagagctgagttcaattcctgggtatccttgttgactttctgtctcgttgatctgtctaatgttgacagtggggtgttaaagtctcccattattaatgtgtgggagtctaagtctctttgtaggtcactcaggacttgctttatgaatctgggtgctcctgtattgggtgcatatatatttaggatagttagctcttcttgttgaattgatccctttaccattatgtaatggccttctttgtctcttttgatctttgttggtttaaagtctgttttatcagacactaggattgcaacccctgcctttttttgttttccatttgcttggtagatcttcctccatccttttattttgagcctatgtgtgtctctgcacgtgagatgggtttcctgaatacagcacactgatgggtcttgagtctttatccaatttgccagtctgtgtcttttaattggagcatttagtccatttacatttaaagttaatattgttatgtgtgaatttgatcctgtcattatgatgttagctggtgattttgctcattagttgatgcagtttcttcctagtctcgatggtctttacattttggcatgattttgcagtggctggtactggttgttcctttccatgtttagcgcttccttcaggagctcttttagggcaggcctggtggtgacaaaatctctcagcatttgcttgtctgtaaagtattttatttctccttcacttatgaaacttagtttggctggatatgaaattccgggttaaaaattcttttctttaagaatgttgaatattggcccccactctcttctggcttgtagggtttctgccgagagatccgctgttagtctgatgggcttccctttgaaggtaacccgacctttctctcttgctgcccttaacattttttccttcatttcaactttggtgaatctgacaattatgtgtcttggagttgctcttctcgaggagtatctttgtggcattctctgtatttcctgaatctgaacgttggactgccttgctaggttggggaagttctcctggataatatcctgcagagtgttttccaacttggttccattctccccatcactttcagttacaccaatcagacgtagatttggtcttttcacatagtcccatatttcttggaggctttgctcgtttctttttattcttttttctctaaacttcccttctcgcttcatttcattcatttcatcttccattgctgacaccctttcttccagttgatcgcatcggctcctgaggcttctgcattcttcacgtagttctcgagccttggttttcagcttcatcagctcctttaagcacttctctgtattggttattctagttatacattcttataaatttttttcaaagttttcaacttctttgcctttggtttgaatgtcctcccgtagctcagagtaatttgatcgtctgaagccttcttctctcagctcgtcaaagtcattctccatccagctttgttccgttgctggtgaggaactgcgttcctttggaggaggagaggtgctctgctttttagagtttccagtttttctgttctgttttttccccatctttgtggttttatctacttttggtctttgatgatggtgatgtacagatgggtttttggtgtggatgtcctttctgtttgttagttttccttctaacagacaggaccctcagctgcaggtctgttggaataccctgccttgtgagctgtcagtgtgcccctgctgggggtgcctcccagttaggctgctcgggggtcaggggtcagggacccacttgaggaggcagtctgcccgttctcagatctccagctgcgtgctgggagaaccactgctctcttcaaagctgtcagacagggacatttaagtctgcagaggttactgctgtctttttgtttgtctgtgccctgcccccagaggtggagcctacagaggcaggcaggcctccttgagctgtggtgggctccacccagttcgagcttcccggctgctttgtttacctaagcaagcctgggcaatggcgggcgcccttcccccagcctcgctgccgccttgcagtttgatctcagactgctgtgctagcaatcagggagactccgtgggcctaggatcctccgagccaggtgcgggatataatctcgtggtgcaccgttttttaagcaggtcagaaaagcgcagtattcgggtgggagtgacccgattttctaggtgcgtctgtcacccctttctttgactcggaaagggaactccctgaccccttgcgcttcccaagtgaggcaatgcctcgccctgcttcggctggcgcatggtgcacgcacccactgacctgcgcccactgtctggcactccctagtgagatgaacccggtacctcagatggaaatgcagaaatcacccgtcttctgtgtcgctcatgctgggagctgtagactggagctgttcctattcggccatcttggctcctccccattt

SEQ ID NO: 10469 - DNA, 7417 bp, Homo sapiens
attgatttttttttttttaccattattattttttcttttttttttattattatactttaagttttagggtacatgtgcacattgtgcaggttagttacatatgtatacatgtgcgatgctggtgcgctgcacccactaactcgtcatctagcattaggtatatctcccaatgctatccctcccccctccccccaccccaccacagtccccagagtgtgatattccccttcctgtgtccatgtgatctcattgttcaattcccacctatgagtgagaatatgcggtgtttggttttttgttcttgcaatagtttactgagaatgatgatttccaatttcatccatgtccctacaaaggacatgaactcatcattttttatggctgcatagtattccatggtgtatatgtgccacattttcttaatccagtctatcattgttggacatttgggttggttccaagtctttgctattgtgaataatgccgcaataaacatacgtgtgcatgtgtctttatagcagcatgatttatagtcctttgggtatatacccagtaatgggatggctgggtcaaatggtatttctagttctagatccctgaggaatcgccacactgacttccacaatggttgaactagtttacagtcccaccaacagtgtaaaagtgttcctatttctccacatcctctccagcacctgttgtttcctgactttttaatgattcccattctaactggtgtgagatggtatctcattgtggttttgatttgcatttctctgatggccagtgatgatgagcattttttcatgtgttttttggctgcataaatgtcttcttttgagaagtgtctgttcatgtccttcgcccactttttgatggggttgttttttttttcttgtaaatttggttgagttcattgtagattctggatattagccctttgtcagatgagtaggttgcaaaaattttctcccatgttgtaggttgcctgttcactctgatggtagtttctcttgctgtgcagaagctctttagtttaattagatcccatttgtcaattttggcttttgttgccattgcttttggtgttttggacatgaagtccttgcccatgcctatgtcctgaatggtaatgcctaggttttcttctagggtttttatggttttaggtctaacgtttaaatctttaatccatcttgaattgatttttgtataaggtgtaaggaagggatccagtttcagctttctacatatggctagccagttttcccagcaccatttattaaatagggaatcctttccccatttcttgtttttctcagatttgtcaaagatcagacagttgtaggtatgtcgtgttatttctgagggctctgttctgttccattgatctatatctctgttttggtaccagtaccatgctgttttggttactgtagccttgtagtaaagtttgaagtcaggtagtgtgatgcctccagctttgttcttttggcttaggattgacttggcgatgcaggctcttttttggttccacatgaactttaaagtagttttttccaattctgtgaagaaagtcattggtagcttgatggcgatggcattgaatctgtaaattaccttgggcagtatggccattttcacgatattgattcttcctacccatgagcatggaatgttcttccatttgtttgtatcctcttttatttccttgagcagtggtttgtagttctcctcgaagaggtccttcacatcccttgtaagttggattcctaggtattttattctctttgaagcaattgtgaatgggacttcactcatgatttggctctctgtttgtctgttgttggtgtataagaatgcttgtgatttttgtacattgattttatatcctgagactttgctgaagttgcttatcagcttaaggagattttgggctgagacaatggggttttctagatatacaatcatgtcatctgcaaacagggacaatttgacttcctcttttcctaattgaataccctttatttccttctcctgcctaattgccctggccagaacttccaacactatgttgaataggagtggtgagagagggcatccctgtcttgtgccagttttcaaagggaatgcttccagtttttgcccattcagcatgatattggctgtgggtttgtcatagatagctcttattattttgaaatacgtcccatcaatacctaagttattgagagtttttagcatgaagggttgttgaattttgtcaaagtctttttctgcatctattgagataatcatgtggtttttgtctttggctctgtttatatgctggattacatttattgatttgcgtatattgaaccagccttgcatcccagggatgaagcccacttgatcatggtggataagctttttgatgtgctgctggatttggtttgccagtattttattgaggatttttgcatcaatgttcatcaaggatattggtctaaaattctctttttttgttgtgtctctgcctggctttggtatcagaatgatgctggcctcataaaatgagttagggaggattccctctttttctattgattggaatagtttcagaaggaatggtaccagttcctccttgtacctctggtagaattcggctgtgaatccatctggtcctggactctttttggttggtaagctattgattattgccacaatttcagctcctgttattggtctattaagagattcaacttcttcctggtttagtcttgggagagtgtatgtgtcgaggaatttatccatttcttctagattttctagtttatttgcatagaggtgtttgtagtattctctgatggtagtttgtatttctgtgggatcggtggtgatatcccctttatcattttttattgtgtctatttgattcttctctctttttttctttattagtcttgctagcggtctatcaattttgttgatcctttcaaaaaaccagctcctggattcattgattttttgaagggttttttgtgtctctatttccttcagttctgctctgattttagttatttcttgccttctgctagcttttgaatgtgtttgctcttgcttttctagttcttttaattgtgatgttagggtgtcaattttggatctttcctgctttctcttgtgggcatttagtgctataaatttccctctacacactgctttgaatgcgtcccagagattctggtatgttgtgtctttgttcttgttggtttcaaagaacatctttatttctgccttcattttgttatgtacccagtagtcattcaggagcaggttgttcagtttccatgtagttgagcggctttgagtgagtttcttaatcctgagttctagtttcattgcactgtggtctgagagatagtttgttataatttctgttcttttacatttgctgaggagagctttacttccaactacgtggtcaattttggaataggtgtggtgtggtgctgaaaaaaatgtatattctgttgatttggggtggagagttctgtagatgtctattaggtccacttggtgcagagctgagttcaattcctgggtatccttgttgactttctgtctcgttgatctgtctaatgttgacagtggggtgttaaagtctcccattattattgtgtgggagtctaagtctctttgtaggtcactcaggacttgctttatgaatctgggtgctcctgtattgggtgcatatatatttaggatagttagctcttcttgttgaattgatccctttaccattatgtaatggccttctttgtctcttttgatctttgttggtttaaagtctgttttatcagagactaggattgcaacccctgcctttttttgttttccatttgcttggtagatcttcctccatcattttattttgagcctatgtgtgtctctgcacgtgagatgggtttcctgaatacagcacactgatgggtcttgactctttatccaatttgccagtctgtgtcttttaattggagaatttagtccatttacatttaaagttaatattgttatgtgtgaatttgatcctgtcattatgatgttagctggtgattttgctcgttagttgatgcagtttcttcctagtctcgatggtctttacattttggcatgattttgcagcagctggtactggttgttcctttccatgtttagcgcttccttcaggagctcttttagggcaggcctggtggtgacaaaatctctcagcatttgcttttctgtaaagtattttatttctccttcacttatgaagcttagcttggctggatatgaaattctgggttgaaaattcttttctttaagaatgttgaatattggcccccactctcttctggcttgtagggtttctgccgagagatccgctgttagtctgatgggcttccctttgagggtaacccgacctttctctctggctgcccttaacattttttccttcatttcaactttggtgaatctgacaattatgtgtcttggagttgctcttctcaaggagtatctttgtggcgttctctgtatttcctgaatctgaacattggcctgccttgctagattggggaagttctcctggataatatcctgcagagtgttttccaacttggttccattctccccatcactttcaggtacaccaatcagaggtagatttggtcttttcacatagtcccatatttcttggaggctttgctcatttctttttattcttttttctctaaacttcccttctcacttcatttcattcatttcatcttccattgctgacaccctttcttccagttgatcgcatcagctcctgaggcttctgcattcttcacgtagttctcgagccttggttttcagctccatcagctcctttaagcacttctctgtattggttattctagttatacattcttctaaatttttttcgaagttttcaacttctttgcctttggtttgaatgtcctcccgtagctcagagtaatttgatcgtctgaagccttcttctctcagctcgtcaaagtcattctccatccagctttgttctgttgctggtgaggagctgcgttcctttggaggaggagaggcgctctgatttttagagcttccagtttttctgttctgttttttccccatctttgtggttttatctacttttggtctttgatgatggtgatgtacagatgggtttttggtgtggatgtcctttctgtttgttagttttccttctaacagacaggaccctcagctgcaggtctgttggaataccctgccatgtgaggtgtcagtgtgcccctgctggggggtgcctcccagttaggctgcttgggggtcaggggtcagggacccacttgaagaggcagtctgccggttctcagatctccagctgcgtgctgggagaaccactgctcccttcaaagctgtcagacagggacatttaagtctgcagaggttactgctgtctttttgtttgtctgtgccctgcccccagaggtggagcctacagaggcaggcaggcctccttgagctgtggtgggctccacccagttcgagcttcctggctgctttgtttacctaagcaagcctgggcaatggcgggcgcccctcccccagcctcgctgccgccttgcagtttgatctcagactgctgtgctagcaatcagcgagattccgtgggcgtaggaccctccgagccaggtgtgggatatagtctcgtggtgcgccgttttttaagccggtctgaaaagcgcaatgttcgggtgggagtgacccgattttccaggtgcgtccatcacccctttctttgactcggaaagggaactctctgaccccttgcgcttcccaggtgaggcaatgcctcgccctgcttcggctcgcgcacggtgcgcgcacccactggcctgcgcccactgtctggcactccctagtgagatgaacctggtacctcagatggaaatgcagaaatcaccggtcttctgcatcggtcacgctgggagctgtagaccggagctgttcctattcggccatcttggctcctcccccgcatccattgattttttaacaaaggtaccgacacaattcctgtattagtccattctcacattgctataaagaactgcctgagattgggtaatttataaaggaaagtagttcaatcgcatggcagaaggggaagcaaaggcatctttcttcacatgatgacaggtaggagaagtgcagagcaacaggggaaaaaaccccttataaaaccatcagatctcgtgagaatgcactcactatcccgagaacaggatggaggaaactgcccgcatgattcaattatctccaggacatgtggagattatgggaactcaaattcaagatgagatttgggtagggacacagccaaaccataacaattcctttgggaaagcaagttcccaaatggtgtttgaacaacggaaaattaaattagtaaatctcaacctcctacatcactctatgtacaaaaattatttcaagattaatcattgacttaaaataaaagttagaaaaataaagcatctagaaaaaacattgaagtagatcttcatacgtttgagataggcaaagatttctttagagcataaaaagcaccaaacataaaacaaaacttgataaattacacaacatcaaaaataagaacttctgcacattaaaaaatgttataagaaataaaatcaagcttcagacttggagaaaatatttacaacacaattattttacaatacaaatatctaacaaaggacttgtatttagaatatataacgacctgcaaatcaataatgaagaaatctactcaataaatatgcatataatatgtaaacattttaccaaaaaaaatgactgttcaacatgaacataaaaaggtgcttatcagggaaataacaattaaaaccaccacaagatacatactagaatgtttaaaataaaaaggactgaaaataccaagttttggcaaggaagtgaaaccactgggaactctcatatattgctggtggaaatgtgaaatatcacaaccatttaaaaaaacctgtggcagtaccttttaaagttggatatacatggtatccatgaatccattcctaggtgtctaccttaaaaaaaagtgaaaacatttttcactggaaaatgttaaagatgtttcattgtagaactttttctccagtgaaaaagtaaaaccttttaacttttttttttttttttttttttgagatggagtctcgctctgtcacccaggctggagtgcagtggcatgatctcggttcactgcaagctctgcctctcggattcaccccattctcctgcctcagtctcccgagtagctgggactacaggagcccaccaccacgcccggctaattttttgtattttt

SEQ ID NO: 10470 - DNA, 5381 bp, Homo sapiens
tatgtatattattatttttttctttttttttttattgtactttaagttttagggtacatgtgcacattgtgcaggttagttacatatgtatacatgtgccatgctggtgcgctgcacccactaactcatcatctagccttaggtatatctcccaatgctatccctccccgctccccccaccccaccacagtccccagagtgtgatattccccttcctgtgtccatgtgatctcattgttcaattcccacctatgagtgagaatatgcggtgtttggttttttgttcttgcgatagtttactgagaatgatgatttccaatttcatccatgtccctacaaaggacatgaactcatcattttttatggctgcatagtattccatggtgtatatgtgccacattttcttaatccagtctatcattgttggacatttgggttggttccaagtctttgctattgtgaataatgctgcaataaacatacgtgtgcatgtgtctttatagcagcatgatttatagtcatttgggtatatacccagtaatgggatggctgggtcaaatggtatttctagttctagatccctgaggaatcaccacactgacttccacaatggttgaactagtttacagtcccaccaacagtgtaaaagtgttcctatttctccacatcctctccagcacctgttgttttctgtctttttaatgattgccattctaactggtgtgagatgatatctcatagtggttttgatttgcatttctctgatggccagtgatgatgaacattttttcatgtgttttttggctgcataaatgtcttcttttgagaagtgtctgttcatgtccttcgcccactttttgatggggttgtttgtttttttcttgtaaatttgcttgagttcattgtagattctggatattagccctttgtcagatgagtaggttgcgaaaattttctcccattctgtaggttgcctgttcactctgatggtagtttcttttgctgtgcagaagctctttagtttaattagatcccatttgtcaattttggcttttgttgccattgcttttggtgttttggacatgaagtccttgcccacgcctatgtcctgaatggtaatgcctaggttttcttctagggtttttatggttttaggtctaacgtttaaatctttaatccatcttgaattgatttttgtataaggtgtaaggaagggatccagtttcagctttctacatatggctagccagttttcccagcaccatttattaaatagggaatcctttccccattgcttgtttttctcaggtttgtcaaagatcagatagttgtaggtatgcggcgttatttctgagggctctgttctgttccattgatctatatctctgttttggtaccagtaccatgctgttttggttactgtagccttgtagtatagtttgaagtcaggtagtgtgatgcctccagctttcttcttttggcttaggattgacttggtgatgcgggctcttttttggttccatatgaactttaaagtagttttttccaattctgtgaagaaagtcattggtagcttgatggggatggcattgaatctgtaaattatcttgggcagtatggccattttcacgatattgattcttcctacccatgagcatggaatgttcttccatttgtttgtatcctcttttatttccttgagcagtggtttgtagttctccttgaagaggtccttcacatcccttgtaagttggattcctaggtattttattctctttgaagcaattgtgaatgggagttcactcatgatttggctctctgtttgtctgttgttggtgtataagaatgcttgtgatttttgtacattgattttgtatcctgagactttgctgaagttgcttatcagcttaaggagattttgggctgagatgatggggttttctagataaacaatcatgtcatctgcaaacagggacaatttgacttccgcttttcctaattgaataccctttatttccttctcctgcctgattgccctggccagaacttccaacactatgttgaataggagtggtgagagagggcatccctgtcttgtgccagttttcaaagggaatgcttccagtttttgcccattcagtatgatgttggctgtgggtttgtcatagatagctcttattattttgaaatacgtcccatcaatacctaatttattgagagtttttagcatgaagggttgttgaattttgtcaaaggctttttctgcatctattgagataatcatgtggtttttgtctttggctctgtttatatgctggattacatttattgatttgcgtatattgaaccagccttgcatcccagggatgaagcccacttgatcatggtggataagctttttgatgtgctgctggattcggtttgccagtattttattgaggatttttgcatcaatgttcatcaaggatattggtctaaaattctcttttttggttgtgtctctgcccggctttggtatcagaatgatgctggcctcataaaatgagttagggaggattccctctttttctatcgattggaatagtttcagaaggaatggtaccagttcctccttgtacctctggtagaattcggctgtgaatccatctggtcctggactctttttggttggtaaactattgattattgccccaatttcagctcctgttattggtctattcagagattcaacttcttcctggtttagtcttgggagagtgtatgtgtcgaggaatgtatccatttcttctagattttctagtttatttgcgtagaggtgtttgtagtattctctgatggtagtttgtatttctgtgggatcagtggtgatatcccctttatcattttttattgtgtctatttgattcttctctctttttttctttattagtcttgctagcggtctatcaattttgttgatcctttcaaaaaaccagctcctggattcattgattttttgaagggttttttgtgtctctatttccttcagttctgctctgattttagttatttcttgccttctgctagcttttgaatgtgtttgctcttgcttttctagttcttctaattgtgatgttagggtgtcaattttggatctttcctgctttctcttgtgggcatttagtgctataaatttccctctacacactgctttgaatgcatcccagagattctggtatgttgtgtctttgttctcgttggtttcaaagaacatctttatttctgccttcatttcgttatgtacccagtagtcattcaggagcaggttgttcagtttccatgtagttgagcggctttgagtgagattcttaatcctgagttctagtttgattgcatggtggtctgagagacagtttgttataatttctgttcttttacatttgctgaggagagctttacttccaagtatgtggtcaattttggaataggtgtggtgtggtgctgaaaaaaatgtatattctgttgatttggggtggagagttctgtagatgtctattaggtctgcttggtacagagctgagttcaattcctgggtatccttgttgactttctgtctcgttgatctgtctaatgttgacagtggggtgttaaagtctcccattattaatgtgtgggagtctaagtctctttgtaggtcactcaggacttgctttatgaatctgggtgctcctgtattgggtgcatatatatttaggatagttagctcctcttgttgaattgatccctttaccattatgtaatggccttctttgtctcttttgatctttgttggtttaaagtctgttttatcagagactaggattgcaacccctgcctttttttgttttccatttgtttggtagatcttcctccatccttttattttgagcctatgtgtatctctgcacgtgagatgggtttcctgaatacagcacactgatgggtcttgactctttatccaacttgccagtctgtgtcttttaattggagcatttagtccatttacatttaaagttaatattgttatgtgtgaatttgatcctgtcattatgatgttagctggtgattttgctcgttagttgatgcagtttcttcctagtctcgatggtctttacattttggcatgattttgcagcggctggtaccggttgttcctttccatgtttagcgcttccttcaggagctcttttagggcaggcctggtggtgacaaaatctctcagcatttgcttgtctgtaaagtattttatttctccttcacttatgaagcttagtttggctggatatgaaattctgggttgaaaattcttttctttaagaatgttgaatattggcccccactctcttctggcttgtagggtttctgctgagagatccgctgttagtctgatgggcttccctttgagggtaaaccgacctttctctctggctgcccttaacattttttccttcatttcaactttggtgaatcggacaattatgtgtcttggagttgctcttctcgaggagtatctttgtggcgttctctgtatttcctgaatctgaacgttagcctgccttgctagattggggaagttctcctggataatatcctgtagagtgttttccaacttggttccattctccgcatcactttcaggtacaccaatcagacgtagatttggtcttttcacatagtcccatatttcttggaggctttgctcatttctttttattcttttttctctaaccttcccttctcgcttcatttcattcatttcatcttccattgctgataccctttcttccagttgatcgcatcggctcctgaggcttctgcattcttcacgtagttctcgaaccttggttttcagctccatcagctcctttaagcacttctctgtattggttattctagttatacattcttctaaatttttttcaaagttttcaacttctttgcctttggtttgaatgtcctcccgtagctcagagtaatttgatcgtctgaaggcttcttctctcagctcgtcaaagtcattctccaaccagctttgttccgttgctggtgaggaactgcgttcctttggaggaggagaggcgctctgcgttttagagtttccagtttttctgttctgttttttccccatctttgtggttttatctacttttggtctttgatgatggtgatgtacagatgggttttcggtgtggatgtcctttctgtttgttagttttccttctaacagacaggaccctcagctgcaggtctgttggaataccctgccgtgtgaggtgtcagtgtgcccctgctggggggtgcctcccagttaggctgcttgggggtcaggggtcagggacccacttgaggaggcagtctgccct

SEQ ID NO: 10471 - DNA, 8041 bp, Homo sapiens
tttttttatttttattttttattttattttattattattatactttaagttttagggtacatgtgcacaatgtgcaggttagtttcatatgtatacatgtgccatgctggtgtgctgcacccattaactcgtcatttagcattaggtatatctcctaaagctatccctccccctgcccccaccctgcaacagtccccagagtgtgatgttccccttcctgtgtccatgtgttctcattgttcagttcccacctatgagtgagaatatgcggtgtttggtttttgttcttgcgatagtttactgagaatgatgatttccagtttcatccatgtccctacaaaggacgtgaactcatcattttttatggctgcatagtattccatggtgtatatgtgccacattttcttaatccagtctatcattgttggacatttgggttggttccaagtctttgctattgtgaatagtgccacaataaacatacctgtgcatgtgtctttatagcagcatgatttatagtcctttgggtatatacccagtaatgggatggctgggtcaaatggtatttctatttctagatccctgaggaatcaccacactgacttccacaagggttgaactagtttacagtcccaccaacactgtaaaagtgttcctgtttctccacatcctctccagcacctgttgtttcctgactttttaatgattgccattctaactggtgtgagatggtatctcattgtggttttgatttgcatttctctgatggccagtgatggtgagcattttttcgtgtcttttttggctgcataaatgtcttcttttgagaagtgtctgttcatatccttcgcccactttttgatgcggttgtttgtttttttcttgtaaatttgtttgagttcattgtagattctggatattagccctttgtcagatgagtaggttgcgaaaattttctcccattttgtaggttgcctgttcactctgatggtagtttcttttactgtgcagaagctctttagtttaattagatcccatttgtcaattttggcttttgttgccattgcttttggtgttttagacatgaagtccttgcccatgcctatgtcctgaatggtaatgcctaggttttcttctagggtttttatggttttaggtcgaacgtttaagtctttaatccatcttgaattaatttttctataaggtgtaaggaagggatccagtttcagctttctacctatggcaagccagttttcccagcaccatttattaactagggaatcctttccccattgcttgtttctctcaggtttgtcaaagatcagatagttgtagatatgcggtgttatttctgagggctctgttctgttccattgatctatatatctgttttggtaccagtaccatgctgttttggttactgtagccttgtagtatagtttgaaatcaggtagcatgatgcctccagctttgttcttttggcttaggattgacttggtggtgtgggctcttttttggttccatatgaactttaaagtagttttttccaattctgtgtagaaagtcattggtagcttgatggggatggcattgaatctataaattaccttgggcagtatggccattttcacaatattgattcttcctacccatgagcatggaatgttcttccatttctttgtatcctcttttatttcattgagcagtggtttgtagttctccttgaagaggtccttcacatcccttgtaagttggagtcctaggtattttattctctttgaagcaattgtgaatgggagttcactcatgatttggctctctgtttgtctgttattggtgtataagaatgcttgtgatttttgtacattgattttgtatcctgagactttgctgaagttgcttatcagcttaaggagattttgggctgagacattggggctttctagatatacaatcatgtcgtctgcaaacagggacaatttgacttcctcttttcctaattgaataccctttatttccttctcctgcctaattgccctggccagaacttccaacactatgttgaataggagtggtgagagagggcatccctgtcttgtgccagttttcaaagggaatgcttccagtttttgcccattcagtatgatattggctgtgggtttgtcatacatagctcttattattctgagatacgttccatcaatacctaatttattgagagtttttagcatgaagcattgttgaattttgtcaaaggccttttctgcgtctattgagataatcatgtggtttttgtcttttgttctgtttatatgctggattacatttattgatttgtgtatattgaaccagccttgcatcacagggatgaagcccacttgatcatggtggataagccttttgatgtgctgctggatttggtttgccagtattttactgagtatttttgcatcagtgttcatcaaggatattggtctaaaattctcttttttggttttgtctctgcctagctttggtatcaggatgatgctggcctcataaaatgagttagggaggattccctctttttctattgattggaatagtttcagaaggaatggtaccagctcctccttgtacctctggtagaattcggctgtgaatccatctggtcctggactctttttggttggtaagttattgattattgccacaatttcagatcctgtgattcagatcctgtgattcagatcctgtgtattcagagagtcaacttcttcctggtttagtcttgggagggtgtatgtgtccaggaatttatccatttcttctagattttctagtttatttgtgtagaggtgtttgtagtattctctgatggtagtttgtatttctgtgggatcggtggtgatatcccctttatcattttttattgcatctatttgattcttctctcttttcttctttattagtcttgctagtggtctatcaattttgttgatcctttcataaaaccagctcctggattcattaattttttgaagggttttttgtgtctctatttccttcagttctgctctgatcttagttatttcttgccttctgctagcttttgaatgtgtttgctcttgcttttctgtgtcttttaattgtgatgttagggtgtcaattttaaatctttcctgctttctcttgtgggcatttagtgctataaatttccctctacacactgctttgaatgtgtcccagagattctggtgtgttgtgtctttgttttcgttggtttcaaagaacatctttatttctgccttcatttcattatgtacccagtagtcattcaggagcaggttgttcattttccacgtagttgagtggttttgagtgagtttcttaatcctgagttctagtttgattgcactgtggtctgagagacagtttgttataatttctgatcttttacatttgctgaagagagctttacttccaactatgtggtcaattttggaataggtgtggtgtggtgctgaaaaaaatgtatattctgttgatttgggttggagagttctgtagatatctattaggtccgcttggtgcagagctgggttcaattcctgggtatccttgttaactttctgtctcgttgatctgtctaatgttgacagtggggtgttaaagtctcccattattattgtgtggcagtctaagtctctttctaggtcactcaggacttgctttatgaatctgggtgctcctgtattgggtgcatatatacttaggatagttagctcttcttgttgaattgatccctttaccattatgtaatggccttctttgtctcttttgatgtttgttggtttaaagtctgttttatcagagactgggattgcaacccctgcctttttttgttttccatttgcttggtagattttcctccatccttttattttgagcctatgtgtgtctctgcacgtgagatgggtttcctgaatacagcacactgatgggtcttgactctttatccaatttgccagtctgtgtcttttaattggagcatttagtccatttacatttaaagttaatattgttatgtgtgaatttgatcctgtcattatgatgttagctggctattttgctcgttagttgatgccgtttcttcctagcctcgatggtctttacaatttggcatgattttgcagtggctgccaccggttgttcctttccatgtttagtgcttccttcgggagctcttttagggcaggcctggtggtgacaaaatctctcagcatttgcttgtctgtaaagtattttatttctccttcacttatgaagcttagtttggctggatatgaaattctgggttgaaaattcctttctttaagaatgttgaatattggcccccactctcttctggcttgtagagtttctgccgagagatccgctgttagtctgatgggcttccctttgtgggtaacccgaccttcatctctggcctcccttaacattttttccttcatttcaacttttgtgaatctgacaattatgtgtcttgagttgctctttttgaggagtatctttgtggcgttctgtatttcctgcatctgaacgttggcctgccttgctagattggggaagttctcctggataatatcctgcagagtgttttccaacttggttccattctccccatcactttcaggtacaccaatcagacgtagatttggtcttttcacatagtctcatatttcttggaggctttgttcgtttctttttattctgttttctctaaacttcccttctcgcttcatttcattcacttcatcttccatcactgataccctttcttccagttgatcgcatcagctcctgaggcttctgcattcttcacgtagttctcgagccttggctttcagctccatcagctcctttacgtacttctctgtattagttattctagttatacattcgtcaaaatcattttcaaagttttcaacttctttgcctttggtttgaatttcctcctgtagctcagagtagtttgatcgtctgaagccttcttctctcaactcgtcaaagtcattctctgtccagctgtgttccgttgctggtgaggagctgcgttcctttggaggaggagaggtgctctgctttttagagtttccagtttttctgctgtgttttttccccatctttgcggttttatctacttttggtctttgatgatggtgatgtacagatgggtttttggtgtggatgtcctttctgtttgttagttttccttctaacagacaggaccctcagctgcaggtctgttggagtttgctagaggtccactccagaccttgtttgcctgggtaccagcagcggtggctgcagaacagtggatttttgtgaaccgcaaatgctgctgtctgatcgttcctctggaatttttgtctcagaggagtacccggccgtgtgaggtgtcagtctgcccctactggggggtgcctcccagttaggctgctcgggggtcaggggtcagggacccacttgaggaggcagtctgccctttctcagatctccagctgcgtgctgggagaatcactgctctcttcaaagctcagatggaaatgcagcctctaatatctctatttggctcacaaccctcaagtagttctcttcagggtttcagcaaatcttgccctataaatgcctaatattaagccagtggcttaaggtgaccttagaaaagatttctgaagcttcatctctaaacagctacctcctctctactaacctgcttcataaatcccagccacaatgctaataatgtctaccttagacaccatcaatttctctttgggttctatttcactgcgttcctaatcaaaaagccagggtaaatgtgttgcttacctccagtagttctttcttttccaggatagcagtgttgtggagtctgttgttagatgtctaaaaagagttgctgcttatgtattttttgagtgttatatttgtttatggctgaagggtaaatctaatagttataaccctgtcattattcagatgaagaatttgtcattttaagtttctcttttttatattcaccacctaccattctacagtattttttgattctttgtgggatttttctctgtctctacaataacttaacttccatgagaagtgattctgtcagtcttactcaattcagatctctagtgctcagaagagtgcttggtactcatgaataaacaacaaatatttaataaaattaaatgaaatgaatgagtaaattattgaataattatgcacagatgaaatttgcttcagaacatattaaaaattttacactagcaatataaaagaataggtgaatagatgttgaaaaaatttgtgcaaaacctatgatattgaagaagaaaataaggggcagacaaagaagtgaaggaataaaaaatgaagaagaaataagaagacagtaaaagaggaaaatggaaaagaagaaagtttgtagaattgtggagaaaaaaagacaaaaagacaagagaagaaatgaggatatttttgtaaaaaggaaaggaagaaaaagaaaagaggcaagtattattttaattctctaacacagcaaacatactgtgccctgactttgtattttaaggcaaaattctagggctgcaatggtgaaaatagttgggttattctttctaaacacctttatccccaaacatatttgccctgatgtgtaagaaatacacacaaaaatataatccaacttagattatgagtgccataggaaagtgctgtgagaagagtgatatcaaaaccttatatggggatctagctaggtaggcatcttagagaaagtgactaagtttgaaggatgaatagaaattaaacagatgttatgggaggaaacaatttgacaaaaggtttggaataaggaaaagaaagagcatggaacagaaattgtaaaagtttctgattggctttcctaataatgtctgaatgacgctgttgggaatgtgtattgggaatgcaagtttaagtctcacatggagagtctcgaatattgtgctaggagtttgaacttttaagtgctctttagcttttggaaacctctgagagtttttcaataagaaagtaataagctcagatcagtgattttagaacataaaatgtaattttaaaaagcagagaaataaatagaaaagagagagaaggcaactttgagcaaaacttttttcttaaaaaaagcgtttttggcacttagttctagaaatgatagaaaaacagatggaaaagatgttggtactggaaattattttatcagtctgtttttatcctgcttgctaagaaagggcatgacttttttattatgcatctaaggatctcttttactttgagccattttcacttggacacattatagttgagtgctgatattactgatgtgcttcctcccctaaatccccttgcccaacaggggttaagtcttgtaggcctaagtgtctgaaaactctgctcctctaacgtgaaaaatcaaacaaaaacaaatgaaacaccaccagttatcaggaatcagcgtttctctgcaacaaaagaaaatagaggatcatgttcacccactctgctttatttatgggaattaaattgggtttggtgtacagaatatctctatctcaataaaattcaagtgctgcgcagaagataaacggaatatacttttaaatgaaattgcttttcgttttggcagcagggtatttggtcattcaggaacttttgcacctctcacttttcacagaaggtcttttagagatgtatttcagctaaggagctcacctctatgaaaggaggactgggcccctagggttagctcttaaagattacttctaagtcatttcaagcattctgaatatttttcagttatgttcattcagactgatttgatatccatgggcaatattattttgaggtaacacttcataagtattaaaaaaaattactgtcccccccatttgaactatttaaaaagagagttaatggaatgtagagttacttaatttatgataaaattcatacc

SEQ ID NO: 10472 - DNA, 6070 bp, Homo sapiens
tagtatttcacatttcttttcttttctttttttttttattatactctaagttttagggtacatgtgcacattgtgcaggttagttacatatgtatacatgtgccatgctggtgcgctgcacccactaacgtgtcatctagcattaggtatatctcccaatgctatccctcccccctcccccgaccccaccacagtccccagagtgtgatattccccttcctgtgtccatgtgatctcattgttcaattcccacctatgagtgagaatatgcggtgtttggttttttgttcttgcgatagtttactgagaatgatggtttccaatttcatccatgtccctacaaaggacatgaactcatcattttttatggctgcatagtattccatggtgtatatgtgccacattttcttaatccagtctatcattgttggacatttgggttggttccaagtctttgctattgtgaatagtgccgcaataaacatacgtgtgtatgtgtctttatagcagcatgatttatagtcctttgggtatatacccagtaatgggatggctgggtcaaatggtatttctagttctagatccctgaggaatcgccacactgacttccacaatggttgaactagtttacagtcccaccaacagtgtaaaagtgttcctatttctccacatcctctccagcacctgttgtttcctgactttttaatgattgccattctaactggtgtgagatgatatctcatagtggttttgatttgcatttctctgatggccagtgatgatgagcatttcttcatgtgttttttggctgcataaatgtcttcttttgagaagtgtctgttcatgtccttcgcccactttttgatggggttgtttgtttttttcttgtaaatttgtttgagttcattgtagattctggatattagccctttgtcagatgagtaggctgcgaaaattttctcccatgttgtaggttgcctgttcactctgatggtagtttcttttgctgtgcagaagctctttagtttaattagatcccatttgtcaattttggcttttgttgccattgcttttggtgttttggacatgaagtccttgcccacgcctatgtcctgaatggtaatgcctaggttttcttctaggctttttatggttttaggtctaacgtttaaatctttaatccatcttgaattgatttttgtataaggtgtaaggaagggatccagtttcagctttctacatatggctagccagttttcccagcaccatttattaaatagggaatcctttccccattgcttgtttttctcaggtttgtcaaagatcagatagttgtagatatgcggcattatttctgagggctctgttctgttccattgatctatatctctgttttggtaccagtaccatgctgttttggttactgtagccttgtagtatagtttgaagtcaggtagtgtgatgcctccagctttgttcttttggcttaggattgacttggcgatgcgggctcttttttggttccatatgaactttaaagtagttttttccaattctgtgaagaaagtcattggtagcttgatggggatggcattgaatctgtaaattacctttggcagtatggccattttcacgatattgattcttcctacccatgagcatggaatgttcttccatttgtttgtgtcctcttttatttccttgagcagtggtttgtagttctccttgaagaggtccttcacatcccttgtaagttggattcctaggtattttattctctttgaagcaattgtgaatgggagttcactcatgatttggctctctgtttgtctgttgttggtgtataagaatgcttgtgatttttgtacattgattttgtatcctgagactttgctgaagttgcttatcagcttaaggagattttgggctgagacgatggggttttctagataaacaatcatgtcatctgcaaacagggacaatttgacttcctcttttcctaattgaataccctttatctccttctcctgcctgattgccctggccagaacttccaacactatgttgaataggagtggtgagagagggcatccctgtcttgtgccagttttcaaagggaatgcttccagtttttgcccattcagtatgatattggctgtgggtttgtcatagatagctcttattattttgagatacgtcccatcaatacctaatttattgagagtttttagcatgaagggttgttgaattttgtcaaaggctttttctgcatctattgagataatcatgtggtttttgtctttggctctgtttatatgctggattacatttattgatttgcgtatattgaaccagccttgcatcccagggatgaagcccacttgatcatggtggataagctttttgatgtgctgctggattcggtttgccagtattttattgaggatttttgcatcaatgttcatcaaggatattggtctaaaattctcttttttggttgtgtctctgcccggctttggtatcagaatgatgctggcctcataaaatgagttagggaggattccctctttttctattgattggaatagtttcagaaggaatggtaccagttcctccttgtacctctggtagaattcggctgtgaatccatctggtcctggactctttttggttggtaaactattgattattgccacaatttcagagcctgttattggtctattcagagattcaacttcttcctggtttagtcttgggagagtgtatgtgtcgaggaatgtatccatttcttctagattttctagtttatttgcgtagaggtgtttgtagtattctctgatggtagtttgtatttctgtgggatcggtggtgatatcccctttatcattttttattgtgtctatttgattcttctctctttttttctttattagtcttgctagtggtctatcaattttgttgatcctttcaaaaaaccagctcctggattcattgattttttgaagggttttttgtgtctctatttccttcagttctgctctgattttagttatttcttgccttctgctagcttttgaatgtgtttgctcttgcttttctagttcttttaattgtgatgttagggtgtcaattttggatccttcctgctttctcttgtaggcatttagtgctataaatttccctctacacactgctttgaatgcgtcccagagattctggtatgtggtgtctttgttctcgttggtttcaaagaacatctttatttctgccttcatttcgttatgtacccagtagtcattcaggagcaggttgttcagtttccatgtagttgagcggctttgagtgagattcttaatcctgagttctagtttgattgcactgtggtctgagagatagtttgtaataatttctgttcttttacatttgctgaggagagctttacttccaactatgtggtcaattttggaataggtgtggtgtggtgctgaaaaaaatgtatattctgttgatttggggtggagagttctgtagatgtctattaggtctgcttggtgcagagctgagttcaattcctgggtatccttgttgactttctgtctcgttgatctgtctaatgttgacagtggggtgttaaagtctcccattattaatgtgtgggagtctaagtctctttgtaggtcactcaggacttgctttatgaatctgggtgctcctgtattgggtgcataaatatttaggatagttagctcctcttgttgaattgatccctttaccattatgtaatggccttctttgtctcttttgatccttgttggtttaaagtctgttttatcagagactaggattgcaacccctgcctttttttgttttccattggcttggtagatcttcctccatccttttattttgagcctatgtgtgtctctgcacgtgagatgggtttcctgaatacagcacactgatgggtcttgactctttatccaacttgccagtctgtgtcttttaattgcagaatttagtccatttatatttaaagttaatattgttatgtgtgaatttgatcctgtcattatgatgttagctggtgattttgctcattagttgatgcagtttcttcctagtctcgatggtctttacattttggcatgattttgcagcggctggtaccggttgttcctttccatgtttagcgcttccttcaggagctcttttagggcaggcctggtggtgacaaaatctctcagcatttgcttgtctataaagtattttatttctccttcacttatgaagcttagtttggctggatatgaaattctggtttgaaaattcttttctttaagaatgttgaatattggcccccactctcttctggcttgtagggtttctgccgagagatccgctgttagtctgatgggctttcctttgagggtaacccgacctttctctctggctgcccttaacattttttccttcatttcaactttggtgaatctgacaattatgtgtcttggagttgctcttctcgaggagtatctttatggcgttctctgtatttcctgaatctgaacgttggcctgccttgctagattggggaagttctcctggataatatcctgcagagtgttttccaacttggttccattctccacatcactttcaggtacaccaatcagacgtagatttggtcttttcacatagtcccatatttcttggaggctttgctcatttctttttattcttttttctctaaacttcccttctcgcttcatttcattcatttcatcttccattgctgataccctttattccagttgatcgcatcagctcctgaggcttctgcattcttcacgtagttctcgagccttggttttcagctccatcagctcctttaagcacttctctgtattggttattctagttatacattcttctaaatttttttcaaagttttcaacttctttgcctttggtttgaatgtcctcccgtagctcagagtaatttgatcgtctgaagccttcttctctcagctcgtcaaaatcattctccatccagctttgttccgttgctggtgaggaactgcgttcctttggaggaggagaggcgctctgcgttttagagtttccagtttttctgttctgttttttccccatctttgtggttttatctacttttggtctttgatgatggtgatgtacagatgggttttcggtgtagatgtcctttctggttgttagttttccttctaacagacaggaccctcagctgcaggtctgttggaataccctgccgtgtgaggtgtcagtgtgcccctgctgggggtgcctcccagttaggttgctcgggggtcaggggtcagggacccacttgaggaggcagtctgcccgttctcagatctccagctgcgtgctgggagaaccactgctctcttcaaagctgtcagacagggacacttaagtctgcagaggttactgctgtctttttgtttgtctgtgccctgcccccagaggtggagcctacagaggcaggcaggcctccttgagctgtggtgggctccacccagttcgagcttcccggctgctttgtttacctaagcaagcctgggcaatggcgggcgcccctcccccagcctcgttgccgccttgcagtttgatctcagactgctgtgctagcaatcagcgagattccgtgggcgtaggaccctctgagccaggtgtgggatatagtctcgtggtgcgccgtttcttaagccggtctgaaaagcgcaatattcgggtgggagtgacccgattttccaggtgcgtccgtcacccctttctttgactcggaaaaggaactccctgaccccttgcgcttcccaggtgaggcaatgcctcgacctgcttcggctcgcgcacggtgcacgcacacactggcctgcgcccactgtctggcactccctagtgagaagaacccggtacctcagatggaaatgcagaaatcacccgtcttctgcgtcgctcacgctgggagctgtagaccagagctgttcctattcggccatcttggctcctccccccctgacttggagttt

SEQ ID NO: 10473 - DNA, 4063 bp, Homo sapiens
ttttttttgcatcttgtaaggttttgtatattttttgtgcgttttttaaaatttattattatactttaagttttagggtacatgtgcacaatgtgcaggttagttacatatgtatacatgtgccatgctggtgtgctgcacccactaacccgtgatctagcattaggtatatctccaaatgctatcccttcccgctcccccaaccccacaacagtccccagagtgtgatgttccccttcctgtgtccatgtgttctcattgttcaattcccacctatgagtgagaatatgcagtgtttggtttttggttcttgcgatagtttactgagaatgatgatttccaatttcatccatgtcccaacaaaggacgtgaactcatcattttttatggctgcatagtattccatggtgtatatctgccatattttcttaatccagtctatcattgttagacatttgggttggttccaagtctttgctcttgtgaataatgccgcaataaatatacatgtgcatgtgtctttatagcagcatgacttatagtcctttgggtatatacccagtaatgggatggctgggtcaaatggtatttccagttctagatccctgaggaatcaccacactgacttccacaagggttgaactagtttacagtcccaccaacagtgtaaaagtgttcctatttctccacatcctctccagcacctgttgtttcttgactttttaatgattgatattctaactggtatgagatggtatctcattgtggttttgatttgcatttctctgatggccagtgatgatgagcattttttcttgtgttttttggctgcataaatgtcttcttttgagaagtgtctgttcatgtccttcgcccactttttgatggggttgtttgtttttttcttgtaaatttgtttgagttcattgtagattctggatattagccctttgtcagatgagtaggttgtgaagattttctcccattttgtaggttgcctgttcactctgatggtggtttcttttgctgtgcagaagctctttagtttaattagatcccatttgtcaattgtggcttttgttgccattgcttttggtgttttagacatgacgtccttgcccatgcctatgtcctgaatggtaatgcctaggtttccttctagagtttttatggttttaggtctaacgtttaagtctttaatccatcttgaattgatttttgtataaggtgtaaagaagggatccagtttcagctttctacatatggctagccagttttcccagcaccatttattaaatagggaatcctttccccattgcttgtttttctcaggtttgtcaaagatcagatagttgtagatatgcggcgttatttctgagggctctgttctgttccatggatctatatctctgttttggtaccagtaccatgctgttttggttactgtagccttgtggtatactttgaagtcaggtcgtgtgatgcctccagctttgttcttttggcttaggattaacttggcgatgtgggctctttgttggttccatatgaactttaaagtagttttttccaattctgtgaagaaagtcattggtagcttgatggggattgcattgaatctgtaaattaccttgggcagtatggccattttcacgatattgattcttcctacacatgagcatggaatgttctcccatttgtttgtatcctcttttatttccttgagcagtggtgtgtagttctccttgaagaggtccttcacgtcccttgtaagttggattcctaggtattttattctctttgaagcaattgtgaatgggagttcactcatgatttggctctctgtttgtctgttactggtgtataagaatgcttgtgatttttgtacattgattttgtatcctgagactttggtgaagttgcttatcagcttaaggagattttgggctgagaaaatggggttttccagatatacaatcatgtcatctgcaaacagggacaatttgacttcctcttttcctaattgaataccctttatttccttctcctgcctaattgccctggccagaacttccaacactatgttgaataggagtggtgagagagggcatccctgtcttgtgccagttttcaaagggagtgcttccagtttttgcccattcagtatgatattggctgtgggtttgtcatagatagctcttattattttgagatacatcccatcaatacttaatttattgagagtttttagcatgaagggttgttgaattttgtcgaaggccttttctgcatctattgagataatcatgtggtttttgtctttggttctgtttatatgctggattacatttattgattttcgtgtattgaaccagccttgcatcccagggatgaagcccacttgatcatggtggataagctttttgatgtgctgctggatttggtttgccagtattttattgaggatttttgcatcaatgttcatcaaggatattggtctaaaattctcttttttggtggtgtctctgctaggctttggtatcaggatgatgctggccttataaaatgagttagggaggattccctctttttctattcattggaatagtttcagaaggaatggtactagatcctccttgtacttctggtagaattcggctgtgaatccatctggtcctggactctttttggttcgtaagctattgattattgccacaatttcagctcctgttattggtctattcagagattcaacttcttcctggtttagtcttgggagagtgtatatgtcgaggaatttatccatttcttctagattttctactttatttgcggagaggtgtttgtagtattctctgatggtagtttgtatttctgtgggattggtggtgatatcccctttatcattttttattgcatctatttgattcttctctctttttttctttattagtcttgctagcagtctatcaattttgttgatcctttcaaaaaactagctcctagattcattaattttttgaagggttttttgtgtctctatttccttcagttctgctctgattttagttatttcttgccttctgctagcttttgaatgtgtttgctctggcttttctagttcttttaattgtgatgttagggtgtcaattttggatctttcctgctttctcttgtgggcatttagtgctataaatttccctctacacactgctttgaatgtgtcccagagattctggtatgttgtgtctttgttctcattggtttcaaagaacatctttatttctgccttcatttcgttatgtacccagtagtcattcaggagcaggttgttcagtttccatgtagttgagcagttttgagtgagattcttaattctgagttctagtttgattgcactgtggtctgagagatagtttgttataatttctgttcttttacatttgctgaggagagctttacttccaagtctgtggtcaattttggaataggtgtggtgtggtgctgaaaaaaatgtatattctgttgatttggggtggagagttctgtagatgtctattaggtccacttggtgcagagctgagttcaattcctgggtatccttgttgactttttgtctcgttgatctctctaatgttgacaatggggtgttaaagtctcccattattaatgtgtgggagtctaagtctctttgtaggtcgttcaggacttgctttatgaatctgggtgctcctgtattgggtgcatatatatttatgatagttagctcttcttgttgaattgatccctttaccattaagtaatggccttctttgtctcttttgatctttgttggtttaaagtctgttttatcagagactaggattgcaacccctgcatttttttgttttccatttgcttggtagatcttcctccatccttttattttgagcctatgtgtgtctctgcacatgagatgggtttcatgaatgcagcacactgatgggtcctgactctttatccaatttgccagtctgtgtcttttaattggagcatttagtccatttacatttaaagttaatat

SEQ ID NO: 10474 - DNA, 6177 bp, Homo sapiens
tttcagattttttttattattattatactttaagttttagggtacatgtgcacaatgtgcaggttagttacatatatatacatgtgccatgctggtgtgctgcacccattaactcgtcatttagcattaggtatatctcctaatgctatccctccccccttcccccaccccacaacagtccccagagtgtgatgttccccttcctgtgtccatgtgttctcattgttcaattcccatctatgagtgagaatatgcggtgtttggttttttgttcttgcgatagtttactgagaatgatgatttccaatttcacccatgtccctacaaaggacatgaactcatcattttttatggctgcatagtattccatggtgtatatgtgccacattttcttaatccagtctatcattgatggacatttgggttggttccaagtctttgctattgtgaatagtaccgcaataaacatatgtgtacatgtgtctttatagcagcatgattggtagtcctttgggtatatacccagtaatgggatggctgggtcaaatggtatttctagttctagatccctgaggaatcgccacactgacttccacaatggttgaactagtttacagttccaccaacagtgtaaaagtgttgctatttctccacatcctctccagcacctgttgtttcctgactttttgatgattgccattctaactggtgtgagatgatatctcattgtggttttgatttgcatttctctgatggccagtgatggtgagcattttttcatgtgttttttggctgcataaatgtcttcttttgagaagtgtctgttcatatcctttgcccactttttgatggggttgtttgtttttttcttgtaaatttgtttgagttcattgtagattctggatattaaccctttgtcagatgagtaggttgcgaaaattttctcccattttgtaggttgccgattcattctgatgatagtttcttttgctgtgcagaagctctttcatttaattagatcccatttgtcaattttggcttttgttgccattgcttttggtgttttagacatgaagtccttgcccatgcctatgtcctgaatggtaatgcctaggttttcttctagggtttttatggttttaggtctaacatttaagtctttaatccatctggaattaatttttgtataaggtgtaaggaagggatccagtttcagctttctacatatggctagccagttttcccagcaccatttattaaatagggaatcctttccccattgcttgtttttctcaggtttgtcaaagatcagatagttgtagatatgcggcgttatttctgagggctctgttctgttccattgatctatgtctctgttttggtaccagtaccatgctgttttggttactgtagccttgtagtatagtttgaagtcaggtagcatgatgcctccagctttgttcttttggcttaggattgacttggcgatgtgggctcttttttggttccatatgaactttaaagtcgttttttccaattctgtgaagaaagtcattggtagcttgatggggatggcatcgaatgtgtaaaataccttgggcagtatggccattttcacgatattgattcttcctacccatgagcatggaatgttcttccatttctttgtatcctcttttatttccttgagcagtggtttgtagttctccttgaagaggtccttcatgtcccttgtaggttggattcctaggtattttattctctttgaagcaattgtgaatgggagttcactcatgatttggctctctgtttgtttgttattggtgtataagaatgcttgtgatttttgtacattgattttgtatcctgagactttgctgaagttgcttatcagcttaaggagattttgggctgagacaatggggttttctagatatacaatcatgtcatctgcaaacagggacaatttgacttcctcttttcctaattgaataccctttatttccttctcctgcctaattgccctggccagaacttccaacactatgttgaataggagtggtgagagagggcatccctgtcttgtgccagttttcaaagggaatgcttccagtttttgccctttcagtatgatattggctatgggtttgtcatagatggctcttattattttgagatacgtcccatcaatacctaatttattgagagtttttagcatgaagggttgttgaattttgtcaaaggccttttctgcatctattgagataatcatgtggtttttgtctttggttctgtttatatgctggattacatttattgatttgcatatatcgaaccagccttgcatcccagggatgaagctctcttgatcatggtggataagctttttgatgtgctgctggatttggtttgccagtattttattgaggatttttgcatcaatgttcatcaaggatattggtctaaaattctcttctttggttgtgtctctgcccggctttggtatcaggatgatgctggcctcataaaatgagttagggaggattccctctttttctattgattggaatagtttcagaaggaagcataccagttcctccttgtacctctggtagaattcggctgtgaatccatctggtcctggactctttttggttggtaagctattgattattgccacaatttcagagcctgttattggtctattcagagattcaacttcttcctggtttagtcttgggagggtgtatgtgtccaggaatttatccatttcttctagattttccagtttatttgcgtagaggtgtttgtagtattctctgatggtagtttgtatttctgtgggattggtggtgacatccccgttatcattttttattgtgtctatttgattcttctctcttttcttctttattagtcttgctagtggtctatcaattttgttgatcctttcaaaaaaccagctcctggatgcattaattttttgaagggttttttgtgtctctatttccttcagttctgctctgattttagttatttcttgccttctgctagcttttgaatgtgtttgctcttgcttttctagttctttcaactgtgatgttagggtgtcaattttggatctttcctgctttctcttgtgggcatttagtgctataaatttccctctacacactgctttgaatgtgtcccagagattctggtatgttgtgtctttgttcttgttggtttcaaagaatatctttatttctgccttcatttcgttatgtacccagtagtcattcaggagcaggttgttcagtttccatgtagttgagcggttttgagtgagtttcttaatcctgagttccagtttgattgcactgtggtctgacagacagtttgttataatttctgttctcttatatttgctgaggagagcttcacttccaagtatgtggtcaattttggaataggtgtggtgtggtgctgaaaaaaatgtatattctgttgatttggggtggagagttctgtagatgtctattaggtccacttggtgcagagctgagttcaattcctgggtatccttgttaactttctgtctcgttgatctgtctaatgttgacagtggggtgttaaagtctcccattattattgtgtgggaatctaagtctctttgtaggtcactcaggacttgctttatgaatctggatgctcctgtattgggtgcatatatatttcggatagttagctcttcttgttgaattgatccctttaccattatgtaatggccttctttgtctcttttgatctttgttggtttaaagtctgttttatcagagactaagattgcaacccctgcctttttttgttttccatttgcttggtggatcttcctccatccttttattttgagcctatgtgtgtctctgcacctgagatgggtttcctgaatacagcacactgatgggtcttgactctttatccaatttgccagtctgtgtcttttgattggagcatttagtccatttacatttaaagttaatattgttatgtgtgaatttgatcctggcattatgatgttagctggttattttgctcgttagttgatgcagtttcttcctagctttgatggtctttacattttggcatgattttgcagtggctggtaccggttgttcctttccatgtttagcgcttccttcaggagctcttttagggcaggcctggtggtgacaaaatctctcagcatttgcttgtctgtaaagtattttatttctccttcacttatgaagcttagtttggcaggatatgaaattctgggctgaaaattcttttctttaagaatgttgaatattggcccccactctcttctggcttgtagattttctgctgagagatctgctattagtctgatgggcctccctttgtgggtaacccgacctttctctctggctgcccttaacattttttccttcatttcaactttggtgaatctgacaattatgtttcttggagttgctcttctcgaggagtatctttgtggtgttctccgtatttcctgaatctgaatgttggcctgccttgctagattggggaagttctcctggataatatactgcacagtgttttccaacttggttccattctccccgtcactttcaggtacaccagtcagacttagatttggtcttttcacatagtcccatatttcttggaggctttgtttgtttctttttattcttttttctctcaacttcccttctcgcttcatttcattcatttgatcttccatcactgataccctttcttccagttgatcgcattggctcctgaggcttctgcattcttcacgtagttctcgagccttggctttcagctccatcagcgcctttaagcacttctctgtagtggttattctagttatacattcgtctaaatttttttcaaagtttttaacttcttcgcctttggtttgaatttcctcctgtagctcggagtagtttgatcgtctgaagccttcttctctcaactcatcaaagtcattctccatccagctttgttccgttgctggtgaggaactgcattcctttggaggaggagaggcattctgctttttagagtttccagtttttctgctctgtttcttccccatctttgtgtttttatctacttttggtctttgatgatggtgatgtacagatgggtttttggtgtggatgtcctttctgcttgttagttttccttctaacagacaggaccctcagctgcaggtctgttggagtttgctagaggtcccctccagaccctgtttgcctgggtatcagcagcggtggctgcagaacagcggattttcatgaacctcgaatgctgctgtgtgatcgttcttctggaatttttgtctcagaggagtacccagccgtgtgaggtgtcagtctgcccctactggggggtgcttcccggttaggctgctcgggggtcaggggtcagggacccacttgaggaggcagtctgcccgttctcagatctccagctgcatgctgggagaaccactgctctcttcaaagctgtcagacagggacatttaagtctgcagaggttactgctgtctctttgtctgtgccctgcccccagaggtggagcctacagaggcaggcaggcctccttgagctgtggtgggctccacccatttcgagcttcccggctgctttgtttacctaagcaagcctgggcaatggtgggcgcccctccctcagccttgctgccaccttgcagtttgatctcagactgctgtgctagcaatcagggggactccgtgggcataggaccctccaagccaggtgcgggatataatctcctggtgcgccgttttttaagcccgtcggaaaagtgcagtattagggtgggagtgacccgattttccaggtgctgtctgtcacccctttctttgactaggaaagggaactccccgaccccttgcgcttcccgagtgaggcaatgcctcgccctgcttcgtcttgcgcacggtgcgctgcacccactgtcctgcacccactgtctggtactccctagtgagatgaacctggtacctcagatggaaatgcagaaatcacccgtcttctgcgtcgctcatgctgggagctgtaaaccagagctgttcctattcggccatcttggctggcaatcccagatatttgt

SEQ ID NO: 10475 - DNA, 6032 bp, Homo sapiens
ttttttttttttattatactttaagttttagggtacatgtgcatattgtgcaggttagttacatatgtatacatgtgccatgctggtgcgctgcacccactaactcatcatctagcattaggtatatctcccaatgctatccctccccgctcccgccaccccaccacagtccccagagtgtgatattccccttcatgtgtccatgtgatctcattgttcaattcccacctatgagtgagaatatgcggtgtttgattttttgttcttgtgatagtttactgagaatgatgatttccaatttcatccatgtccctacaaaggacatgaactcatcattttttatggctgcatagtattccatggtgtatatgtgccacattttcttaatccagtctatcattgttggacatttgggttggttccaagtctttgctattgtgaataatgccgcaataaacacacgtgtgcatgtgtctttatagcagcatgatttatagtcctttgggtatatacccagtaatgggatggctgggtcaaatggtatttccagttctagatccctgaggaatcgccacactgacttccacaatggttgaactagtttacagtcccaccaacagtgtaacagtgttcctatttctccacatcctctccagcacctgttgtttcctgactttttaatgattgccattctaactggtgtgagatgatatctcatagtggttttgatttgcatttctctgatggccagtgatgaagagcattttttcatgtgttttttggctgcataaatgtcttcttttgagaagtgtctgttcatgtccttcgcccactttttgatggggttgtttgtttttttcttgtaaatttgtttgagttaattgtagattctggatattagcgctttgtcagatgagtaggttgcgaaaattttctcccattttgtaggttgcctgttcactctgatggtagtttcttttgctgtgcagaagctctttagtttaattagatcccatttgtcaattttggcttttgttgccattgcttttggtgttttggacatgaagtccttgcccatgcctatgtcctgaatggtaatgcctaggttttcttctagggattttatggttttaggtttaacgtttaaatctttaatccatcttgaattgatttttgtataaggtgtaaggaagggatccagtttcagctttctacatatggctagccagttttcccagcaccatttattaaatagggaatcctttccccattgcttgtttttctcaggtttgtcaaagatcagatagttgtaggtatgcggcgttatttctgagggctctgttgtgttccattgatctatatctctgttttggtaccagtaccatgctgttttggttactgtagccttgtagtatagtttgaagtcaggtagtgtgatgcctccagctttgttcttttggcttaggattgacttggcgatgtgggctcttttttggttccatatgaactttaaagtagttttttccaattctgtgaagaaagtcattggtagcttgatggggatggcattgaatctgtaaattaccttgggcagtatggccattttcacgatattgattcttcctacccatgagcatggaatgttcttccatttgtttgtatcctctttgatttccttgagcagtggtttgtagttctccttgaagaggtccttcacatcccttgtaagttggattcctaggtattttattctgtttgaagcaattgtgaatgggagttcactcatgatttggctctctgtttgtctgttgttggtgtataagaatgcttgtgatttttgtacattgattttgtatcctgagactttgctgaagttgcttatcagcttaaggagattttgggctgagatgatggggttttctagataaacaatcatgtcgtctgcaaacagggacaatttgacttcctcttttcctaattgaataccctttatttccttctcctgcctgattgccctggccagaacttccaacactatgttgaataggagcggtgagagagggcatccctgtcttgtgccagttttcaaagggaatgcttccagtttttgcccattcagtatgatattggctgtgggtttgtcatagatagctcttattattttgaaatacgtcccatcaattcctaatttattgagagtttttagcatgaagggttgttgaattttgtcaaaggctctttctgcatctattgagataatcatgtggtttttgtctttggctctgtttatatgctggattacatttattgatttgcatatattgaaccagccttgcatcccagggatgaagcccacttgatcatggtggataagcttcttgatgtgctgctggattcggtttgccagtattttattgaggatttttgcatcaatgttcatcaaggatattggtctaaaattctctttgttcattgtgtcgttgtccagctttggtatcaggatgatgctggcctcataaaatgagttagggaggattccctctttttctattcattggaatagtttcagaaggaatggtaccagttcctccttgtacctctggtagaatttggctgtgaatccatctggtcctggactctttttggttggtaaactattgattattgccccaatttcagctcctgttattggtctattcagagattcaacttcttcctggtttagtcttgggagagtgtatgtgttgaggaatgtatccatttcttctagattttctagtttatttgagtagaggtgtttgtagtattctatgatggtagtttgtatttctgtgggatcagtggtgatatcccctttatcattttttattgtgtctatttgattcttctctctttttttctttattagtcttgctagcggtctatcaattttgttgatcctttcgaaaaaccagctcctggattcattgattttttgaagggttttttgtgtctctatttccttcagttctgctctgattttagttatttcttgccttctgctagcttttcaatgtgtttgctcttgcttttctagttcttttaattgtgatgttagggtgtcaattttggatctttcctgctttctcttgtgggcatttagtgctataaatttccctctacacactgctttgaatgcatcccagagattctggtatgttgtgtctttgttctcgttggtttcaaagaacatctttatttctgccttcatttcattatgtacccagtagtcattcaggagcaggttgttcagtttccatgtagttgagcggctttgagtgagattcttaatcctgagttctagtttgattgcactgtggtctgagagatagtttgatataatttctgttcttttacatttgctgaggagagctttacttccaagtatgtggtcaattttggaataggtgtggtgtggtgctgaaaaaaatgtatattctgttgatttggggtggagaattctgtagatgtctattaggtccgcttggtacagagctgagttcaattcctgggtattcttgttgactttctgtctcgttgatctgtctaatgttgacagtggggtgttaaagtctcccattattaatgtgtgggagtctaagtctctttgtaggtcactcaggacttgctttatgaatctgggtgctcctgtattgggggcatatatatttaggatagttagctcctcttgttgaattgatccctttaccattatgtaatggccttctttgtctcttttgatctttgttggtttaaagtctgttttatcagagactaggattgcaacccctgcctttttttgttttccatttgcttggtagatcttcctccatccttttattttgagcctatgtgtgtctctgcatgtgagatgggtttcctgaatacagcacactgatgggtcttgactctttatccaacttgccagtctgtgtcttttaattggagcatttagtccatttacatttaaagttaatattgttatgtgtgaatttgatcctgtcattatgatgttagctggtgattttgctcgttagttgatgcagtttcttcctagtctcgatggtctttacattttggcatgattttgcagcggctggtaccggttgttcctttccatgtttagtgcttccttcaggagctcttttagggcaggcctggtggtgacaaaatctctcagcatttgcttgtctgtaaagtattttatttctccttcacttatgaagcttagtttggctggatatgaaattctgggttgaaaattcttttctttaagaatgttgaatattggcccccactctcttctggcttgtagggtttctgccgagagatccgctgttagtctgatgggcttccctttgagggtaacccgacctttctctctggctgcccttaacattttttccttcatttcaactttggtgaatctgacaattatgtgtcttggagttgctcttctcgaggagtatctttgtggcgttctctgtatttcctgaatctgaatgttggcctgccttgctagattggggaagttctcctggataatatcctgtagagtgttttccaacttggttccattcttcccatcactttcaggtacaccaatcagatgtagatttggtcttttcacatagtcccatatttcttggaggctttgctcatttctttttattcttttttctctaaccttcccttctcgcttaatttcattcatttcatcttccatcgctgataccctttcttccagttgatcgcatcggctcctgaggcttctgcattcttcacgtagttctcgagccttggttttcagctccatcagctcctttaagcacttctctgtattggttattctagttatacattcttctaaatttttttcaaagttttcaacttctttgcctttggtttgaatgtcctcccgtagctcagagtaatttgatcgtctgaagccttcttctctcagctcatcaaagtcattctccatccagctttgttccgttgctggtgaggaactgcgttcctttggaggaggagaggtgctctgcgttttagagtttccagtttttctgttctgttttttccccatctttgtggttttatctacttttggtctttgatgatggtgatgtacagatgggtttttggtgtggatgtcctttctgtttgttagttttccttctaacagacagcaccctcagctgcaggtctgttggaataccctgccgtgtgaggtatcagtgtgcccctgctggggggtgcctcccagttaggctgctcgggggtcaggggtcagggacccacttgaggaggcagtctgcccgttctcagatctccagctgcgtgctgggagaaccactgctctcttcaaagctgtcagacagggacatttaagtctgcagaggttactgctgtcttttcgtttgtctgtgccctgcccccagaggtggagcccacagaggcaggcaggcctccttgagctgtggtgggctccacccagttcgagcttcccggctgctttgtttacctaatcaagcctgggcaatggcgggcgcccctcccccagcctcgctgccgccttgcagtttgatctcagactgctgtgctagcaatcagcgagattccgtgggcgtaggaccctccgagccaggtgtgggatatagtctcgtggtgcgccgttttttaagccggtctgaaaagcgcaatattcgggtgggagtgacccgattttccaggtgcgtccgtcacccctttctttgactcggaaagggaactccctgaccccttgcccttcccaggtgaggcaatgcctcgccctgcttcggctcgcgcccagtgcgtgcacccactggcctgcgcccactgtctggcactccctagtgagatgaacccggtacctcagatggaaatgcagaaatcacccgtcttctgcgtcgctcacgctgggagctgtagaccagagctgttcctattcggccatcttggctcctcctcct

SEQ ID NO: 10476 - DNA, 6093 bp, Homo sapiens
acatgaatacatttattcacttcctctttttttttttttaaatttttttttttttttattatactctaagttttagggtacatgtgcacattgtgcaggttagttacatatgtatacatgtgccatgctggtgcgctgcacccactaacgtgtcatctagcattaggtatatctcccaatgctatccctcccccctcccccgaccccaccacagtccccagagtgtgatattccccttcctgtgtccaagtgatctcattgttcagttccaacctatgagtgacaatatacggtgtttggttttttgttcttgcgatagtttactgagaatgatggtttccaatttcatccatgtccctacaaaggacatgaactcatcattttttatggctgcatagtattccatggtgtatatgtgccacattttcttaatccagtctatcattgttggacatttgggttggttccaagtctttgctattgtgaatagtgccacaataaacatacgtgtgcatgtgtctttatagcagcatgatttatagtcatttgggtatatactatatggctgggtcaaatggtatttctagttctagatccctgaggaatcgccacactgacttccacaatggttgaactagtttacagtcccaccaacagtgtaaaagtgtccctatttctccacatcctctccagcacctgttgtttcctgactttttaatgattgccattctaactggtgtgagatgatatctcatagtggttttgatttgcatttctctgatggccagtgatgatgagcatttcttcatgtgttttttggctgcataaatgtcttcttttgagaagtgtctgttcatgtccttcgcccattttttgatggggttgtttgtttttttcttgtaaatttgtttgagttcattgtagattctggatattagccctttgtcagatgagtaggttgcgaaaactttctcccatgttgtaggttgcctgttcactctgatggtagtttcttttgctgtgcagaagctctttagtttaattagatcccatttgtcaattttggcttttgttgccattgcttttggtgttttagacatgaagtccttgcccacgcctatgtcctggatggtaatgcctaggttttcttctagggtttttatggttttaggtctaacgtttaaatctttaatccatcttgaattgatttttgtataaggtgtaaggaagggatccagtttcagctttctacatatggctagccagttttcccagcaccatttattaaatagggaatcctttccccattgcttgtttttctcaggtttgtcaaagatcagatagttgtagatatgtggcattatttctgagggctctgttctgttccattgatctatatctctgttttggtaccagtaccatgctgttttggttactgtagccttgtagtatagtttgaagtcaggtagtttgatgcctccagctttgttcttttggcttaggattgacttggcgatgcgggctcttttttggttccatatgaactttaaagtagttttttccaattctgtgaagaaagtcattggtagcttgatggggatggcattgaatctgtaaattaccttgggcagtatggccattttcacgatattgattcttcctacccatgagcatggaatgttcttccatttgtttgtgtcctcttttatttccttgagcagtggtttttagttctccttgaagaggtccttcacgtcccttgtaagttggactcctaggtattttattctctttgaagcaattgtgaatgggagttcactcatgatttggctctctgtttgtctgttgttggtgtataagaatgcttgtgatttttgtacattgattttgcatcctgagactttgctgaagttgcttatcagcttaaggagattttgggctgagacgatggggttttctagataaacaatcatgtcgtctgcaaacagggacaatttgacttcctcttttcctaattgaataccctttatttccttctcctgcctgattgccctggccagaacttccaacactatgttgaataggagcggtgagagagggcatccctgtcttgtgccagttttcaaagggaatgtttccagtttttgcccattcagaatgatattggctgtgggtttgtcatagatagctcttattattttgaaatacgtcccatcaatacctaatttattgagagtttttagcatgaagggttgttgaattttgtcaagggctttttctgcatctattgagataatcatgtggtttttgtctttggctctgtttatatgctggattgcatttattgatttgcgtatattgaaccagccttgcatcccagggatgaagcccacttgatcatggtggataagctttttgatgtgctgctggatttggtttgccagtattttattgaggatttttgcatcaatgttcatcaaggatattggtctaaaattctcttttttggttgtgtctctgcccggctttggtatcagaatgatgctggcctcataaaatgagttagggaggattccctctttttctattgattggaatagtttcagaaggaatggtaccagttcctccttgtacctctggtagaattcggctgtgaatccatctggtcctggactctttttggttggtaaactattgattattgccacaatttcagagcctgttattggtctattcagagattcaacttcttcctggtttagtcttgggagagtgtatgtgtcgaggaatgtatccatttcttctagattttctagtttattagcgtagaggtgtttgtagtattctctgatgatagtttgtatttctgtgggatcggtggtgatatcccctttatcattttttattgtgtctatttgattcttctctctttttttctttattagtcttgctagcggtctatcaattctgttgatcctttcaaagaaccagctcctggattcattgattttttgaagggttttttgtgtctctatttccttcagttctgctctgattttagttatttcttgccttctgctagcttttgaatgtgtttgctcttgcttttctagttcttttaattgtgatgttagggtgtcaattttggatctttcctgctttctcttgtaggcatttagtgctataaatttccctctacacactgctttgaatgcgtcccagagattctggtatgtggtgtctttgttctcattggtttcaaagaacatctttatttctgccttcatttcgttatgtacccagtagtcattcaggagcaggttgttcagtttccatgtagttgagtggctttgagtgagattcttaatcctgagttctagtttgattgcactgtggtctgagagatagtttgttataatttctgttcttttacatttgctgaggagagctttacttccaactatgtggtcaattttggaataggtgtggtgtggtgctgaaaaaaatgtatattctgttgatttggggtggagagttctgtagatgtctattaggtctgcttggtgcagagctgagttcaattcctgggtatccttgttgactttctgtctcgttgatctgtctaatgttgacagtggggtgttaaagtctcccattattaatgtgtgggagtctaagtctctttgtaggtcactcaggacttgctttatgaatctgggtgctcctgtattgggtgcataaatatttaggatagttagctcctcttgttgaattgatccttttaccattatgtaatggccttctttgtcttttttgatctttgttggtttaaagtctgttttatcagagactaggattgcaacccttgcctttttttgttttccattggcttggtagatcttcctccatccttttattttgagcctatgtgtgtctctgcacgtgagatgggtttcctgaatacagcacactgatgggtcttgactctttatccaacttgccagtctgtgtcttttaattgcagaatttagtccatttatatttaaagttaatattgttatgtgtgaatttgatcctgtcattatgatgttagctggtgattttgctcattagttgatgcagtttcttcctagtctcgatggtctttacattttggcatgattttgcagcggctggtaccggttgttcctttccatgtttagcgcttccttcaggagctcttttagggcaggcctggtggtgacaaaatctctcagcatttgcttgtctataaagtattttatttctccttcacttatgaagcttagcttggctggatatgaaattctaggttgaaaattcttttctttaagaatgttgaatattggcccccactctcttctggcttgtagggtttctgccgagagatccgctgttagtctgatgggctttcctttgagggtaacccgacctttctctctggctgcccttaacattttttccttcatttcaactttggtgaatctgacaattatgtgtcttggagttgctcttctcgaggagtatctttgtggcgttctctgtatttcctgaatctgaacgttggcctgccttgctagattggggaagttctcctggataatatcctgcagagtgttttccaacttggttccattctccacatcactttcaggtacaccaatcagacgtagatttggtcttttcacatagtcccatatttcttggaggctttgctcatttctttttattcttttttctctaaacttcccttctcgcttcatttcattcatttcatcttccattgctgataccctttcttccagttgatcgcatcggctcctgaggcttctgcattcttcacgtagttctcgagccttggttttcagctccatcagctcctttaagcacttctctgtattggttattctagttatacattcttctaaatttttttcaaagttttcaacttctttgcctttggtttgaatgtcctcccatagctcagagtaatttgatcgtctgaagccttcttctctcagctcgtcaaagtcattttccatccagctttgttctgttgctggtgaggaactgcgttcctttggaggaggagaggcgctctgcattttagagtttccagtttttctgttctgttttttccccatctttgtggttttatctacttttggtctttgatgatggtgatgtacagatgggttttcggtgtagatgtcctttctggttgttagttttccttctaacagacaggaccctcagctgcaggtctgttggaataccctgccgtgtgaggtgtcagtgtgcccctgctggggggtgcctcccagttaggctgcttgggggtcaggggtcagggacccacttgaggaggcagtctgcccattctcagatctccagctgcgtgctgggagaaccactgctctcttcaaagctgtcagacagggacacttaagtctgcagaggttactgctgtctttttgtttgtctgtgccctgcccccagaggtggagcctacagaggcaggcaggcctccttgagctgtggtgggctccacccagttggagcttcccagctgctttgtttacctaatcaagcctgggcaatggcgggcgcccctcccccagcctcgctgccgccttgcagtttgatctcagactgctgtgctagcaatcagcgagattccgtgggcgtaggaccctctgagccaggtgtgggatatagtctcgtggtgcgccgtttcttaagccggtctgaaaagcgcaatattcgggtgggagtgacccgattttccaggtgcgtccgtcacccctttctttgactcggaaagggaactccctgaccccttgcgcttcccaggtgaggcaatgcctcgccctgcttcggctcgcgcacggtgcgcacacacactggcctgcgcccactgtctggcactccctagtgagatgaacccggtacctcagatggaaatgcagaaatcacccgtcttctgcgtcgctcacgctgggagctgtagaccggagctgttcctattcggccatcttggctcctccctaacacattctttagaggaagatgaga

SEQ ID NO: 10477 - DNA, 6055 bp, Homo sapiens
ttgttttattttttatttttttattttttttatttttttaaattatactttaagttttagggtacatgtgcacattgtgcaggttagttacatatgtatacatgtgccatgctggtgtgctgcactcactaactcgtcgtctagcattagttgtatttcccaatgctatccctcccccctccccccaccccacaacagtccccagagtgtgatattccccttcctgtgtccatgggatctcattgttcaattcccacctatgagtgagaatatgcagtgtttggttttttgttcttgcggtagtttactgagaatgatgatttccaatttcatccatgtccctacaaaggacatgaactcatcattttttatggctgcatagtattccatggtgtatatgtgccacgttttcttaatccagtctatcattgttggacatttgggttggttccaagtctttgctattgtgaataatgccacaataaacatacgtgtgcatgtgtctttatagcagcatgatttatagtcctttgggtatatgcccagtaatgggatggctgggtcaaatggtatttctagttctagatccctgaggaatcgccacactgacttccacaatggttgaactagtttacagtcccaccaacagtataaaagtgttcctatttctccacatcctctccagcacctgttgtttcctgactttttaatgattgccattgtaactgatgtgagatggtatctcattgtggttttgatttgcatttctctgatggccagcgatgatgagcattttttcatgtgttttttggctgcataaatgtcttcttttgagaagtgtctgttcatgtcctttgcccactttttgatggggttgtttgttttttcttgtaaatttgtttgagttcattgtagattctggatattagccctttgtcagatgagtaggttgtgaaaattttctcccattttgtaggttgcctgttcactctgatggtagtttcttttgctgtgcagaagctctttagtttaattagatcccatttgtcaattttgtcttttgttgtcattgcttttggtgttttggacatgaagtccttgcccatgtctatgtcctgaatggtaatgcctaggttttcttctagggtttttatggttttaggtctaatgtctaactctttaatccatcttgaattgatttttgtataaggtgtaaggaagggatccagtttcagctttctacatatggctagccagttttcccagcaccatttattaaatagggaatcctttccccattgcttgtttttgtcaggtttgtcaaagatcagatagttgtagatatgcggcattatttctgagggctctgttctgttccattgatctatatctctgttttggtaccagtaccatgctgttttggttactgtaaccttgtagtatagtttgaagtcagatagtgtgatgcctccagctttgttcttttggcttaagattgacttggcgatgcaggctcttttttggttccatatgaactttcaagtagttttttccaattctgtgaagaaagtccttggtagcttgatggggatggcattgaatctgtaaattaccttgggcagtatggccattttcacgatattgattcttcctacccatgagcatggaatgttcttccatttgtttgtatcctcttttatttccttgagcagtggtttgtagttctccttgaagaggtccttcacatcccttgtaagttggattcttaggtattttattctctttgaagcaattgtgaatgggagttcactcatgatttggctctctgtttgtctgttgttggtgtataagaatgcttgtgatttttgtacattgattttgtatcgtgagactttgctgaagttgcttatcagcttaaggagattttgtgctgagacaatggggttttctagatatacaatcatgtcatctgcaaacagggacaatttgacttcctattttcctaattgaataccctttatttccttctcctgcctaattgccctggccagaatttccaacactgtgttgaataggagtggtgagagaaggcatccctgtcttgtgccagttttcaaagggaatgcttccagtttttgcccattcagtatgatattggctgtgggtttgtcatagatagctcttattattttgaaatacgtcccatcaatacctaatttgttgagagtttttagcatgaagggttgttgaattttgtcaaaggttttttctgcatctattgagataatcatgtggtttttgtctttggctctgtttatatgctggattacatttattgatttgcatatattgaaccagccttgcatgccagggatgaagcccacttgatcatggtggataagctttttgatgtgctgctggattcggtttgccagtattttattgagggtttttgcatcaatgttcatcaaggatattggtctataattctcttttttggttgtgtctctgcccagctttggtatcagaatgatgctggcctcacaaaatgagttagggaggattccctctttttctattgtttggaatagtttcagaaggaatggtactagtccctccttgtacctctggtagaattcagctgtgaatccatctggttctggactctttttggttggtaaactattgattattgccacaatttcagatcctgttattggtctattcagagattcaacttcttcctggtttagtcttaggagagtgtatgtgtcgaggaatttatccatttcttctagattttctagtttatttgcgtagaggtgtttgtagtattctctgatggtagtttgtatttctgtgggatcggtggtgatatcgcctttatcattttttattgcgtctatttgattcttccctctttttttctttattagtcttgctagcagtctatcaattttgttgatcctttcaaaaaaccagctcctggattcattgattttttgaagggttttttgtgtctctatttccttcagttctgctctgattttagttatttcttgccttctgctagcttttgaatgtgtttgctcttgcttttctagttcttttaattgtgatgttagggtgtcaattttggatctttcctgctttctcttgtgggcatttagtgctataaatttccctctacacactgctttgaatgcgtcccagagattctggtatgttgtgtctttgttctcattggtttcaaagaacatctttatttctgccttcatttcgttatgtacccagtagtcattcaggagcaggttgttcagtttccatgtagttgagcggttttgagtgagattcttaatcctgagttctagttgaattgcactgtggtctgagagatagtttgttacaatttctgttattttacatttgctgaggagagctttacttccaactatgtggtcaattttggaataggtgtggtgtggtgctgaaaaaaatgtatattctgttgatttggggtggagagttctgtagatgtctattaggtccacttggtgcagagctgagttcaattcctgggtatctttggttgactttctgtctcgttgatctgtctaatgttgacagtggggtgttaaagtctcccattattaatgtgtgggagtctaagtctctttgtaggtcactcaggacttgctttatgaatcttggtgctcctgtattgggtgcatatatatttaggatagttagctcttcttgttgcattgatccctttaccattatgtagtggccttctttgtctcttttgatctttgttggtttaaagtttgttttatcagagacgaggattgcaacccctgcctttttttgttttccatttgcttcgtagatcttcctccatccctttattttgagcctatgtgggtctctgcacgtgagatgggtttcctgaatacagcacactgatgggtcttgactctttatccaatttgccagtctgtgtcttttaattggagaatttggtccatttacatttaaagttaatactgttatgtgtgaatttgatcctgtcattatgatgttagctggttattttgctcgttagttgatgcagtttcttcctattctcgatggtctttacattttggcatgattttgcagcggctggtactggttgttcctttccatgtttagtgcttccttcaggagctcttttagggtaggcctggtggtgacaaaatctctcagcatttgcttgtctgtgaagtattttatttctccacttatgaagcttagtttggctggatatgaaattctgggttgaaaattcttttctttaagaatgttgaatattggcccccactctcttctggcttgtagggtttctgccgagagatccgctattagtctgatgggcttccctttgagggtaacccgacctttctctctggctgcccttaacattttttccttcatttcaactttggtgaatctgacaattatgtgtcttggagttgctcttctcgaggagtatctttgtggcgttctctgtatttcctgaatctgaacgttggcctgccctgctagattgtggaagttctcctgaataatatcctgcagagtgttttccaacttggttccattctccccatcactttcaggtacaccaatcagacgtagatttggccttttcacatagtcccatatttcttggaggctttgttcatttctttttattcttttttctctaaacttcccttctcgcttcatttcattcatttcatcttccattgctgataccctttcttccatttgattgcatcggctcctgagtcttctgcattcttcacgtagttctcgagccttagttttcagctccatcagctcctttaagcacttctctgtattggttattctagttatacattcttctaaatttttttcaaagttttcaacttctttgcctttggtttgaatgtcctcccatagctcagaggaatttgatcgtgtgaagccttctctcagctcgtcaaagtcattctccatccagctttgttccgttgctggtgaggaactgcgttcctttggaggaggagaggcgctctgcgttgtagagtttccagtttttctgttctgttttttccccatctttgtggttttatctacttttggtctttgatgatggtgatgtacagatgggttttcggtgttgatgtcctttctctttgttagttttccttctaacagacaggaccctcagctgcaggtctgttggaataccctgctgtgtgaggtgtcagtgtgcccctgctggggggtgcctcccagttaggctgctcgggggtcaggggtcagggacccacttgaggaggcagtctgctggttctcagatctccagctgcgtgctgggagaaccactgctctcttcaaagctgtcagacagggacatttaagtctgcagaggttactgctgtctttttgtttgtctgtgccctgcccccagaggtggagcctacagaggcaggcaggcctccttgagctgtggtgggctccacccagttcgagcttcccggctgctttgtttacctaagcaagcctgggcaatggcgggcgcccctctcccagcctcgctgccgccttgcagtttgatctcagactgctgtgctagcaatcagtgagattccgtgggcgtaggaccctccgagccaggtgcgggatataatctcgtggtgcaccgttttttaagccggtgtgaaaagcgcaatattcgggtgggagtgacccgattttccaggtgcgtccgtcacccctttctttgacttggaaagggaactccctgactccttgcacttcccaagtgaggcaatgcctcgccctgcttcggctcgcgcacggtgcgcgcacccactggcctgggcccactgtctggcactccctagtgagatgaaccgggtacctcagatggaaatgcagaaatcacccatcttctgcttccctcaggctgggagctgtagaccggagctgttcctattcggccatcttggctcctctctct

SEQ ID NO: 10478 - DNA, 5791 bp, Homo sapiens
tcttttttatttatttatttatttatttatttatttatttatttattattattataagttttagggtacgtgtgcacaatgtgcaggttagttacatatgtatacctgtgccatgctggtgtgctgcacccactaactcctcatctagcattaggtatatctcccaatgctatccctcccccctccccccaccccacaatagtccccagagtgtgatgttccccttcctgtgtccatgtgttctcattgttcaattcccacctatgagtgagaacatgcggtgtttggttttttgtccttgcgatagtttactgagattgatgatttccaatttcatccatgtccctacaaaggacatgaactcatcattttttatggctgcatagtattccatggtgtatatgtgccacattttcttaatccagtctatcattgttgggcatgtgggttggttccaagtctttgctattgtgaatagtgccacaataaacatacgtgtgcatgtgtctttatagcagcatgatttatagtccttttggtatatacccagtaatgggatggctgggtcaaatggtatttctagttctagatccctgaggaatcgccacactgacttccacaagggttgaactagtttacagtcccaccaacagtgtaaaagtgttcctatttctccacatcctctccagcacctgttgtttcctgactttttagtgattgccattctaactggtgtgagatggtatctcattgtggttttgatttgcatttctctgacggccagtgatggtgagcattttttcatgtgttttttggctgcataaatgtcttcttttgagaagcgtctgttcatgtcctttgcccactttttgatggggttgtttttttcttgtaaatttgtttgagttcattgtagattctggatattagccctttgtctgatgagtaggttgtgaaaattttctcccattttgtaagttgcctgttcactctggtggtagtttcttttgctgtgcagaagctctttagtttgattagatcccatttgtcaattttgacttttgttgccattgcttttggtgttttagacatgaagtccttgcccatgcctatgtcctgaatggtaatgcctaggttttcttctagggtttttatggttttaggtctaacatgtaagtctttaatccatcttgaattgatttttgtataaggtgtaaggaagggatccagtttcagctttctacctatggctagccacttttctcagcaccatttattaaatagggaatcctttccccattgcttgtttttctcaggtttgtcaaagatcagatagttgtagatatgtgacattatttttgagggcaccattctgttccattgatctatatgtctgttttggtaccagtaccatgctgttttggttactgtagccttgtagtatagtttgaagtcaggtagtgtgatgcctccggctttgttcttttggcttaggattgacttggcgatgcgggctcttttttggttccatatgaactttaaagtagttttttccaattctgtgaagaaagtcattggtagcttgatggggatggcattgaatctgtaaattaccttgggcagtatggccattttcacgatattgattcttcctacccatgagcatggaatattcttccatttctttgtatcctcttttatttccttgagcagtggtttgtagttctccttgaagaggtccttcacatccctagtaagttggattcctaggtattttattctctttgaagcaattgtgaatgggagttcactcatgatttggctctctgtttgtctgttgttggtgtataagaatgcttgtgatttttgtacattgattttgtatcctgagactttgctgaagttgcttatcagcttaaggagattttgggctgagacagtggagttttctagatatgcaatcatgttgtctgcaaacagcgacaatttgacttcctcttttcctaattgaataccctttatttccttctcctgcctaattgccctggccagaacttccaacactatgttgaataggagtggtgagagagggcaactctgtcttgtgccagttttgaaatggaatgcttccagtttttgcccattcagtatgatattggctgtgggtttgtcatagatagctcttattattttgaaatacgtcccatcaatacctaatttatttagagtttttagcatgaagggttgttgaattttgtcaaaggccttttctgcatctattgagataatcatgtggtttttgtctttggttctgtttatatgctggattacatttattgatttgcatatattgaaccagccttgcatcccagggatgaagcccacttgatcatggtggataagctttttgatgtgctgctggattcggtttgccagtattttattgaggatttttgcatcaatgttcatcaaggatactggtctaaaattatcttttttgtttgtgtctctgcccggctttggtatcaggatgatgctggcctcagaaaatgaattagggaggattccctctttttctattgattggaatagtttcagaaggaatggtaccagctcctccttgtacctctggtagaattcggctgtgaatccatctggtcctggactctttttggttggtaagctattgattattgccacaatttcagagcctgttattggtctattcagagagtcaacttcttcctggtttagtcttgggagagtgtatgtgtcaaggaatttatccatttcttctagattttctagtttatttgcatagaggtgtttgtagtattctctgatggtagtttgtatttctgtgggatcggtggtgatatcccctttatcattttttattgtgtctatttgattcttctctcttttcttctttatttgtcttgctagcggtctatcaattttgttgatcctttcaaaaaaccagctcctgggttcattaattttttgaagggttttttgtgtctctatttccttcagttctgctctgattttagttatttcttgccttctgctagcttttgtatgtgtttgctcttgcttttctagttcttttaattgtgatgttagggtgttaattttagatctttcctgctttctctcgtgggcatttagtgctataaatttccctctacacactgctttgaatgcgtcccagagattctggtatgttgtgtctttgttctcgttggtttcaaagaacatctttatttctgccttcatttcgttatgtacccagtagtcattcaggagcaggttgttcagtttccgtgtagttgagcggttttgagtgagattcttaatcctgagttctagtttgattgcactgtgttctgagagatagtttgttataatttctgttttttttacatttgctgaggacagcttttcttcctcaaaatgtggtcaattttggaataggtgtggtgtggtgctgaaaaaaatgaatattctgttgatttggggtggagagttctgtagatgtctattaggtccgcttggtgcagagctgaggtcaattcatgggtatccttgttaactttctgtctcgttgatctgtctaatgttgacagtggggtgttaaagtctcctattattattgtgtgggagtctaagtctttttgtatgtcactcaggacttgctttatgaatcttggtgctcctgtattgggtgcatatatatttaggatagttagctcttcttgttgaattgatccctttaccattatgtaatggccttctttgtctcttttgatctttgttggtttaaagtctgttttatcagagactaggattgcaacccctgcctttttttgttttccatttgcttggtagatcttcctccatctttttattttgagcctatgtgtgtctctgcacgtgagatgggtttcctgaatacagcacactgatgggtcgtgactctttatccaatttgccagtgtgtgtcttttaattggagcatttagtccatttacatttaaagttaatattgttatgtgtgaatttgatcctgtcgttatgatgttagctggttattttgctcgttagttgatgcagtttcttcctagtctctatggtctttacagtttggcatgattttacagcggctggtaccagttgttcctttccatgttttagcacttccttcaggagctcttttagggcaggcctggtggtgacaaaatctctcagcatttgcttgtctgtaaagtattttatttctccttcacttatgaagcttagtttggctggatatggaattctgggttgaaaattcttttctttgagaatgttgaatattgccccccactctcatctggcttgtagagttctgccgaaagatccactgttagtctgatgggcttccctttgagtgtaacccgacctttctctctggctgcccttaacatttttccttcatttcaactttggtgaatctgacaattatgtgtcttggagttgctcttcttgaggagtatctttgtggcgttctctgtatttcctgaatctgaatgttggcctgcctttctagattggggaagttctcctggataatatcctgcagagtgttttccaacttggttccattctccccgtcactttcaggtacatcaatcagacgtagatttggtcttttcacatagtcccatatttcttggaggctttgctcatttctttttattcttttttctctaaacttcccttctcgcttcatttcattcatttcatcttccattgctgataccctttcttccagttgatcgcaccggctcctgaggcttctgcattcttcacgtagttctcgagccttggttttcagctccatcagctcctttaagcacttctctgtattggttattctagttatacattcttctaaatttttttcaaagctttcaacttctttgcctttggtttgaatgtcctcccgtagcttggagtaatttgatcatctgaagccttcttctctcagttcgtcaaagtcatcctccgtccagctttgttccgttgctggtgaggaactgcgttcctttggaggaggagaggtgctctgctttttagagtttccagtttttctgctctgttttttccccatttttgtggttttatctacttttggtctttgatgatggtgatgtacagatgggtttttggtgtggatgtcctttctgtttgttagttttccttctaacagacaggaccctcagctgcaggtctgttggagtactgggccctgtgaggtgtcagtctgcccctgctggggggtgcctcccagttaggctgctcaggggtcaggggtcagggacccacttgaggaggcagtctgcccgttctcagatctccagttgcatgctgggagaaccactgctctcttcaaagctgtcagacagggacatttaagtctgcagaggtaactgctgtctttttgtttgtctgtgccctgcccccagaggtggagcctacagaggcaggcaggcctccttgagctgtggtgggctccacccagctcgcacttcccggatgctttgtttacctaagcaagcctgggcaatggcgggcgcccctcccccagcctcgctgccgccttgcagtttgatctcagactgctgtgctaggaatcagcgagattccttgggcataggaccctccgagccaggtgcaggatgtaatctcctggtgtgtggttttttaagcccgtcggaatagcgcagtatttgggtgggagtgaccc

SEQ ID NO: 10479 - DNA, 6948 bp, Homo sapiens
tcccaaagtgctgggattacaggcgggagccaccgcgcctggccccaaaattccttttttaaaccaatattctagtggcgcactattctccaacaattcccacattaaattgttgcatgacccctgtagtaaaaagcattactcagatctgacaaactcagacacccccagtttttacaaatttagtgacaccccctcaaagctaacagcattatcatataattgggaagagttgttcctaagagagaacatgagttccagagatgtataagaactatctatatgtgtaatctgtactgccagttagccccagaaatgccctggacacaaaatctgtccaagctgaaaacaaaatttgccatctctagcacatcattctgattcaggtggtctttactacaggacttttttcgtgtaacccttagcaagttgtttgaggctaagaagcgaagacctgagtctgaagcaaataaaagttatatacaacttttactgacatttttgaacacggatagtattaaaccaagggtcactgtgccaggaggggaaaaattaagtactgtaattatatatattgagctatcccaaggataaaggaatcactgtttactatgatagtgatctggaggtttaaaaaacaaaaaacaaaaacaaaacaaagaaaaccactcaaattgactgggccagaaatcttatttgctcttccttctccccaacagattattttgagttagttctatctaaggaatttacacccttgttcatttaagtcaccctaaagtggagtatttactcaatattggttactttctcactggagtattgacattttattttatttatttatttatttatttgcaatctatcacatgatctttaattaactaacagtacctcagggtaaatccaaaagctgttcttttttttttttttaatactttaagttttagggtacatgtgcacaatgtgcaggttagttacatatgtatacatgtgccatgctggtgcgctgcacccactaactcatcatctagcattaggtatatctcccaatgctatccctcccccctccccccaccccacaacagtccccagagtgtgatgttccccttcctgtgtccatgtgttctcattgttcagttcccacctatgagtgagaatatgcggtatttcgttttttgttcttgctatagtttactgagaatgatgatttccaatttcatccatgtccctacaaaggacgtgaactcatcattttttatggctgcatagtattccatggtgtatatgtgccacattttcttaatccagtctatcattgttggacatttgggttggttccaagtctttgctattgtgaatagtcccgcaataaacatacgtgtgcatgtgtctttatagcagcatgatttatagtcctctgggtatatacccagtaatgggatggctgggtcaaatggtatttctagttctaggtccctgaggaatcgccacactgacttccacaatggttgaactagtttacagtcccaccaacagtgtaaaagtgttcctatttctccacatcctctccagcacctgttgtttcctgacttttttatgattgccactctaactggtgtgagatggtatgtcattgtggttttgatttgcatttctctgatggccagtgatggtgagcattttttcatgtgttttttggctgcataaatgtcttcttttgagaagtgtctgttcatgtcctttgcccactttttgatggggttgtttgtttgtttcttgtaaatttgtttgagttctttgtagattctggatattagccctttgtcagatgagtaggttgcaaaaattttctcccattttgtaggttgcctgttcactctgatggtagtttcttttgccgtgcagaagctctttagtttaattagatcccatttgtcaattttggcttttgtagccattgcttttggtgttttagacatgaagtccttgcccatgcctatgtcctgaatgataatgcctaggttttcttctagggtttttatggttttaggtctaacatttaagtctttaatctatctttaattgatttttgtataaggtgtaaggaagggatccagtttcagctttctacatatggctagccagtttttccagcaccatttattaaatagggaatcctttccccattgcttgtttttctcaggtttgtcaaagatcagatagttgtagatatgcagtgttatttctgagggctctgttctgttccattgatctatatctctgttttggtaccactaccatgctgttttggttactgtagccttgtagtatagtttgaagtcaggtagtgtgatgcctccagctttgttcttttggctcaggattgacttggcaatgcgggctcttttttggttccatatgaactttaaagtagttttttccaattctgtgaagaaagtcattggtagcttgatggggatggcattgaatctgtaaattaccttgggcagtatggccattttcacgatattgattcttcctacccatgagcatggaatgttcttccatttgtttgtgtcctcttttatttccttgagcagtagtttgtagttctccttgaagaggtccttcacatcccttgtaagttggattcctaggtattttattctctttgaagcaattgtgaatgggagttcactcacgatttggctctctgtttgtctgttgttggtgtataagaatgcttgtgatttttgtacattgattttgtatcctgagactttgctgaagttgcttatcagcttaaggagattttgagctgagacaatggggttttgtagatatacggtcatgtcgtctgcaaacagggacaatttgacttcctcttttcctaattgaatactctttatttccttctcctgcctaattgtcctggccagaatttccaacactatgttgaataggagtggtgagagagggcatccctgtcttgtgccagttttcaaagggaatgcttccagtttttgcccattcagtatgatattggctgtgggtctgtcatagatagctcttatgattttgagatacgtcccatcaatacctaatttattgagagtttttagcatgaagggttgttgaattttatcaaaggccttttctgcatctattgagataatcatgtggtttttgtctttggttctgtttatatgctggattacatttattgatttgcgtatattgaaccagcccttgcatcccagggatgaagcccacttgatcatggtggataagctttttgatgtgctgctggattcggtttgccagtattttattgaggatttttgcatcaatgttcatcaaggatattggtctaaaattctcttttttggttgtgtttctgcccggctttggtatcaggatgatgctggcctcataaaatgagttaggaaggattccctctttttctattgattggaatagtttcagaaggaatggtaccagttcctccttgtacctctggtagaatttggctgtgaatccatctggtcctggactctttttcgttggtaagctattgattattgccacaatttcagctcctgttattggtctattcagagattcaacttcttcctggtttagtcttgggagagtgtatgtgtcgaggaatttatccatttcttctagattttctggtttatttgcgtagacgtgtttgtagtattctctgatggtagtttgtatttctgtgggattggtggtgatatcccttttatcattttttattgcatctatttgattcttctctctttttttctttattagtcttgctagcggtctatcaattttgttgatcctttcaaaaaaccagctcctggattcgttaattttttgaagggttttttgtgtctctatttccttcagttctgctctgattttagttatttcttgccttctgctagcttttgaatgtgtttgcttttgcttttctagttcttttaattgtgatgttagggtgtcaattttggatctttcctgctttctcttgtgggcatttagtgctataaatttccctctacacactgctttgaatgtgtcccagagattctggtatgttgtgtctttgttctcgttggtttcaaagaacatctttatttctgccttcatttcgttatgtacccagtagtcattcaggagcaggttgttcagtttccatgtagttgagcggttttgagtgagattcttaatcctgagttctagtttgattgcactgtggtctgagagatagtttgttataatttctgttcttttacatttgctgaggagagctttacttccaactatgtggccaattttggaataggtgtggtgtggtgctgaaaaaaacgtatattctgttgatttggggtggagagttctgtagatgtctattaggtccgcttggtggagagctgagttcaattcctgggtattcttgttgactttctgtctcgttgatctgtctaatgttgacagtggggtgttaaagtctcccattattaatgtgtgggagtctaagtctctttgtaggtcactcaggacttgctttatgaatctgggtgctcctgtattgggtgcatatatatttaggatagttagctcttcttgttgaattgatcaacaaggccttaattacttaattgatcattaagtaatggccttcgtctcttttgatctttgttggtttaaagtctgttttatcagagactaggattgcaacccctgcctttttttgttttccatttgcttggtagatcttcctccatccttttattttgagcctatgtgtgtctctgcacgtgagatgggtttcctgaatacagcacactgatgggtcttgactctttatccaatttgccagtctgtgtcttttaattggagcatttagtccatttacatttaaagttaatattgttatgtgtgaatttgatcctgtcattatgatgttagctggttattttgctcattagttgatgcagtttcttcctagtctcgatggtctttacattttggcatgattttgcagcggctggtaccgtttgttcctgtccatgtttagtgcttccttcaggagctcttttagggcaggcctggtggtgacaaaatctctcagcatttgcttgtctgtaaagtattttatttctccttcacttatgaagcttaatttggctggatatgaaattctgggttgaaaattcttttctttaagaatgttgaatattggcccccactctcttctggcttgtagagtttatgccgagagatctgctgttagcctgatgggcttccctttcagggtaacccacctttctctctggctgcccttaacattttttccttcatttcaactttggtgaatctgacaattatgtgtcttggtgttgctcttctcgaggagtatctttgtggcattctctgtatttcctgaatctgaatgttggcctgccttgctagattggggaagttctcctggataatatcctgtagagtgttttccaacttggttccattctccccatcactttcaggtacaccagtcagacgtagatttggtcttttcacatagtcccatatttcttggaggctttgctcatttctttttattcttttttctctaaacttcccttctcgcttcatttcattcatttcatcttccatcgctgataccctttcttccagttgattgcatcggctcctgaggcttctgcattcttcacgtagttcttgagccttggctttcagctccatcagctcctttaagcacttctctgtattggttattgtagttatacattcttctaaatttttttcaaagttttcaacttctttgcctttggtttgaatgtcctcccgtagctcagagtaatttgatcgtctgaagccttcttctctcagctcgtcaaagtcattctccgtccagctttgttccgttgctggtgaggaactgtgttcctttggaggaggagaggtgctctgctttttagagtttgcagtttttctgctctgttttttccccatctttgtggttctatctacttttggttttcgatgatggtgatgtacagatgggtttttggtgtggacgtcctttctgtttgttagttttccttctaacagacaggaccctcagctgcaggtctgttggagtacctggccgtgtgaggtgtcagtctgcccctgctgggggttgcctcccagttaggctgcttgggggtcaggggtcagggacccacttgaggaggcagtctggcagttctcagatctccagctgcgtgctaggagaaccactgctctcttcaaagctgtcagacagggacatttaagtctgcagaggttactgctgtctttttgtttgtctgtgccctgcccccagaggtggagcctacagaggcaggcaggcctccttgagctgtggtgggctccacccagttcgagcttcccggctgctttgtttacctaagcaagcctgggcaatggcaggcacccctcccccagcctcgctgccgccttgcagtttgatctcagactgctgtgctagcaatcagcgagactccgtgggtgtaggaccctccgagccaggtgcgggatataatctcctggtgcgctgttttttaagcccgtcggaaaagcgaagttttcgggtgggagtgacccgattttccaggtgctgtctgtcaccactttctttgactaggaaagggaactccctgaccccttgcgcttcccgagtgaggcaatgcctcgccctgcttcggctcgtgcacagtgcgcgcacccactgacctgcgcccactgtctggcactccctattgagatgaaccgggtacctcagatggaaatgcagaaatcacccgtcttctgcgtcactcatgctgggagctgtcgactggagctgttcctattcgg

SEQ ID NO: 10480 - DNA, 6040 bp, Homo sapiens
atgtttttttttctttttttttattatactttaagttttagggtacatgtgcacaatgtgcaggttaattacatatgtatacatgtgccatgctggtgcgctgcacccactaactcgtcatctagccttaggtatatctcccaatgctatccctccccgctccccccaccccaccacagtccccagagtgtgatattccccttcatgtgtccatgtgatctcattgttcaattcccacctatgagtgagaatgtgcggtgcttggttttttgttcttgcgatagtttactgagaatgatgatttccaatttcatccatgtccctacaaaggacatgaactcatcattttttatggctgcatagtattccatggtgtatatgtgccacattttctgaatccagtctatcattgttggacatttggcttggttccaagtctttgctattgtgaataataccgcaataaacatacgtgtgcatgtgtctttatagcagcatgatttatagtcatttgggtatatacccagtaatgggatggctgggtcaaatggtatttctagttctagatccctgagtaatcgccacactgacttccacaatggttgaaccagtttacagtcccaccaacagtgtaaaagtgttcctatttctccacatcctctccagcacctgttgtttcctgactttttaatgatcaccattctaaccggtgtgagatgatatctcatagtggttttgatttgcatttctctgatggccagtgatgatgagcattttttcatgtgttttttggctgcataaatgtcttcttttgagaagtgtctgttcatgtccttcgcccactttttgatggggttgtttgtttttttcttgtaaatttgtttgagttcattgtagattctggatattagccctttgtcagatgagtaggttgcgaaaattttctctcatgttgtaggttgcctgttcactctgatggtagtttcttttgctgtgcagaagctctttagtttaattagatcccatttgtcaattttggcttttgttgccattgcttttggtgttttggacatgaagtccttgcccatgcctgtgtcctgaatggtaatgcctaggttttcttctagggttgttatggttttaggtctaacgtttaaatctttaatccatcttgaattgatttttgtataaggtgtaaggaagggatccagtttcagctttctacatatggctagccagttttcccagcaccatttattaaatagggaatcctttccccattgcttgtttttctcaggtttgtcaaagatcagatagttgtaggtatgcggcgttatttctgagggctctgttctgttccattgatctatatctctgttttggtaccagtaccatgctgttttggttactgtagccttgtagtatagtttgaagtcaggtagtgtgatgcctccagctttgttcttttggcttaggattgacttggcgatgcgggctcttttttggttccatatgaactttaaagtagttttcttccaattctgtgaagaaagtcattggtagcttgatgggaatggcattgaatctgtaaattaccttgggcagtatggccattttcacgatattgattcttcctacccatgagcatggaatgttcttctatttgtttgtatcctcttttatttccttgagcagtggtttgtagttctccttgaagaggtccttcacatcccttgtaagttggattcctaggtattttattctctttgaagcaattgtgaatgggagttcactcatgatttggctctctgtttgtctgttattggtgtataagaatgcttgtgatttttgtacattgattttgtatcctgagactttgctgaagttgcttatcagctgaaggagattttgggctgagacaatggggttttctagataaacaatcatgtcgtctgcaaacagggacaatttgacttcctcttttcctaattgaataccctttatttccttctcctgcctgattgccctggccagaacttccaacactatgttgaataggagcggtgagagagggcatctctgtcttgtgccagttttcaaagggaatgcttccagtttttgcccattcagtatgatattggctgtgggtttgtcatagatagctcttattattttgaaatacgtcccatcaatacctaatttattgagtttttagcatgaagggttgttgaattttgtcaaaggctttttctgcatctattgagataatcatgtggtttttgtctttggctctgtttatatgctggattacatttattgatttgtgtctattgaaccagccttgcatcccagggatgaagcccacttgatcatggtggataagctttttgatgtgctgctggattcggtttgccagtattttattgaggatttttgcatcaatgttcatcaaagatattggtctaaaattctcttttttggttgtgtctctgcctggctttggtatcagaatgatgctggcctcataaaatgagttagggaggattccctctttttctattgattggaatagtttcagaaggaatggtaccagttcctccttgtacctctggtagaattcggctgtgaatccatctggtcctggactctttttggttggtaaactattgattattgccccaatttcagctcctgttattggtctattcagatattcaacttcttcctggtttagtcttgggagagtgtatgtgtcgaggaatgtatccatttcttctagattttcttgtttatttgcctagaggtgtttgtagtattctctgatggtagtttgtatttctgtgggatcagtggtgatatcccctttatcattttttattgtgtctatttgattcttctctctttttttctttattagtcttgctagcagtctatcaattttgttgatcctttcaaaaaaccagctcctggattcattgattttttgaagggttttttgtgtctctatttccttcagttctgctctgattttagttatttcttgccttctgctagcttttgaatgtgtttgctcttgcttttgtagttcttttaattgtgatgttagggtgtcaattttggatctttcctgctttctcctgtgggcatttagtgctataaatttccctctacacactgctttgaatgcgtcccagagattctggtatgttgtgtctttgttctcgttggtttcaatgaacatctttatttctgccttcatttcattatgtatccagtagtcattcaggagcaggttgttcagtttccatgtagttgagcggctttgagtgagattcttaatcctgagttctagtttgattgcactgtggtctgagagatagtttgttataatttctgttcttttacatttgctgaggagagctttacttccaactctgtggtcaattttggaataggtgcggtgtggtgctgaaaaaaatgtatattctgttgatttggggtggagagttctgtagatgtctattaggtccgcttggtacagagctgaattcaattcctgggtatccttgttgactttctgtctcattgatctgtttaatgttgacagtggggtgttaaagtctcccattattaatgtgtgggagtctaagtctctttgtaggtcactcaggacttgctttatgaatctgggtgctcctgtattggttgcatatatatttaggatagttagctcctcttgttgaattgatccctttaccattatgtaatggccttctttgtctcttctgatctttgttggtttaaagtctgttttatcagagactaggattgcaacccctgcctttttttgttttccatttgcttggtagatcttcctccatccttttattttgagcctatgtgtgtctctgcacgtgagatgggtttcctgaatacagcacacttatgggtcttgactctttatccaacttgccagtctgtgtcttttaactggagaatttagtccatttacatttaaagttaatattgttatgtgtgaatttgatcctgtcattatgatgttagctggtgattttgctcattagttgatgcagtttcttcctagtctcgatggtctttacgttttggcatgattttgcagtggctggtaccggttgttcctttccatgtttagcgcttccttcaggagctcttttagggcaggcctggtggtgacaaaatctctcagcatttgcttgtctgtaaagtattttatttctccttcacttatgaagcttattttggctggatatggaattctgggttgaaaattcttttctttaagaatgttgaatactggcccccactctcttctggcttgtagggtttctgctgagagatccactgttagtctgatgggcttccctttgagggtaacccgacctttctctctggctgcccttaacattttttccttcatttcaactttggtgaatctgacaattatgtgtcttggagttgctcttcttgaggagtatctttgtggcgttctctgtatttcctgaatctgaacgttggcctgccttgctagattggggaagttctcctggataatatcctatagagtgttttccaacttggttccattctccgcatcactttcaggtacaccaatcagacgtagatttggtcttttcacatagtcccatatttcttggaggctttgctcatttctttttattcttttttctctaaccttcccttctcgcttcatttcattcatttcatcttccattgctgataccctttcttccagttgatcacatcggctcctgaggcttctgcattcttcacgtagttctcgagccttggttttcagctccatcagctcctttaagcacttctctgtattggttattctagttatacattcttctaaatttttttcaaagttttcaacttctttgcctttggtttgaatgtcctcccgtaggtcagagtaatttgatcgtctgaagccttcttctctcagctcgtcaaagtcattctccatccagctttgttccgttgctggtgaggaactgcgttcctttggaggaggagaggtgctctgcgttttagagtttccagtttttctgttctgttttttccccatctttgtggttttatctacttttggtctttgatgatggtgatgtacagatgggtttttggtgtggatgtcctttctgtttgttagttttccttctaacagacagcaccctcagctgcaggtctgttggaataccctgccgtgtgaggtgtcagtgtgcccctgcttgggggtgcctcccagttaggctgctcggaggtcaggggtcagggacccacttgaggaggcagtctgcccgttgtcagatctccagctgcgtgctgggagaaccactgctctcttcaaagctgtcagacagggacatttaagtctgcagaggttactgctgtctttttgtttatctgtgccctgcccccagaggtggagcctacagaggcaggcaggcctccttgagctctggtgggctccacccagttcgagcttcccggctgctttgtttacctaagcaagcctgggcaatggcgggcgcccctcccccagcctcgctgccgccttgcagtttgatctcagactgctgtgctagcaatcagcgagattccgtgggtgtaggaccctccgagccaggtgtgggatatagtcttgtgctgcgccgttttttaagccggtctgaaaaacgcaatattagggtgggagtgacccgattttccaggtgcgtctgtcacccctttctttgactcggaaagggaactccctgaccccttgcgcttcccagtgaggcaatgcctcgccctgcttcggctcgtgctcggtgcacgcacccactggcctgcgcccactgtctggcactccctagtgagatgaacccggtacctcagatggaaatgcagaaatcacccgttttctgcgtcgctcacgctgggagctgtagaccggagctgttcttattcggccatcttggctcctcctccc

SEQ ID NO: 10481 - DNA, 5363 bp, Homo sapiens
tttttaaaatttgtattttattattatacttcaagttttagggtacatgtgcacaacatgcaggtttcttacatatgtatacatgtgccatgttggtgtgctgcacccattaactcgtcatttatcattaggtatatctcctaatgctatccctcccccctccccccaccccacaactgtccctggtgtgtgatgttccccttcctgtgtccatgtgttatcattgttcaattcccacctatgagtgagaacatgtggtgtttggttttttgtccttgcgatggtttgctgagaatgatagtttccagtttcatccatgtccctacaaaggacatgaactcatcattttttatggctgcatagtattccatggtgtatatgtgccacattttcttaatccagtctatcgttgttggacatttaggttggttccaagtctttgctattgtgaatagtgccgctgtaaacatacatgtgcatgtgtctttatagcagcatgatttataatcctttgggtatatacccagtaatgggatgactgggtcaaatggtattgctagttctaggtccctgaggaatcgccacactgacttccacaatggttgaactagtttacagtcccaccaacagtgtaaaagtgttcctatttctccacatcctctccagcacctgttgtttcctgactttttaatgattgccattccaactggtgtgagatggtatctcattgtggttttgatttgcatttctctgatggccagtgatgatgagcattttttcatgtgttttttggctgcataaatgtcttcttttgagaagtgtctgttcatgttcttcgcccactttttgatgaggttgtttgtttttttcttgtaaatttgtttgagttcattgtagattctgaatattagccctttgtcagatgagtaggttgcaaaaattttctcccattctgtaggttgcctgttcactctgatggtcgtttcttttgctgtgcagaagctctttagtttaattagatcccatttgtcaattttggcttttgttgccattgcttttggtgttttagacatgacgtccttgcccatgcctatgtcctgaatggtattgcctaggttttcttctagggtttttatggttttagggctaacgtttaagtctttaatccatcttgaattaatttttgtataaggtgtaaggaagggatccagtttcagctttctacatatggctagccagttttcccagcaccatttattaaatagggaatcctttccccatttcttgtttttgtcaggtttgtcaaagatcagatagttgtagatatgtggcattatttctgagggctgtgttctgttccattgatctatatctctgttttggtaccagtaccatgctgttttggttcctgtagccttgtagtatagtttgaagtcaggtagcatgatgcctccagctttgttcttttggtttaggattgacttggcgatgcaggctcttttttggttccatatgaactttaaagtagttttttccaattctgtgaagaaagtcattggtagcttgattgggatggcattgaatctataaattaccttgggcagtatggccattttcacgatattgattcttcctacccatgagcatggaatgttcttccacttgtttgtatcctcttttatttcattgagcagtggtttgtagttcttcttgaagaggtccttcacatcccttgtaagttggattcctaggtattttattctctttgaagcaattgtgaatgggagttcactcatgatttggcctctgtttgtctgttattggtgtataagagtgcttgtgatttttgtacattgatttttgtatcctgagactttgctgaagttgcttatcagcttgaggagatttggggctgagacgatggggttttctagatatacaatcatgtcatctgcaagcagggacaatttgacttcctcttttcctaatcgaatgccctttatttccttctcctgcctgactgccctggccagaacttccaacactatgttgaataggagtggtgagagagggcatccctgtcttgtgccagttttcaaagagaatgcttccagtttttgcccattcagtatgatatcggctgtgggtttgtcatagatagctcttattattttgagatacgtcccatcaatacctaatttattgagagtttttagcatgaagggttgttgaattttgtcaaaggccttttctgcatctattgagataatcatgtggtttttgtctttggttctgtttatatgctggattacatttattgatttgcgtatgttgaaccagccttgcatcccagggatgaagcccacttgatcatggtggataagctttttgatgtgctgctggattcggtttgccagtattttattgaggatttttacatcgatgttcatcagggatattggtctgaaattctcttttttggttgtgtctctgtcaggctttggtatcaggatgatgctggcctcataaaatgagttagggaggattccctctttttctattgattggaatagtttcagaaggattggtaccagctcctctttgtacctctggtagaattcggctgtgaatccatctggtcctggagtttttttggttggtaagctattgattatttcctcaatttcagagcctgttattggtctattcagaggttcaacttcttcctggtttagtcttgggaggatgtatgtgtcgaggaatttatccatttcttctagattttctagtttatttgcgtagaggtgtttataatattctctgatggtagtttgtatttctgtgggattggtggtgatatcccctttatcattttttattgcatctatttgattcttctctcttttcttctttattagtcttgctagtggtctatcaattttgttgatcttttcaaaaaaccagctcctggattcattaatgttttgaagggctttttgtgtctctgtttccttcagttatgctctgatcttagttatttcttgccttctgctagcttttgaatgtgtttgctctcgcttttctagttcttttaattgtgatgttagggtgtcaattttagatctttcctgctttctcttgtgggcatttagtgctataaatttccctctacacactgctttgaatgtgtcccagagattctggtatgttgtgtctttgttctcgttggtttcaaagaacatctttatttctgccttcacttcattatttacccagtagtcattcaggagcaggttgttcagtttccatgtagttgagtggttttgagtgagtttcttaatcctgagttctagtttgattgcactgtggtctgagagacagtttgttataatttctgttcttttacatttgctgaggagtgctttacttccaactatgtggtcaattttggagtaggtgtagtgtggtgctgaaaagaatgtatattctgttgatttggggtggagagttctgtagatgtctattaggtccacttggtgcagagctgagttcaattcctgggtatccttgttaacttcctgtctcgttgatctgtctaatgttgacagtggggtgttaaagtctcccattattattgggtgggagtgtaagtctctttgtaggtcattaaggacttgctttatgaatctgggtgctcctgtattgggtgcatatatatttaggatagttagttcttcttgttgaattgatccctttatcattatgtaatggccttctttgtctcttttgatctttgttggtttaaagtctgttttatcagagactaggattgcaacccctgcctttttttgttttccatttgcttggtagatcttcctccatccctttattttgagcctatgtgtgtctctgcacgtgagatgggtttcctgaatatagcacaatgatgggtcttgactctttatccaatttgccagtctgtgtcttttaattggagcatttagcccatttacatttaaagttaatattgttatgtgtgaatttgatcctgtcattatgatgttagctgattattttgcccgttagttgatgcagtttcttcctagccttgatgctctttacaatttggcatgtttttgcagtggctggtaccagttgttcctttccatgtttagtgcttccttcaggagctcttttagggcagggctggtggtgacaaaatctctcagcatttgcttgtctgtaaagtgttttatttctccttcacttatgaagcttagtttggctggatatgaaattctgggttgaaaattcttttctttaagaatgttgaatattggtccccactctcttctggctggtagagtttctgcagagagatcagctgttagtctgatgggcttccctttgtgggtaacctgacctttctctctggctgccctgaacatttgtttcttcatttcaactttggtgaatctgacaattatgtgtcttggagttgctcttctcaaggactatctttgtggcattctctgtatttcctgaatctgaatgttggcctgccttgctagattggggaacttctcttggataatatcctacagagtgttttccaacttggttccattctccccgtcactttcaggtacaccaatcagatgtagatttggtcttttcacatagtcccatatttcttggaggctttgttcgtttctttttattcttttttctctaaacttctcttctcgcttcatttcattcatttcgtcttccatcactgataccctttcttccagtttatcgcatcggctactgaggcttctgcattcgtcacgtagctctcgtgccttggttttcagctccatcaggtcctttaaggacttctctgcattggttattctagttatccattcatctaattttttttcaaagccttttaacttctttgccattggtttgaatttcctcctgtagctcggagtagtttgatcgtctgaaaccttcttctctcaacttgtcaaagtcattctgcgtccagctttgttccgttgctagtgaggagctgcgttcctttggaggaggagaggtgctctgatttttagagtttccagttttcctgctctgttttttcccccatctttgtggttttatctacttttggtctttgaaggtggtgacgtacagatgggtttttggtgtggatgtcctttctgtttgttagttttccttctaacagagaggaccctcagctgcaggtctgttggagtttgctagaggtccactccagactctgtttgccttggtgtcagcagcggtggctgcagaagagtggatattggtgaaccgcaaatgctgctgcctga

SEQ ID NO: 10482 - DNA, 6034 bp, Homo sapiens
attattattattattttttttaaattatactttaagttttagggtacatgtgcacattgtgcaggttagttacatatgtatacgtgtgccatgctggtgcgctgcacccactaactcatcatctagcattaggtatatctcccaatgctatccctcccccctccccaccacagtccccagagtgtgatattccccttcctgtgtccatgtgatctcattgttcaattcccacctatgagtgagaatatgcggtgtttggttttttgttcttgcgatagtttactgagaatgatggtttccaatttcatccatgtccctacaaaggacatgaactcatcattttttatggctgcatagtattccatggtgtatatgtgccacattttcttgatccagtctatcattgttggacatttgggttggttccaagtctttgctattgtgaataatgccgcaataaacatacgtgtgcatgtgtctttatagcagcgtgatttatagtcatttgggtatatacccagtaatgggatggctgggtcaaatggtatttctagttctagatccctgaggaatcgccacactgacttccacaatggttgaactagtttacagtcccaccaacagtgtaaaagtgttcctatttctccacatcctctccagcacctgttgtttcctgacttttcaatgattgccattctaactggtgtgagatgatatctcatagtggttttgatttgcatttctctgatggccagtgatgatgagcattttttcatgtgtctgttggctgcataaatgtcttcttttgagaagtgtctgttcatgtccctcgcccactttttgatggggttgtttgtttttttcttgtaaatttgtttgagttcattgtagattctggatattagccctttgtcagatgagtaggttgcgaaaattttctcccatgttgtaggttgcctgttcactctgatggtagtttcccccactgtgcagaagctctttagtttaattagatcccatttgtcaattttggctttggttgccattgcttttggtgttttggacatgaagtccttgcccacgcctatgtcctgaatggtaatgcctaggtttccttctagggtttttatggttttaggtctaacgtttaaatctttaatccatcttgaattgatttttgtataaggtgtaaggaagggatccggtttcagctttctacatatggctagccagttttcccagcaccatttattaaataggaaatcctttccccattgcttgtttttctcagatttgtcaaagatcaggtagttgtaggtatgcggcgttatttctgagggctctgttctgttccattgatctatatctctgttttggtaccagtaccatgctgttttggttactgtagccttgtagtatagtttgaagtcaggtagtgtgatgcctccagctttttcttttggcttaggattgacttggtgatgcgggctcttttttggttccatatgaactttaaagtcgttttttccaattctgtgaagaaagtcattggtagcttgatggggatggcattgaatctgtaaattaccttgggcagtatggccattttcacgatattgattcttcctacccatgagcatggaatgttcttccatttgtttgtatcctcttttatttccttgagcagtggtttgtagttctccttgaagaggtccttcacatcccttgtaagttggattcctaggtattttattctctttgaagcaattgtgaatgggagttcactcatgatttggctctctgtttgtctgttgttggtgtataggaatacttgtgatttttgtacattgattttgtatcctgagactttgctgaagttgcttattagcttaaggagattttgggctgagacaatggggttttctagataaacaatcatgtcgtctgcaaacagggacaatttgacttcctcttttcctaattgaataccctttatttccttctcctgcctgattgccctggccagaacttccaacactatgttgaataggagcagtgagagagggcatccctgtcttgtgccagttttcaaagggaatgcttccagtttttgcccattcagtatgatattggctgtgggtttgtcatagatagctcttattattttgaaatacgtcccatcaatacctaatttattgagagtttttagcatgaagggttgttgaattttgtcaaaggctttttctgcatctattgagataatcatgtgatttttgtctttggctctgtttatatgctggattacatttattgatttgtgtatattgaaccagccttgcatcccagggatgaagcccacttgatcatggtggataagctttttgatgtgctgctggattcggtttgccagtattttattgaggatttttgcatcaatgttcatcaaggatattggtctaaaattctcttttttggttgtgtctctgcccggctttggtatcagaatgatgctggcctcataaaatgagttagggaggattccctctttttctattgattggaatagtttcagaaggaatggtaccagttcctccttgtacctctggtagaattcggctgtgaatccatctggtcctggactctttttggttggtaaactcttgattattgccacaatttcagctcctgttattggtctattcagagattcaacttcttcctggtttagtcttgggagagtgtatgtgtcgaggaatgtatccatttcttctagattttctagtttatttgcgtagaggtgtttgtagtattctctgatggtagtttgtatttctgtgggatcggtggtgatatcccctttatcattttttattgtgtatatttgattcttctctctttttttctttattagtcttgctagcggtctatcaattttgttgatcctttcaaaaaaccagctcctggattcactgattttttgaagggttttttgtgtctctatttccttcagttctgctctgattttagttatttcttgccttctgctagcttttgaatgtgtttgctcttgcttttctagttcttttaactgtgatgttagggtgtcaattttggatctttcctgctttctcttgtgggcatttagtgctataaatttccctctacacactgctttgaatgcgtcccagagattctggtatgttgtgtctttgttctcgttggtttcaaagaacatctttatttctgccttcatttcgttatgtacccagtagtcattcaggagtaggttgttcagtttccatgtagttgagtggctttgagtgagattcttaatcctgagttctagtttgattgcgctgtggtctgagagatagtttgttataatttctgttcttttacatttgctgaggagagctttacttccaactatgtggtcaattttggaataggtgtggtgtggtgctgaaaaaaatgtatattctgttgatttggggtggagagttctgtagatgtctattaggtccacttggtgcagagctgagttcaattcctgggtatccttgttgactttctgtctcgttgatctgtctaatgttgacagtggggtgttaaagtctcccattattaatgtgtgggagtctaggtctctttgtaggtcactcaggacttgctttatgaatctgggtgctcctgtattggctgcatatatatttaggatagttagctcctcttgttgaattgatccctttaccattatgtaatggccttctttgtctcttttgatctttgttgatttaaagtctgttttatcagagactaggattgcaacccctgcctttttttgttttccatttgcttggtagatcttcctccatccttttattttgagcctatgtgtgtctctgcacatgagatgggtctcctgaatacagcacactgatgggtcttgactctttatccaatttgccagtctgtgtcttttaattggagaatttagtccatttacatttaaagttagtgttgttatgtgtgaatttgatcctgtcattatgatgttagctggtgattttgctcgttagttgatgcagtttcttcctagtcttgatggtctttacattttggcatgattttgcagcggctggtaccggttgttcctttccatgtttagcgcttccttcaggagctcttttagggcaggcctggtggtgacaaaatctctcagcacttgcttgtctgtaaagtattttatttctccttcacttatgaagcttagtttggctggatatgaaattctgggttgaaaattcttttctttaagaatgttgaatattggcccccactctcttctggcttgtagggtttctgctgagagatccgctgttagtctgatgggcttccctttgagggtaacctgacctttctctctggctgcccttaacattttttccttcatttcaactttggtgaatctgacaattatgtgtcttggagttgctcttcccgaggagtatctttgtggcgttctctgtatttcctgaatctgaacgttggcctgccttgctagattggggaagttctcctggataatatcctgcagagtgttttccaacttggttgcattctccccatcactttcaggtacaccaatcagacgtagatttggtcttttcacatcgtcccacatttcttggaggctttgctcatttctttttattcttttttctctaaacttcccttctcgcttcatttcattcatttcatcttccattgctgataccctttcttccagttgatcgcatcggctcctgaggcttctgcattcttcacgtagttctcgagccttggttttcagctccatcagctcctttaagcacttctctgtattggttattctagttatacattcttctaaatttttttcaaagttttcaacttctttgcctttggtttgaatgtcctcccgtagctcagagtaatttgatcgtctgaagccttcctctcagctcgtcaaaatcattctccatccagctttgttccgttgctggtgaggaactgcgttcctttggaggaggagaggcgctctgcgttttagagtttccagtttttctgttctgttttttccccatctttgtggttttatctacttttggtctttgatgatggtgatgtacagatgggtttttggtgtggatgtcctttctgtttgttagttttccttctaacagacaggaccctcagctgcaggtctgttggaataccctgccgtgtgaggtgtcagtgtgcccctgctggggggtgcctcccagttaggctgctcggggatcaggggtcagggacccacttgaggaggcagtctgcctgttctcagatctccagctgcgtgctgggagaaccactgctctcttcaaagctgtcagacagggacatttaagtctgcagaggttactgctgtctttttgtttgtctgtgccctgcccccagaggtggagcctacagaggcaggcaggcctccttgagctgtggtgggctccacccagttggagcttcccggctgctttgtttacctaatcaagcctgggcaatggcgggcgcccctcccccagcctggctgccgccttgcagtttgatctcagactgctgtgctagcaatcagcgagatgccgtgggcgtaggaccctccgagccaggtgtgggatatagtctcgtcgtgcgccgttttttaagccggtctgaaaagcgcaatattcgggtgggagtgacccgattttccaggtgcgtccgtcacccctttctttgactcggaaagggaactccctgaccccttgcgcttcccaggtgagggaatgcctcgccctgctttggcttgcgcacggtgcgcgcacccactggcctgcgcccactgtctggcactccctagtgagatgaacccggtacctcagatggaaatgcagaaatcacccgtcttctgtgtcgctcacgctgggagctgtagaccggagctgttcctatttggccatcttggctcctcccctat

SEQ ID NO: 10483 - DNA, 11387 bp, Homo sapiens
tttttgtctttatttatttatttatttttattacactttaagttttagggtacatgtgcacaacgtgcaggtttgttacatatatatacatgtgccatgttggtgtgctgcacccattaacttgtcatttaacattaggtatatctcccaatgctacccctccaccctcccccaccacacaacaggccctggtgtgtgatgttccccttcctgtgtccaagtgttctcactgttcaattcccacctatgagtgagaacatgtggtgtttggttttttgtccttgtgatagtttgctgagaatgatggtttccagcttcatccatgtccctacaaaggacatgaactcatcattttttatggctgcatagtattccatggtgtatatgtgccacattttcttttctttttttttttttaattatactttaagttttagggtacatgtgcacattgtgcaggttagttacatatctatacatgtgccatgctggtgcgctgcacccactaactcgtcgtctagcattaggtatatctcccaatgctatccctcccccctcccccctccccaccacagtccccagagtgtgatattccccttcctgtgtccatgtgatctcattgttcaattcccacctatgagtgagaatatgcggtgtttggttttttgttcttgcgatagtttactgagaatgatggtttccaatttcatccatctccctacaaaggacatgaactcatcattttttatggctgcatagtattccatggtgtatatgagccacattttcttaatccagtctatcattgttggacatttgggttggttccaagtctttgctattgtgaataatgccgcaataaacatacgtgtgcatgtgtctttatagcagcatgatttatagtcatttgggtatatacccagtaatgggatggctgggtcaaatggtatttctagttctagatccctgaggaatcgccacactgacttccacaatggttgaactagtttacagtcccaccaacagtgtaaaagtgttcctatttctccacatcctctccagcacctgttgtttcctgacttgttaatgattgacattctaactggtgtgagatgatatctcatagtggttttgatttgcatttctctgatggccagtgatgatgagcattttttcatgtgttttttggctgcataaatgtcttcttttgagaagtgtctgttcatgtccttcgcccaatttttgatggggttgtttgtttttttcttgtaaatttgtttgagttcattgtagattctggatattagccctttgtcagatgagtaggttgcgaaaattttcttccatgttgtaggttgcctgttcactctgatggtagtttcttttgctgtgcagaagctctttagtttaattagatcccatttgtcaattttggcttttgttgccattgcttttggtgttttggacatgaagtccttgcccacgcctatgtcctgaatggtaatgcctaggttttcttctagggtttttatggttttaggtctaacttttaaatctttaatccatcttgaattgatttttatataaggtgtaaggaagggatccagtttcagctttctacatatggctagccagttttcccagcaccatttattaaatagggaatcctttccccattgcttgtttttctcaggtttgtcaaagatcagatagttgtagatatgtggcgttatttctgagggctgtgttctgttccattgatctatatctctgttttggtaccagtaccatgctgttttggttactgtagccttgtagtatagtttgaagtcaggtagtgtgatgcctccagctttgttcttttggcttaggattgacttggcaatgcgggctcttttttggttccatatgaactttaaagtagttttttccaattctgtgaagaaggtcattggtagcttgatggggatggcattgaatctataaattaccttgggcagtatggccattttcacgatattgattcttcctacccatgagcatggaatgttcttccatttctttgtatcctcttttatttccttgagcagtggtttgtagttctccttgaagaggtccttcacatcccttgtaagttggattcctaggtattttattctctttgaagcaattgtgaatgggagttcactcatgatttggctctctgtttgtctgttgttggtgtataggaatgcttgtgatttttgtacattgattttgtatcctgagactttgctgaagttgcttatcagcttaaggagattttgggctgagatgatggggttttctagataaacaatcatgtcgtctgcaaacatggacaatttgacttcctcttttcctaattgaataccctttatttccttctcctgcctgattgccctggccagaacttccaacactatgttgaataggagcggtgagagagggcatccctgtcttgtgccagttttcaaagggaatgcttccagtttttgcccattcagtatgatattggctgtgggtttgtcatagatagctcttattattttgaaatacatcccatcaatacctaatttattgagagtttttagcatgaagggttgttgaattttgtcaaaggctttttctgcatctattgagataatcatgtggtttttgtctttggctctgtttatatgctcgattacatttattgatttgcgtatattgaaccagccttgcatcccagggatgaagcccacttgatcatggtggataagctttttgatgtgctgctggattcggtttgccagtattttattgaggatttttgcatcaatgttcatcaaggattttggtctaaaattctcttttttggttgtgtctctgcccagctttggtatcaggatgatgctggcctcataaaatgagttagggaggattccctctttttctattgattggaatagtttcagaaggaatggtaccagttcctccttgtacctctggtagaattcggctgtgaatccatctggtcctggactctttttggttggtaagctattgattattgccacaatttcagctcctgttattggtctattcagagattcaacttcttcctggtttagtcttgggagagtgtatgtgtcgaggaatgtatccatttcttctagattttctagtttatttgcgtagaggtgtttgtagtattctctgatggtagtttgtatttctgtgggatcggtggtgatatcccctttatcattttttattgtgtctatttgattcttctctctttttttctttattagtcttactagcggtctatcaattttgttgatcctttcaaaaaaccagctcctggattcattgattttttgaagggttttttgtgtctctatttccttcagttctgctctgattttagttatttcttgccttctgctagcttttgaatgtgtttgctcttgcttctctagttcttttaattgtgatgttagggtgtcaattttggatctttcctgctttctcttgtgggcatttagtgctataaatttccctctacacactgctttgaatgcgtcccagagattctggtatgttgtgtctttgttctcgttggtttcaaagaacttctttatttctgccttcatttcgttatgtacccagtagtcattcaggagcaggttgttcagtttccatgtagttgagcggctttgagtgagattctttatcctgagttctagtttgattgcacggtggtctgagagatagtttgttataatttctgttcttttccatttgctgaggagtgctttacttccaactatgtggtcaattttggaataggtgtggtgtggtgctgaaaaaaatgtatattctgttgatttggggtggagagttctgtagatgtctattaggtctgcttggtgcagagctgagttcaattcctgggtatctttgttgactttctgtctcgttgatctgtctaatgttgacagtggggtgttaaagtctcccattattaatgtgtgggagtctaagtctctttgtaggtcactcaggacttgctttatgaatctgggtgctcctgtattgggtgcatatatatttaggatagttagctcctcttgttgaattgatccctttaccattatgtaatggccttctttgtctcttttgatccttgttggtttaaagtctgttttatcagagactaggattgcaacccctgcctttttttgttttccacttgcttggtagatcttcctccatccttttattttgagcctatgtgtgtctctgcacgtgagatgggtttcctgaatacagcacactgatgggtcttgactctttatccaacttgccagtctgtgtcttttaattggagaatttagtccatttacatttaaagttaatattgttatgtgtgaatttgatcctgtcattatgatgttagctggttattttgcttgttagttgatgcagtttcttcctagtctcgatggtctttacattttggcatgattttgcagcggctggtaccggttgttcctttccatgtttagtgcttccttcaggacctcttttagggcaggcctggtggtgacaaaatctctcagcatttgcttgtctgtaaagtattttatttctccttcacttatgaagcttagtttggctggatatgaaattctgggttgaaaattcttttctttaagaatgttgaatattggcccccactctcttctggcttgtagggtttctgccgagagatccgctgttagtctgatgggcttccctttgtgggtaacccgacctttctctctggctgcccttaacattttttccttcatttcaactttggtgaatctgacaattatgtgtcttggagttgctcttctcgaggagtatctttgtggtgttctctgtatttcctgaatctgaacgttggcctgccttgctagattggggaagttctcctgtataatatcctgcagagtgttttccaacttggttccattctccgcatcactttcaggtacaccaatcagacatagatttggtcttttcacatagtcccatatttcttggaggctttgctcatttctttttattcttttttctctaaccttcccttctcgcttcatttcattcatttcatcttccattgctgataccctttcttccagttgatcgcatcggctcctgaggcttctgcattcttcacgtagttctcgagccttggttttcagctccatcaactcctttaagcacttctctgtattgcttattctagttatacattcttctaaattttttccaagttttcaacttctttgcctttggtttgaatgtcctcccgtagctcagagtaatttgatcgtctgaagtcttcttctctcagctcgtcaaaatcattctccatccagctttgttccgttgctggtgaggaactgcgttcctttggaggaggagaggcgctctgcgttttagagtttccagtttttctgttctgttttttccccatctttgtggttttatctacttttggtctttgatgatgttgatgtacagatgggttttcggtgtggatgtcctttctgtttgttagttttccttctaacagacaggaccctcagctgcaggtctgttggaataccctgccgtgtgaggtgtcagtgtgctcctgctggggggtgcctcccagttaggctgctcgggggtcaggggtcagggacccacttgaggaggcagtctgcccggtctcagatctccagctgcgtgctgggagaaccactgctctcttcaaagctgttagacagggacatttaagtctgcagaggttactgctgtctttttgtttgtctgtgccctgcccccagaggtggagcctacagaggcaggcaggcctccttgagctgtggtgggctccacccagttcgagcttgccggctgctttgtttacctaagcaagcctgggcaatggcgggcgcccctcccccagcctcgctgccgccttgcagtttgatctcagactgctgtgctagcaatcagcgagactccgtgggcgtaggaccctccgagccaggtgtgggatatagtctcgtggtgtgccgttttttaagccggtctgaaaagcgcaatattcgggtgggagtgacccaattttccaggtgcgtccgtcacccctttctttgactcggaaagggaactccctgaccccttgcacttcccaggtgaggcaatgcctcgccctgcttcggctcgcgcacagtgcgcgcacctactggcctgcgcccactgtctggcactccccagtgagatgaacccggtacctcagatggaaatgcagaaatcacccgtcttccgcgtcgctcacgctgggagctgtagaccggagctgttcctattcggccatcttggctcctctctccgtgccacattttcttaatccagtctatcattgttggacatgtgggttggttccaagtctttgctattgtgaatagtgccacaataaacatacgtgtgcatgtgtctttatagcagcatgatttataatcctttgggatatacccagtaatgggatggctgggtcaaatggtatctctagttctagatccctgaggaattgccacactgacttccacaatggtagaactagtttacagtcccaccaacagggtaaaagtgttcctatttctccacatcctctccagcacctgttatttcctgactttttaatgatcaccattctaactggtgtgagatggtatctcattgtggttttggctgcataaatgtcttcttttgagatgtggctgttcatgtcctttgcccactttttgatggggttatttgtttttttcttgtaaatttgtttgagttcattgtagattctggatattagccctttgtcagatgagtagattgcaaaaattttctcccattctgtaggttgcctgttcactccgatgatagtttcttttcctgtgcagaagctctttagtttaattagatcccatttgtcaattttgacttttgttgccattgcctttggtgttttagacatgaagtccttgcccatacctatgtcctgaatggtattgtgtaggttttcttctagggtttttatggttttaggtctaacatttaaatctttaatccatcgtgaattaattttagtataaggtgtaaggaagggatccagtttcagctttctacatatggctagccagttttcccagcaccatttattaaatagggaatcttttccccatttcttttttttgtcaggtttgtcaaagatcagatggttctagatatgtggcattatttctgagggctgtgttctgttccattggtctatatctctgttttggtaccagtaccatgctgttttggttactgtagccttgtagtatagtttgaagtcaggtagcttgatgcctccagctttgttcttttggcttaggattgacttggcaaagcaggctgttttttggttccatatgaactttaaagtagttttttccaattctgtgaagaaggtcattggtagcttgatggggatggcattgaatctataaattaccttgggcagtatggccattttcacgatattgattcttcctacccatgagcatggaatgttcttccatttctttgtatcctcttttatttccttgagcagtggtttgtagttctccttgaagaggtccttcacatcccttgtaagttggattcctaggtattttattctctttgaagcaattgtgaatgggagttcactcatgatttggctctctgtttgtctgttattggtgtataggaatgcttgtgatttttgcacattgattttgtatcctgagactttgctaaagttgcttatcagcttaaggagattttgggctgagacgatggggttttctagatatacaatcatgtcatctgcaaacagggacaatttgactacctcttttcctaattgaatgccctttatttctttctcgtgcctgattgccctggccagaacttccaacactatgttgaataggagtggtgagagagggcatccctgtcttgtgccagttttcaaagggaatgcttccagtttttgtccattcagtatgatattggctgtgggtttgtcatagatagctcttattattttgagatacgtcccatcaatacctaatttatagagagtttttagcatgaagcgttgttgaattttgtcaagggccttttctgcatctattgagataatcatgtggtttttgtctttggctctgtttatttgatggattacatttattgatttgcatatggtgaaccagccttgcatcccagggatgaagcccacttgatcatggtagataagctttttgatgtgctgctggattcggtttgccagtattttattgaggatttttgcatcaatgttcattagggatattggtctaaaattctctttttttctgttgtgtctctgcccggctttggtatcaggatgatgctggcctcataaaatgagttagggaggattctctctttttctattgattggaatagtttcagaaggaatgataccagctcctccttgtacctctggtagaattttgctatgaatccatgtggtcctggactttttttggttggtaagctattaattattgcctcaatttcagagcctgttattggtctattcagagattcaacttcttcctggtttagtcttgggagagtgtatgtgtcgaggaatttatccatttcttccatattttctagtttatttgcatagaggtggttaaagtattctctgatggtagtttgtatttttgtgggattggtggtgatatcccctttatcatttttcattgcatctatttgattcttctttcttttcttctttattcgtcttgctagtggtctgtcaattttgttgatcttttcaaaaaaccagttcctggattcactgattttttgaagggtttttgtgtctctatttctttcagttctgctctgattttagttatttcttgccttctgctagcttttgaatgtgtttgctcttgcttctctagttcttttaattatgatgttagggtgtcaattttagacctttcctgctttctcttgtgggcatttagtgctataaatttccctctacacactgctttgaatgtgtcccagagattctggtatgttgtgtctttgttctcgttggtttcaaagaacttctttatttctgccttcattttgttatgtacccagtagtcattcaggagcaggttgttcagtttccatgtagttgagtggttttgagtgagtttcttaatcctgagttctagtttgattgcactgtggtctgagagacagtttgttataatttctgttcttttccatttgctgaggagtgctttacttccaactatgtggtcaattttggaataggtgtggtgtggtgctgaaaaaaatgtatattctgttgatttggggtggagagttctgtagatgtctattaggtctgcttggtgcagagctgagttcaattcctggatatctttgttaactttctgtctcgttgatctgtctaacgttgacagtggggcgttaaagtctcccatgattattttgtgggagtctaactctctttgtaggtcactcaggacttgctttatgaatctaggtgctcctgtattgggcgcatatatatttaggatagttagctcttcttgttgaattgatccctttaccattatgtaatggccttctttgtctcttttgatctttgttggtttaaagtctgttttatcagagactaggattgcaacccctgccttttttgttttccatttgcttggtagatcttcctccatctttttattttgagcctatgagtgtctctgcacgtgagatgggtttcctgaatacagcacacagatgggtcttgactctttatccaatttccaatctgtgtcttttaattggagcatttagcccatttacatttaaggttaatattgttatgtgtgaatttcatcctgtcattatgatgttagctggttattttgcttgtttattgatgcagtttcttcctagcctcgatagtctttagaatttggcatgtttttgcagtggctggtaccagttgctcctttccatgtttagtgcttccttcaggagctcttttagggcaatcctggtgctgacaaaatctctcagcatttgcttgtctgtaaagtattttatttctccttcacttatgaagcttagtttggctggatatgaaattctgggttgaaaattcttttctttaagaatgttgaatattggcccccactctcttctggcttgtagggttttggccgagagatcagctgttagtctgatgggcttccctttgtgggtaacccaacctttctctctggctgcccttaacattttttccttcatttcaactttggtgaatctgacaattatgtgtcttggagttgctcttctccaggagtatctttatggcgttctctgtatttcctgaatttgaatgttggcctgccttgctagattggggaagttctcctggataatatcctgcagagtgttttccaacttggttccattctcccgtcactttcaggtacaccaatcagaggtagatttggtcttttcacatagtcccatatttcttggaggctttgttcgtttcttttcattctcttttctctaaatttctcttcttgcttcatttcattcatttgatcttccatcactgataccctttcttccagttgatcgaatcggctactgagacttgtgcattcatcacgtatttcttgtgccgtggttttcagctccatcaggtcctttaaggacttctctgcattggttattctagttagccattcatctaatctcttttcaaggtttttaacttctttgccatgggttcaaacttcctcctttagctcggagtagtttgatcatctgaagccttcttctgtcaactcgtcaaagtcattctctgtccagctttgttctgttgctggtgaggagctgcattcctttggaggaggagaggtgcttagatttttagaattttcagtttttctgctgttttttccccatctttgtggttttatctacctttggtctttgatgatggtgacatacagatggggttttggtgtggatgtcctttctgtttgttagttttccttccaacatttgggaccctcagctgcaggtctgttggagtctgctggaggtccacttcagaccctgtttgcctcggtattagcagcagaggctccagaacagtggatattggtgaacagcaaatgttgctgtctgatcgttcctctggaagttttgtctcagag

SEQ ID NO: 10484 - DNA, 6176 bp, Homo sapiens
cttttttttaaattttattttattattattatactttaagttttagggtacatgtgcacaatgtgcaggttagttacatatgtatacatgtgccatgctggtgtgctgcacccattaactcatcatttagcattaggtatatctcctaatgctattcctaccccctccctccaccccacaatagtccccagagtgtgatgttccccttcctgtgtccaggtgttctcattgttcaattcccacctatgagtgagaacatgtggtgtttggttttttgtccttgcgatagtttactgagaatgacggatttccagtttcatccatgtccctacaaaggacatgaactcatccttttttatggttgcatagtattccctggtgtatatgtgccacattttcttaatccagtctatcgttgttggacatttgggttggttccaagtctttgctattgtgaatagtgccacaataaacatacatgtgcatgtgtctttatagcagcatgatttataatcctttgggtaaatacccagtaatgggatggctgggtcaaatggtatttctagttctagatccctgaggaatcgccacactgacttccacaatggttgaactagtttacagtcccaccaacagtgtaaaagtgttcctatttctccacatcctctccagcacctgttgtttcctgactttttaatgattgccattctaactcgtgtgagatggtatctcattgtggttttgatttgcatttctctgatggccagtgatggtgagcattttttcatgtgtttgttggctgcataaatgtcttcttttgagaagtgtctgttcatgtcctttgcccactttttgatggggttgtttgtttttttcttgtaaatttgtctgagttcattgtagattctggatattagccctttgtcagaggagtaggttgtgaaaattttctcccattttgtaggttgcttcttcactctgatggtagtttcttttgctgtgcagaagctctttagtttaatgagatcccatttgtcaattttgtcttttgttgccattgcttttggtgttttagacatgaagtccttgcccatgcctatgtcctgaatggtaatgcctaggttttcttctagggtttttatggttttaggtcaacgtttaagtctttaatccatcttgaattgatttttgtataaggcataaggaagggatccagtttcagctttctacatgtggctagccagttttcccagcaccatttattaaatagggaatcctttccccattgcttgtttttctcaggtttgtcaaagatcagatagttgtagatatgcggcgttatttctgagggctctgttctgttccattgatctatatctctgttttggtaccagtaccatgctgttttggttactgtagccttgtagtatagtttgaagtcaggtagcatgatgcctccagctttgttcttttggcttaggattgacttggcgatgcgggctcttttttggttccacatgaactttaaagtagttttttccaattctgtgaagaaagtcattggtcacttgatggggatggcattgaatctgtaaattaccttgggcagtatggccattttcacgatattgattcttcctacccatgagcatggaatgtcctcccatttgtttgtatcctcttttatttccttgagcagtggtttgtagttctccttgaagaggtccttcacgtcccttgtaagttggattcctagctattttattctatttgaagcaattgtgaatgggagttcactcatgatttggctctctgtttgtctgttattggtgtataagaatgcctgtgatttttgtacattgattttgtatcctgagactttgctgaatttgcttatcagcttaaggagattttgggctgagacgatggggttttctagatatacagtcatgtcatctgtaaacagggacaatttgacttcctcttttcctaattgaataccctttatttccttctcctgcctaattgccctggccagaacttccaacactacattgaataggagtggtgagagagggcatccctgtcttgtgccagttttcaaagagaatgcttccagtttttgcccattcagtatgatattggctgtgggtttgtcatagatagctcttattattttgaaatacgtcccatcaatacctaatttattgagagtttttagcatgaagggttgttgaattttgtcaaaggccttttctacatctattgagataatcatgtggtttttgtctttggttctgtttatatgctggattacatttattgatttgcatatattgaaccagccttgcatcccagggatgaagcccacttgatcatggtggataagctttttgatgtgctgctggaatcggtttgccagtattttattgaggatttttgcatcaatgttcatcaaggatattggtctaaaattctctttattggttgtgtctctgcccggctttggtatcaggatgatgctggcctcataaaatgagttagggaggattccctctttttctattgattggaatagtttcagaaggaatggtaccagttcctccatgtacctctggtagaattccgctgtgaatccatctggtcctggactctttttggttggtaagctattgattattgccacaatttcagagcctgttattggtctattcagagattcaacttcttcctggtttagtcttgggagggtgtatgtgtcgaggaatttatccatttcttctagattttctagtttatttgtgtggaggtgtttgtagtattctctgatggtagtttgtatttctgtgggatcggtggtgatatcccctttatcattttttattgcctctatttggttcttctctcttttcttctttattagtcttgctagcggtctatcaattttgttgatcctttcaaaaaaccagctcctgaattcattaattttttgaagggttttttgtgtctctatttccttcagttctgctctgattttagttatttcttgccttctgctagcttttgaatgtgtttgctcttgcttttctagttcttttaattgtgatgttagcgtgtcaattttagatatttcctgctttctcctgtgggcatttagtgctataaatttccctctgcacactgctttggatgtgtcccagagattctggtatgttgtgtctttgttctcatcagtttcaaagaacatctttatttatgccttcatttcattatgtacccagtagtcattcaggagcaggttgttcagcttccatgtagttgagtggttttgagtgagtttcttaatcctgagttctagtttgattgcactgtggtctgagagacagtttgttataatttctgttcttttacatttgctgaggagagctttacttccaactatgtggtcaattttggaatagttgtggtgtggtgctgaaaaaaatgtatattctgttgatttggggtggagagttctgtagatgtctattagatccacttggtgcagagctgagttcaattcttgggtatccttgttaactttctttcttgttgatctgtctaatgttgacagtgaggtgttaaagtctctcattattattgtgtgggagtctaagtcctttcgtaggtcactcaggacttgctttataaatctggttgctcctgtattgggtgcatatatatttaggatagttagctcttcttgttgaattgatccctttaccattatgtaatggtcttctttgtctcttttgatctttgttggtttaaagtctgttttatcagagactaggattgcaacccctgcctttttttgttttccatttgcttggtagatcttcctccatccttttattttgagcctatgtgtgtctctgcatgtgagatgggtttcctgaatacagcgcactgatgaatcttgactctttatccaatttgccagtccgtgtcttttaattggagcatttagtccatttacctttaaagttaatactgttatgtgtgaatttgaacctgtcattatgatgttagctggttattttgctcattagttgatgcagttgcttcctagcctcgatggtctttacaatttggcatgattttgcagcagctggtaccggttgttcctttccatgtttagtgcttccttcaggagctcttttagggcaggcctggtggtgacaaaatctctcggcatttgcttgtctgtaaagtattttatttctccttcacttatgaagcttagtttgtctggatatgaaattgtgggttgaaaattcttttctttaggaatgttgaatattggcccccacactctcctggcttgtagagtttctgccaagagatccactgttagtctgatgggcttccctttgtgggtaacctgacctttctctctggctgcccttaacattttttccttcatttcaactttggtgaatctgacaattatgtgtcttggagttgctcttctcgaggagtatctttgtggtgttctctgtatttcctgaatctcactgttggcctgccttgctagattggggaagttctcctggataatatcctgcagcgtgttttccaacttggttccattctccccgtcactttcaggtacaccagtcagacgtagatttggtcttttcatatagtcccatatttcttggaggctttgttcatttctttttatgcttttttctctaaacttcccttcttgcttcatttcattcatttcatcttccatcactgataccctttcttccagttgatcgcatcagctcctgaggcttctgcattcttcatgtagtcctcgagccttggctttcagctacatcagctcctttaagcacttctctgtattggttattctagttatacattcgtgaaaattgttttcaaagttttgaacttctttgcctttggtttgaatttcctcctgtagctcggagtagtttgatcatctgaagccttcttctctcaacctgtcaaagtcattctccatccagctttgttccgttgctggtgaggaactgtgttcctttggaggaggagaggcactctgctttttagagtttccagtttttctgctctgtcttttccccatctttgtggttttatctacttttggtctttgatgatgttgatgtacatcatcatgggtttttggtgtgaatgtcctttctgtttgttagttttccttctaacagacaggaccctcagctgcaggtctgttggagtttgctagaggtccactccagaccctgtttgcctgggtatcagcagcggtggctgcagaacagcggatttttgtgaaccgcgaatgctgctgtctgatcattcctctggaagttttgtctcagaggagtacccggccatgtgaggtgtcagtctgcccctaccgggggctgcttcccagttaggctgctcatgggtcaggggtcagggacccacttgaggaggcagtctgcccgttttcagatctccagctgcatgcggggagaaccactgctctcttcaaagctgtcagacagggacatttaagtctgcagaggtttctgctgtctttttatttgtctgtgccctgcccccagaggtggagcctacagaggcaggcaggcctccttgagctgtggtgggctccacccagttcgagcttcctggctgctttgtttacctatgcaagcctgggcaatggcaggtgcccctcccccagcctcgctgccaccttgcagtttgatctcagactactgtggtagcaatcggcgagactctgtgggtgtaggaccgcccgagccatgtgcgggatataatctactggtgcgccgtttttaaagcccatcagaaaagtgcagtattaggtagggagtgacccgattttccaggtgccgtctgtcacccctttctttgactaggaaagggagctccctgaccccttgcgcttcccgagtgaggcaatgccttgccctgcttcggctggcacacgttgcgctgcacccactgtcgtgcgcccactgtctggcactccctagtgagatgaacctggtacctcagatggaaacgcagaaatcacctgtcttctgcgtcgctcatgctgggagctgtagactggagctcttcctattcggccatcttggctgcca

SEQ ID NO: 10485 - DNA, 6175 bp, Homo sapiens
cttttttttaaattttattttattattattatactttaagttttagggtacatgtgcacaatgtgcaggttagttacatatgtatacatgtgccatgctggtgtgctgcacccattaactcatcatttagcattaggtatatctcctaatgctattcctaccccctccctccaccccacaatagtccccagagtgtgatgttccccttcctgtgtccaggtgttctcattgttcaattcccacctatgagtgagaacatgtggtgtttggttttttgtccttgcgatagtttactgagaatgacggatttccagtttcatccatgtccctacaaaggacatgaactcatccttttttatggttgcatagtattccctggtgtatatgtgccacattttcttaatccagtctatcgttgttggacatttgggttggttccaagtctttgctattgtgaatagtgccacaataaacatacatgtgcatgtgtctttatagcagcatgatttgtagtcctttgggtaaatacccagtaatgggatggctgggtcaaatggtatttctagttctagatccctgaggaatcgccacactgacttccacaatggttgaactagtttacagtcccaccaacagtgtaaaagtgttcctatttctccacatcctctccagcacctgttgtttcctgactttttaatgattgccattctaactcgtgtgagatggtatctcattgtggttttgatttgcatttctctgatggccagtgatggtgagcattttttcatgtgtttgttggctgcataaatgtcttcttttgagaagtgtctgttcatgtcctttgcccactttttgatgggttgtttgtttttttcttgtaaatttgtttgagttcattgtagattctggatattagccctttgtcagaggagtaggttgtgaaaattttctcccattttgtaggttgcttcttcactctgatggtagtttcttttgctgtgcagaagctctttagtttaatgagatcccatttgtcaattttgtcttttgttgccattgcttttggtgttttagacatgaagtccttgcccatgcctatgtcctgaatggtaatgcctaggttttcttctagggtttttatggttttaggtcaacgtttaagtctttaatccatcttgaattgatttttgtataaggcataaggaagggatccagtttcagctttctacatgtggctagccagttttcccagcaccatttattaaatagggaatcctttccccattgcttgtttttctcaggtttgtcaaagatcagatagttgtagatatgcggcgttatttctgagggctctgttctgttccattgatctatatctctgttttggtaccagtaccatgctgttttggttactgtagccttgtagtatagtttgaagtcaggtagcatgatgcctccagctttgttcttttggcttaggattgacttggcgatgcgggctcttttttggttccacatgaactttaaagtagttttttccaattctgtgaagaaagtcattggtcacttgatggggatggcattgaatctgtaaattaccttgggcagtatggccattttcacgatattgattcttcctacccatgagcatggaatgtcctcccatttgtttgtatcctcttttatttccttgagcagtggtttgtagttctccttgaagaggtccttcacgtcccttgtcagttggattcctagctattttattctatttgaagcaattgtgaatgggagttcactcatgatttggctctctgtttgtctgttattggtgtataagaatgcctgtgatttttgtacattgattttgtatcatgagactttgctgaatttgcttatcagcttaaggagattttgggttgagacgatggggttttctagatatacagtcatgtcatgtgtaaacagggacaatttgacttcctcttttcctaattgaataccctttatttccttctcctgcctaattgccctggccagaacttccaacactacattgaataggagtggtgagagagggcatccctgtcttgtgccagttttcaaagagaatgcttccagtttttgcccattcagtatgatattggctgtgggtttgtcatagatagctcttattattttgaaatacgtcccatcaatacctaatttattgagagtttttagcatgaagggttgttgaattttgtcaaaggccttttctacatctattgagataatcatgtggtttttgtctttggttctgtttatatgctggattacatttattgatttgcatatattgaaccagccttgcatcccagggatgaagcccacttgatcatggtggataagctttttgatgtgctgctggaatcggtttgccagtattttattgaggatttttgcatcaatgttcatcaaggatattggtctaaaattctctttattggttgtgtctctgcccggctttggtatcaggatgatgctggcctcataaaatgagttagggaggattccctctttttctattgattggaatagtttcagaaggaatggtaccagttcctccatgtacctctggtagaattccgctgtgaatccatctggtcctggactctttttggttggtaagctattgattattgccacaatttcagagcctgttattggtctattcagagattcaacttcttcctggtttagtcttgggagggtgtatgtgtcgaggaatttatccatttcttctagattttctagtttatttgtgtggaggtgtttgtagtattctctgatggtagtttgtatttctgtgggatcggtggtgatatcccctttatcattttttattgcctctatttggttcttctctcttttcttctttattagtcttgctagcggtctatcaattttgttgatcctttcaaaaaaccagctcctgaattcattaattttttgaagggttttttgtgtctctatttccttcagttctgctctgattttagttatttcttgccttctgctagcttttgaatgtgtttgctcttgcttttctagttcttttaattgtgatgttagcgtgtcaattttagatatttcctgctttctcctgtgggcatttagtgctataaatttccctctgcacactgctttggatgtgtcccagagattctggtatgttgtgtctttgttctcatcagtttcaaagaacatctttatttatgccttcatttcattatgtacccagtagtcattcaggagcaggttgttcagcttccatgtagttgagtggttttgagtgagtttcttaatcctgagttctagtttgattgcactgtggtctgagagacagtttgttataatttctgttcttttacatttgctgaggagagctttacttccaactatgtggtcaattttggaatagttgtggtgtggtgctgaaaaaaatgtatattctgttgatttggggtggagagttctgtagatgtctattagatccacttggtgcagagctgagttcaattcttgggtatccttgttaactttctttcttgttgatctgtctaatgttgacagtgaggtgttaaagtctctcattattattgtgtgggagtctaagtcctttcgtaggtcactcaggacttgctttataaatctggttgctcctgtattgggtgcatatatatttaggatagttagctcttcttgttgaattgatccctttaccattatgtaatggccttctttgtctcttttgatctttgttggtttaaagtctgttttatcagagactaggattgcaacccctgcctttttttgttttccatttgcttggtagatcttcctccatccttttattttgagcctatgtgtgtctctgcatgtgagatgggtttcctgaatacagcgcactgatgaatcttgactctttatccaatttgccagtccgtgtcttttaattggagcatttagtccatttacctttaaagttaatactgttatgtgtgaatttgaacctgtcattatgatgttagctggttattttgctcattagttgatgcagttgcttcctagcctcgatggtctttacaatttggcatgattttgcagcagctggtaccggttgttcctttccatgtttagtgcttccttcaggagctcttttagggcaggcctggtggtgacaaaatctctcggcatttgcttgtctgtaaagtattttatttctccttcacttatgaagcttagtttgtctggatatgaaattgtgggttgaaaattcttttctttaggaatgttgaatattggcccccacactctcctggcttgtagagtttctgccaagagatccactgttagtctgatgggcttccctttgtgggtaacctgacctttctctctggctgcccttaacattttttccttcatttcaactttggtgaatctgacaattatgtgtcttggagttgctcttctcgaggagtatctttgtggtgttctctgtatttcctgaatctcactgttggcctgccttgctagattggggaagttctcctggataatatcctgcagcgtgttttccaacttggttccattctccccgtcactttcaggtacaccagtcagacgtagatttggtcttttcatatagtcccatatttcttggaggctttgttcatttctttttatgcttttttctctaaacttcccttcttgcttcatttcattcatttcatcttccatcactgataccctttcttccagttgatcgcatcggctcctgaggcttctgcattcttcatgtagtcctcgagccttggctttcagctacatcagctcctttaagcacttctctgtattggttattctagttatacattcgtgaaaattgttttcaaagttttgaacttctttgcctttggtttgaatttcctcctgtagctcggagtagtttgatcatctgaagccttcttctctcaacctgtcaaagtcattctccatccagctttgttccgttgctggtgaggaactgtgttcctttggaggaggagaggcactctgctttttagagtttccagtttttctgctctgtcttttccccatctttgtggttttatctacttttggtctttgatgatgttgatgtacatcatcatgggtttttggtgtgaatgtcctttctgtttgttagttttccttctaacagacaggaccctcagctgcaggtctgttggagtttgctagaggtccactccagaccctgtttgcctgggtatcagcagcggtggctgcagaacagcggattttcgtgaaccgcgaatgctgctgtctgatcattcctctggaagttttgtctcagaggagtacccggccatgtgaggtgtcagtctgcccctaccgggggctgcttcccagttaggctgctcatgggtcaggggtcagggacccacttgaggaggcagtctgcccgttttcagatctccagctgcatgctgggagaaccactgctctcttcaaagctgtcagacagggacatttaagtctgcagaggtttctgctgtctttttatttgtctgtgccctgcccccagaggtggagcctacagaggcaggcaggcctccttgagctgtggtgggctccacccagttcgagcttcctggctgctttgtttacctatgcaagcctgggcaatggcaggtgcccctcccccagcctcgctgccaccttgcagtttgatctcagactactgtggtagcaatcggcgagactctgtgggtgtaggaccgcccgagccatgtgcgggatataatctactggtgcgccgtttttaaagcccatcagaaaagtgcagtattaggtagggagtgacccgattttccaggtgccgtctgtcacccctttctttgactaggaaagggagctccctgaccccttgcgcttcccgagtgaggcaatgccttgccctgcttcggctggcacacgttgcgctgcacccactgtcgtgcgcccactgtctggcactccctagtgagatgaacctggtacctcagatggaaacgcagaaatcacctgtcttctgcgtcgctcatgctgggagctgtagactggagctcttcctattcggccatcttggctgcca

SEQ ID NO: 10486 - DNA, 6043 bp, Homo sapiens
gtattaattaaaatttttttttaatattattatactttaagttttagggtacatgtgcacattgtgcaggttagttacatgtgtatacgtgtgccatgctggtgtgctgcacccactaactcctcatctagcattaggtatatctcccaatgctatccctccccctccccccaccccacaacagtccccagagtgtgatattccccttcctgtgtccatgtgatctcattgttcaattcccacctatgagtgagaatatgcggtgtttggttttttgttcttgcgatagtttactgagaatgatgatttccaatttcatccatgtccctacaaagtacatgaactcatcattttttatggccgcataatattccatggtgtatatgtgacacattttcttaatccagtctatccttgttggacatttgggttggttccaagtctttgctattgtgaataatgccgcaataaacatacgtgtgcgtgtgtctttatagcagcatgatttatagtcctttgggtatatacccagtaatgggatggctgggtcaaatggtatttctagttctagatccctgaggaatcaccacactgacttccacaatggttgaactagtttacagtcccaccaacagtgtaaaagtgttcctatttctccacatcctctccagcacctgttgtttcctgactttttaatgattgccattctaactggtgtgagatggtatctcattgtggttttgatttgcatttctctgatggccagtgatgatgaacattttttcatgtattttttggctgcataaatgtcttcttttgagaagtgtctgttcatgtccttcacccactttttgatggggttgtttgtttttttcttgtaaatttgttggagttcattgtagattctggatattagccctttgtcagatgagtaggttgcgaaaattttctcccattttgtaggttgcccgttcactctgatggtagtttcttttgctgtgcagagctctttagttaattagatcccatttgtcaatttttgtcttttgttgccattgcttttggtgttttagacatgaagtccttgcccatgcctatgtcctgaatggtaatgcctaggttttcttctagggtttttatagttttaggtctaacgtttaagtctttaatccatcttgaattgatttttgtataaggtgtaaggaagggatccagtttcagctttctacatatggctagccagttttcccagcaccatttattaaatagggaatcctttctctattgcttgtttttgtcaggtttgtcaaagatcagatagttgtagatatgtggcgttatttctgagggctctgttctgttccattgatctatatctctgttttggtaccagtaccatgctgttttggttacggtagccttgtagtatagtttgaagtcaggtagtgtgatgcctccagctttgttcttttggcttaggattgacttggcgatgtgggctcttttttggttccatatgaactttaaagtagttttttccaattctgtgaagaaagtcattggtagcttgatggggatggcattgaatctataaattaccttgggcagtatggccattttcacgatattgattcttcctacccatgagcatggaatgttcttccatttatttgtatcctcttttatttccttgagcagtggattgtagttctccttgaagaggtccttcacatcccttgtaagttggattcctaggtattttattctctttgaagcaattgtgaatgggagttcactcataatttgtctctctgtttgtctgttgttggtgtataagaatgcttgtgatttttgtacattgattttgtatcctgagactttgctgaagttgctgctcagcttaaggagattttgggctgagacaatggggttttctagatatacaatcatgtcatctgcaaacagggacaatttgacttcctcttttcctaattgaataccctttatttccttcttctgcctaattgccctggccagaacttccaacactatgttgaataggagtggtgatagaggacatccctgtcttgtgccagttttcaaagggaatgcctccagtttttgcccattcagtatgatattgcctgtgggtttgtcatagatagctcttatgattttgaaatacgtcccaacagtacctaatttattgagagtttttagcatgaagggttgttgaattttgtcaaaggctttttctgcatctattgagataatcatgtggtttttgtctttggctctgtttatatgctggattacatttattgatttgcgtatattgaaccagccttgcatcccagggatgaagcccacttgatcatggtggataagctttttgatgtgctgctggattcgttttgccagtattttattgaggatttttgcatcaatgttcttcaaggatattggtctaaaattctctttttttgttgtgtctctgcctggctttggtatcagaatgatgctggcctcataaaatgagttagggaggattctctcttttcctattgattggaatagtttcagaaggaatggtaccagttcctccttgtacctctggtagaattcggctgtgaatccatctggtcctggactctttttggttggtaagctattgattattgccacaatttcagatcctgttattggtctactcagagattcaacttcttcctggtttagtcttgggagagtgtatgtgtcgaggaatttatccatttcttctagattttctagtttatttgcatagaggtgtttgtagtattctctgatggtagtttgtatttctgtgggattggtggtgatatcccctttatcattttttattgtatctatttgattcttctctctttttttctctattagtcttgctagcagtctatctattttgttgatcctttccaaaaaccaggtcctggattcattaattttttgaagggttttttgtgtctctatttccttcagttctgttctgattttagttatttcttgccttctgctagcttttgaatgtgtttgttcttgcttttctagttcttttaattgtgatgttagggtgtcaattttggatctttcctgctttctcttgtgggcatttagtgctataaatttccctctacacgctgctttgaatgcatcccagagattctggtatgttgtgtctttgttctcgttggtttcaaagaacatctttatttctgccttcatttcgttatgtacccagtagtcattcaggagcaggttgttcagtttccacgtagttgagcggttttgagtgagattcttaatcctgagttctagtttgattgcactgtggtctgagagatagtttgttataagttatgttcgtttatatttgctgaggagagctttacttccaaatatgtgatcaattttggaataggtgtggtgtggtgctgaaaaaaatgtatattctgttgatttggggtggagagttctgtagatgtctattaggtctgcttggtgcagagctgagttcaattcctgggtatccttgttgactttctgtctcgttgatctgtctaatgttgacagtggggtgttaaagtctcccattattaatgtgtgggagtctaagtctctttgtaggtcactcaggacttgctttatgaatctggttgatcctctattgggtgcatatatatttaggatagttagctcttcttgttgaattgatccctttaccattatgtaatggccttctttgtctcttttgatctttgttggtttaaagtctgttttattagagactaggattgcaacccctgcctttttttgttttccatttgcttggtagatcttccttcatccttttattttgagcctatgtgtgtctctgcacgtgaggtgggtttcctgaatacagcacactgatgggtcttgactctttatccaatttgccagtctgtgtcttttaattggagcatttagtccatttacatttaaagttaatattgttatgtgtgaatttgatcctgtcattatgatgttagctggttattttgctcgttagttgatgcagtttcttcctagtctcgatggtctttacattttggcatgattttgcagcggctggtaccggttgttcctttccatgtttagcacttccttcaggagctcttttagggcaggcctggtggtgacaaaatctctcagcatttgcttgtctgtaaaggattttatttctccttcacttatgaaacttagtttggctggatatgaaattctgggatgaaaattcttttctttaagaatgttgaatattggcccccactctcttctggcttgtagggtttctgccgagagatctgctgttagtctgatgggcttccctttgagggtaacccgacctttctctctggctgcccttaacattttttccttcatttcaactttggtgaatctgacaattatgtgtcttggaattgctcttctcgaggagtatctttgtggcgttctctgtatttcctgaatctgaacgttgccctgccttgatagattggggaagttctcctggataatatcctgcagagtgttttcccacttagttccattctccccatcactttcaggtacaccaatcagacgtagatttggtcttttcacatagtcccatatttcttggaggctttgctcatttctttttattcttttttctctaaccttcccttctcacttcatttcattcatttcgtcttccattgctgataccctttcttccagttgattgcatcggctcctgagacttctgcattcttcacatagttctcgagccttggttttcagctccatcaactcctttaagcacttctctgtattggttattctagttatacattcttctaaatttttttcaaagttttcaacttctttccctttggtttgaatgtcctcccgtagctcagagtaatttgatcgtctgaagtcttcttctctcatctcctcaaagtcattctccatccagctttgttccgttgctggtgaggagctgcattcctttggaggaggagaggtgctctgctttttagagtttccagtttttctgttctgttttttccccatttttgtggttttatctacttttggtctttgatgatggtgatgtacagatgggtttttggtgtggatgtcctttctgtttgttagttttccttctaacagagaggaccctcagctgcaggtctgttggagtaccctgccgtgtgaggtgtcagtgtgcccctgctggggggtgcctcccagttaggctgctcaggggtcaggggtcagggacccacttgaggaggcagtctgcccgttctcagatctccagctgcgtgctgggagaactacggctctcttcaaagctgtcagacagggacatttaagtctgcagaggttactgctgtctttttgtctgggccctgcccccagaggtggagcctacagaggcaggcaggcctccttgagctgtggtgggctccacccagttggagcttcctggctgctttgtttacctaatcaagcctgggcaatggcgggcgcccctcccccagcctcgctgccaccttgcagtttgatctcagacagctgtgctagcaatcagcgagactccgtgggcgtaggaccctccaagcgaggtgcgggatataatctcatggtgcactgttttttaagcccgtcggaaaagcgcagtattcgggtgggagtgacccgattttccaggtgctgtccgtcacctctttctttgactaggaaagggaactccctgaccccttgcgcttcccgagtgaggcaatgcctcgccttgctttggccctcgcacggtgcacgcacccactggcctgcgcccactgtctggcactccctagtgagatgagcccggtacctcagatggaaatgcagaaatcacccatcttctgcgtcgctcatgctgggagctgtagatgggagctgttcctattcggccatcttggcttctccccct

SEQ ID NO: 10487 - DNA, 776 bp, Homo sapiens; identical to SEQ ID NO: 5231
  SITE (709): n equals a,t,g, or c
  SITE (738): n equals a,t,g, or c

SEQ ID NO: 10488 - DNA, 5585 bp, Homo sapiens
ctttttttttctttttattttattattattatactttaagttttagggtacatgtgcacaacgtgcaggtttgttacatatgtatacatgtgccatgttggtgtgctgcacccattaactcgtcatttagcattgggtatatctcctaatgctatccctccccccttcccccaccccacaacagtccccactctgtgatgttccccttcctgtgtccatgtgttctcactgttcaattcctacctatgagtgagaacatgcagtgtttggtattttgtccttgagatagtttgctgagaatggtggtttccagattcatccatgtccctacaaaagacatgaactcatcattttttatggctgcatagtattccatggtgtatatgagccacattttcttaattcagtctattgtttttggacatttacattggttccaagtcattgctattgtgaatagtgcttctataaacctatgtgtgcatgtgtctttacagcagcatgatttataatcctttgggtatatacccagtactgggatggctgggtcaaatggtatttctagttctagatccctgagggattgcctcactgacttccacaatggttgaagtagtttatagtcccaccaacagtgtaaaagtgttcctgtttctccacatcctctccagcacctgttgtttcctgactttttaatgatcaccattctaactggtgtgagctggtatctcattgtgtttttgatttgcatttctctgacggccagtgatagtgagcattttttcatgtgttttttggctgcataaatgtcttcttttgagaagtgtctgttcatgtccttcgcccactttttgatggggttgtttgatttttttcttctaaatttgtttgagttcattgaagattctggatattagccctttgtcagatgagtagattgcaaaaattttctcccattctgtaggttgtctgttcactctgatggtagtttcttttgctgtgcagaagctctttagtttaattagaacccatttgtcaattttggcttttgttgccattgcttttggtgttttagacatgaagtccttgcccatgcctatgtcctgaatggtattacctaggttttcttctagcgtttttatggttttaggtctaacatttaagtctttaatccatcttgaattaatttttgtatagggtgtaaggaagggatccagtttcagctttctacatatggctaggcagttttcccagcaccatttattaaatagggaatcctttccccattgcttgttcttgtcaggtttgtcaaagatcagatagttgtagatatgtggcattatttctgagggctctgttccattccattggtctatatctctgttttggtaccagtaccatgctattttggttactgtagccttgaagtatagtttgaagtcaggtagtgtgatgcctccggctttgttcttttggcttaggattgacttggcaatgcaggttcttttttggttccatatgaactttaaagtagttttttccaattctctgaagaaagtcattggtagcttgatggggatggcattgaatttataaattaccttgggcagtatggccattttcacgatattgattcttcctacccatgagcatggaatgttcttccatttctttgtatcctcttttatttcactgaacagtggtttatagttctccttgaagaggtccttcacatcccttgtaagttggattcctaggtattttattctctttgtagcaattgtgaatgggagttcactcatgatttggctctctgtttgtttgttattggtgtataagaatgcttgtgatttttgtacattgattttgtatcctgagactttgctgaagttgcttatcagcttgaggagattttgggctgagacaatggggttttctagatatacaatcatgtcatctgcaagcagggacaatttgacttcctcttttcctaattgagtaccgtttatttccttctcctgcctgattgccctggccagaacttccaacactatgttgaataggagtggtgagagagggcatccctgtcttgtgccagttttcaaagggaatgcttccagtttttgcccattcagtatgatattggctgtgggtttgtcatagatagctcttattattttgagatacatcccatcaatacctaatttattgagagtttttagcatgaaggttgttcaattttgtcaaaggccttctctgcatctattgagaaaatcatgtggtttttgtctttggttctgtttatatgctggattacatttattgatttgcatatgttgaaccagccttgcatcccagggatgaagcccacttgattatggtggataagctttttgatgtgctgctgtattcggtttgccagtattttattgaggatttttgcatcaatgttcatcaaggatattggtctaaaattctcttttttggttgtatctctgccaggcttttgtatcaggatgatgctggcctcataaaatgagttatggaggattccctctttttctattgattggaatagtttcagaaggaatggtaccagcttctcctttcacctctggtagaattcggctgtgaatccatctggtcctggactttttttggttggtaagctattgattattgcctcaatttcagatcctgttattggtctattctgagattcaacttcttcctgctttagtcttgggaggatgtatgtgtcgaggaatttatccatttcttctagattttctagtttatttgtgtagagatgtttatagtattctctgatggtagtttgtatttctgtgggatcagtggtgatatcccctttatcattttttattgtgtctatttgattcttctctcttttcttctttattagtcttgctagtggtctatcgattttgttgatctcttcagaaaatcagctcctggattcattaattttttgaagggttttttgtgtctctatttccttcagttctgctctgattttagttatttcttgccttctgctagcttttgaatgtgtttgctcttgcttttctagttcttttaattgtgatgttagggtgtcaattttagatctttcctgctttctcttgtgggcatttagtgctataaatttccctctacatactgctttgaatgtgtcccagagattctggtatgttgcgtctttgttctcgttggtttcaaagaacatctttatttctgccttcatttctttacttacccagtagtcattcaggagcaggttgttcagtttccatgtagttgagcggttttgagtgagtttcttaatcctgagttccattttgattgcactgtggtctgagaggcagtttgttgtaatttctgttcttttacatctgctgaggagtgctttacttccaactatgtggtcaattttggataggtgtggagaggtgctgaaaagaatgtatattctgttaatttggggtggagagttctgtagatgtctattaggtccgcttggtgcagagctgagttcagttcctgggtatccttgttaactttctgtctcgttgatctgtctaatgttgacagtggggtgttaaagtctcccattactattgtgtgggagtctaagtctctttgtatgtcactaaggacttgctttatgaatctgggtgctcctgtattgggtgcatatacatttaggatagttagctcttcttgctgaattaatccctttaccattatgtaatggccttctttgtctcttttgatctttgttggtttaaagtctgttttatcagagactaggattgcaacccctgccttcttttgttttccatttgcttggtagatcttcctccatccctttattttgagcctatatgtgtctctgcatgtgagatgggtttcctgaatacagcacactgatgggtcttgactctttatccaatttgccagtctgtgtcttttaattggagcatttagcccacttacatttaaagttaatattgttatgtgtgaatctgatgttgtcattatgatgttagctggttattttgctcgttagttgatgcagtttcttcctagccttgatggtctttacaatttggcatatttttgcagtggctggtaccagttgttcctttccatgtttagtgcttccttcaggagctcctttagggcaggcctggtggtgacaaaatctctcagcatttgcttgtctgtaaaggattttattgctccttaacttatgaagcttagtttggctgcatatgaaattctgggttgaaaattcttctctttaagattgttgaatattggtccccactctcttctggcttgtagagtttctgccgagagatccactgttagtctgatgggcttccctttgtgggtaacctgacctttctctctggctgcccttaacatttttttccttcatttcaactttggtgaatctgacaattatgtgtcttggagttgctcttctcgaggagtatctttgtggcgttctctgtatttcctgaatctgaatgttggcctgccttgctagattggggaagttctcctggataatatcctgcagagtgttttccaacttggctccattctccccgtcactttcaggtacaacaatcagacgtagatttggtcttttcacatagtcccatatttcttggaggctttgttcatttctttttattcttttttctctatacttctcttctcacttcagttcattcatttcgtcttccatcactggtaccctttcttccagttgatcgcatcggctactgaggcttctgcattcgtcatgtcctctcgtgccttggttttcagctccatcaggtccttcaaggacttctctgcattgattattctagttatccattcgtctaattttttttcaaagcttttaacttctttgccattggtttgaatttcctcctgtagctcagagtagtttgatcttctgaacccttcttctctcaactcgtcaaagtcattctctgtccagctttgttccattgctggtgaggagctgcgttcctttggaggaggaaaggcgctcggatttttagagtttccagtttttctgctctgtttatttcccatctttgtggttttacctacctttgctctttgatgatggtgacgtacagaagggtttttggtgtggctgtcctttctgtttgttagttttccttctaacagacaggaccctcagctgcaggtctgttggagtttgctagaggtccactccagaccctgtttgcctgggtatcagcagtggtggctgcagaacagtggatattggtgaaccgcaaatgctgctgcctgatggttcctctggaagttttgtctcagaggagtacctggccgtgtgaggtggcagtccgcccctactggggggtgactcccagttaggctactcgggggtcagggacccatttgatgaggcagtctgcccattctcagatctcaagctgcgtgctgggagaaccactactctcttcaaagctgtcagacagggacatttaagtctgcagaggttactgctg

SEQ ID NO: 10489 - DNA, 6085 bp, Homo sapiens
ttcttttttttttttatttcttgtttcttttttatttatttatttttttattgttatactttaagttttagggtacatgtgcacattgtgcaggttagttacatacgtatacatgtgccatgctggtgtgctgcacccactaactcgtcatctagcattaggtatatctcccaatgctatccctcccccctctccccaccccgcaacagtccccagagtgtgatgttccccttcctgtgtccatgtgatctcattgttcaattcccacctatgagtgagaatatgcggtgtttggttttttgtccttgtgatagtttactgagaatgatggtttccaatttcatccatgtccctacaaaggacatgaactcatcattttttatggctgcatagtattccatggtgtatatgtgccacattttcttaatccagtctgtcattgttgggcatttgggttggttccaagtctttgctattgtgaataatgccgcaataaacatacgtgtgcatgtgtctttatagcagcatgatttatagtcctttgggtatatacccagtaatgggatggctgggtcaaatggtatttccagttctagatccctggggaatcaccacactgacttccacaatggttgaactagtttacagtcccaccaacagtgtaaaagtgttcctatttctccacatcctctccagcacctgttgtttcctgactttttaatgattgccattctaactggtgtgagatggtatctcattgtggttttgatttgcatttctctgatggccagtgatggtgagcattttttcatgtgttttttggctgcataaatgtcttcttttgagaagtgtctgttcatgtcctttgcccactttttgatggagttgtttgtttttttcttgtaaatttgtttgagttcattgtagattctggatattagccctttgtcagatgagtaggttgcaaaaattttctcccattctgtaggttgcctgttcactctgatggtagtttcttttgctgtgcagaagctctttagtttaattagatcccatttgtcaattttgtcttttgttgccattgcttttggtgttttagacatgaagtccttgcccatgcctatgtcctgaatggtaatgcctaggttttcttctagggtttttatggttttaggtctaacgtttaagtctttaatccatcttgaattgatttttgtataaggtgtaaggaagggatccagtttcagctttctacatatggctagccagttttcccagcaccatttattaaatagggaatcctttccccattgcttgtttttctcaggtttgtcaaagatcagatagttgtagatatgcggcgttatttctgagggctctgttctgttccattgatctatatctctgttttggtaccagtaccatgctgttttggttactgtagccttgtagtatagtttgaagtcaggtagtgtgatgcctccagctttgttcttttggcttaggattgacttggcgatttgggctcttttttggttccatatgaactttaaagtagttttttccaattctgtgaagaaaggcattggtaggttgatggggatggcattgaatctgtaaattaccttgggcagtatggccattttcacaatattgattcttcctacccatgagcatggaatgttcttccatttgtttgtatcctcttttatttccttgagcagtggtttgtagttctccttgaagaggtccttcacatcccttgtaagttggattcctaggtattttattctctttgaagcaattgtgaatgggagttcactcatgatttggctctctgtttgtctgttgttggtgtataggaatgcctgtgatttttgcacattgattttgtatcctgagactttgctgaagttgcttatcagcttaaggagattttgggctgagacaatggggttctctagatatacaatcatgtcatctgcaaacagggacaatttgacttacttcctcttttcctaattgaatatcctttatttccttctcctgcctaattgccctggccagaacttccaacactatgttgaataggagtggtgagagagggcatccctgtcttgtgccagttttcaaagggaatgcttccagtttttgcccattcagtaggatattggctgtgggtttgtcatagatagctcttattattttgaaatatgtcccatcaagacctaatttattgagagtttttagcatgaaaggttgttgaattttgtcaaaggccttttctgcatctattgagataatcatgtggtttttgtctttggctctttttatatgctggattacatttattgatttgcgtatattgaaccagccttgcatcccagggatgaagcccacttgatcatggtggataagctttttgatgtgctgctggattcgttttgccagtattttattgaggatttttgcatcaatgttcatcaaggatattgttctaaaattctcttttttggttgtgtctctgcccggctttggtatcagaatgatgctggcctcataaaatgagttagggaggattccctctttttctattgattggaatagtttcagaaggaatggtaccagttcctccttttacctatggtagaatttggctgtgaatccatctggtcctggactctttttggttggtaagctattgattattgccacaatttgagatcctgttattggtctattcagagattcaacttcttcctggtttagtcttgggagagtgtatatgtcaaggaatttatccatttcttctagattttctagtttatttgcgtagaggtgtttatagtattctctgatggtagtttgtatttctgtgggatcggtggtgatatcccctttatcattttttattgtgtctatttgattcttctctctttttttctttattagtcttgctagcggtctatcaattttgttgatcctttcaaaaaaccagctcctggattcattaattttttgaagagttttttgtgtctctatttccttcacttctgctcggattttagttatttcttgccttctgctagcttttgaatgtgtttgctcttgcttttctagttcttttaattgtgatgttagggtgtcaattttgcatctttcctgctttctcttgtgggcatttagtgctataaatttccctctacacactgctttgaatgcatcccagagattctggtatgttgtgtctttgttcacagtggtttcaaagaacatctttatttctgccttcatttcattatgtacccagtagtcattcaggagcaggttgttcagtttccatgtagttgaggggttttgagtgagattcttaatcctgagttctagtttgattgcactgtggtctgagagatagtttgttataatttctgttcttttacatttgctgaggagtgctttacttccaagtatgtggtcaattttggaataggtgtggtgtggtgctgaaaaaaatgtatattctgttgatttggggtggagagttctgtagatgtctattaggtccgcttggtgcagagctgagttcaattcctgggtatccttgtttactttctgtctcgttgatctgtctaatgttgacagtggggtgttaaagtctcccattattaatgtgtgggagtctaagtctctttgtaggtcactcaggacttgctttatgaatctgggtgctcctgtattgggtgcatatatatttagggtagttagctcttcttgttgaattcatccctttaccattatgtaatggccttctttgtctcttttgatctttgttggtttaaagtctgttttatcagagactaagattgcaacccctgcctttttttgttttccatttgcttggtagatcttcctccatccttttattttgagcctatgtgtgactctgcacgtgagatgggtttcctgaatacagcacactgatgggtcttgactctttatccaatttgccagtctgtgtcttttaattggagcatttagtccatttacatttaaagttaatattgttatgtgtgaatttgatcctgtcattatgatgttagctggttattttgctcgttagttgatgcagtttcttcctagtctcgatggtctttacatcttggcatgattttgcagcagctggtaccagttgttcctttccatgtttagcacttccttcaagagctcttttagggcaggcctggtggtgacaaaatctctcagcatttgcttgtctgtaaagtattttatttctccttcactcatgaagcttagtttggctggatatgaaattctgggttgaaaattcttttctttaagaatgttgaatattggcccccactctcttctggcttgtagggtttctgccgagagatccgctattagtctgatgggcttccctttgagggtaacgtgacctttctctctggctgcccttaacattttttccttcatttcaactttggtgaatctgacaattatgtgtcttggagttgctcttctcgaggagtatctttgtggcgttctctatatttcctgaatctgaacgttggcctgccttgctagactggggaaattctcctggataatatcctgcagagtgttttccaacttggttccattctccccatcactttcaggtacaccaatcagacgtagatttggtcttttcacatagtcccatatttcttggaggctttactcatttctttgtattcttttttctctaaactttccttctcgcttcatttcattcatttcttcttccattgctgataccctttcttccagttgatcgcatcggctcctgaggcttctgcattcttcacgtagttctcgagccttggttttcagctccatcagctcctttaagcacttctctgtattggttattctagttatacattcttctaaatttttttcaaagttttcaacttctttgcctttggtttgaacgtcctcccgtagctcagagtaatttgatcgtctgaagccttcttccctcagctcatcaaagtcattctccatccagctttgttccgttgctggtgaggagctgcattcctttggaggaggagaggcactctgatttttagtttccagtttttctgctctgttttttccccatctttgtggttttatctacttttggtctttgatgatggtgatgttcagatgggtttttggtgtggatgtcctttctgtttgttagttttccttctaacagacaggaccctcagctgcaggtctgttggagtaccctgccgtgtgaggtgtcagtgtgcccctgctggagggtgcctcccagttaggctgctcgggggtcaggggtcagggacccacttgaggaggcagtctgcccgttctcagatctccagctgtgtactggaagaaccactgctctcttcaaagctgtcagacagggacatttaagtctgcagaggttactgctgtctttttgtttgtctgtgccctgcccccagaggtggagcctacagaggcaggcaggcctccttgagctgtggtgggctccacccagttagagcttccgggctgctttgtttacctaagcaagcctgggcaatggcgggcgcccctcccccagcctcgctgccgccttgcagtttgatctcagactgctgtgctagcagtcagcgagactccgtgggcgtaggaccctctgagccaggtgcgagatataatctcgtggtgtgccgttttttaagccggttggaaaagcgcggtattcgggtgggagtgacccgattttccaggtgccgttcgtcacccctttctttgactaggaaagggaactccctgaccccttgcgcttcccaagtgaggcaatgcctcgccctgctttgggtcgcgtcggtgtgcgcacccactgacctgcgcccactgtctggcactccctagtgagatgaacccggtacctcagatggaaatgcagaaatcacccgtcttctgcgtcgctcaggctgggagctgtggaccggagctgttcctattcggccatcttggctcctcgcagttcattctttgt

SEQ ID NO: 10490 - DNA, 6043 bp, Homo sapiens
aattcttttttttttttaaattatgctttaagttttagggtccatgtgcacattgtgcaggttagttccatatgtatacatgtgccatgctggtgctctgcaccctctaactcctcatctagcattaggtatatctcccagtgctatccctcccccctccccccaccccacaacagtccccagagtgtgatatatcccttcctgtgtccatgtgatctcattgttcaattcccacctatgagtgagaatatgcggtgtttggttttttgttcttgcgatagtttactgagaatgatgatttccaatttcatccatgtccctacaaaggacatgaagtcatcattttttatggcggcatagtattccatggtgtatatgtgccacattttcttaatccagtctatcattgttggacatttgggttggttccaagtctttgctattgtgaataatgccgcaataaacatacgtgtgcatgtgtctttatagcagcatgatttatagtcctttgtgtatacacccagtaatgggatggctgggtcaaatgctatttccagttctagatccctgaggaatcgccacactgacttccacaatggttgaactagtttacagtcccgccaacagtgtaaaagtgttcctgtttctccacatcttctccagcacctgttgtctcctgacttttaaatgattgccattctaactggtgtgagatggtatctcactgtggttttgatttgcatttctctgatggccagtgatgatgagcattttttcatgtgttttttggctgcataaatgtcttcttttgagaagtgtctgttcatgtccttcacccactttttgatgaggttgtttgttttttcttgtaaatttgttttagctcattgtagattctggatattagccctttgtcagatgagtaggttgtgaaaattttctcccattttgtaggttgcctgttcactctgatggtagtttctttttctgtgcagaagctctttagtttaattagatcccatttgtcaattttgtcttttattgccattgcttttggtgttttagacgtgaagtcctcgcctatgcctatgtcctgaatggtaatgcctaggttttcttctagggtttttatggttttacgtctaacgtttaagtctttaatccatcttgaattgatttttgtataaggtgtaaggaagggatccagtttcagctttctacatatggctagccagttttcccagcaccatttattaaatagggaatcctttccccattgcttgtttttctcaggtttgtcaaagatcagatagttgtagatatgcggcgttatttctgagggctctgttctgttccattgatctatatctctgttttggtaccagtaccatgctgttttggttactgtagccttgtagtatagtttgaagtcaggtagtgtgatgcctccagctttgttcttttggcttaggattgacttggcaatgcgggctcttttttggttccatgtgaactttaaagtagttttttccaattctgtgaagaaaggcattggtagcttgatggggatggcattgaatctgtaaattaccttgggcagtatggccattttcacgatattgattcttcctactcatgagcatggaatgttcttccatttgtttgtatcctcttttatttccttgagcagtggtttgtagttctccttgaagaggtccttcacatcccttgtaagttgatttcctaggcattttattccctttgaagcaattgtgaatgggagttcactcatgattgggctctctgtttgtctgttgttggtgtataagaatgcttgtgatttttgtacattgattttgtatcctgagactttgctgaagttgcttatcagcttaaggagattttgggctgagacaatggggttttctagatatataatcatgttgtctgcaaacagggacaatttgacttcctcctttcctaattgaataccctttatttccttctcctgcctaattgccctggccagaacttccaacactatgttgaataggagtggtgagagagggcatccctctcttgtgccagttttcaaagggaatgcttccagtttttgcccattcagtatgatattggctgtgggtttgtcatagatagctcttactattttgaaatacgtcccatcaatacctaatttattgagagtttttagcatgaagggttgttgaattttgtcaagggctttttctgcatctattgagataatcatgtgttttttgtctttggttctgtttatatgctggattacatttattgatttgcgtatattgaaccagccttgcatcccagcgatgaagcccacttgatcatggtggataagctttttgatgtgccgctggattcgttttgccagtattttattgaggatttttgcatcaatgttcatcaaggatattggtctaaaattctcttttttggttgtgtctctgcctggctttggtatcagaatgatgctggcctcataaaatgagttagggaggattctgtctttttctgttgattggaatagtttcagaaggaatggtaccagttcctccttgtacctctggtagaattcggctgtgaatccatctggtcctggactctttttggttggtgagctattgattattgccacaatttcagctcctgttattggtctattcagagattcaacttcttcctggtttagtcttgggagagtgtatgtgtcgaggagtttatccatttcttctagattttctagtttatttgcgtagaggtgtttgtagtattctctgatggtagtttgtatttctgtgtgatcagtggcgatatcccctttatcattttttattgcgtctattggattcttctctctttttttctttattagtcttgctagcggtctgtcacttttgttgatcctttcaaaaaaccagctcctggattcattaattttttgaagggttttttgtgtctctatttccttcagttctgctctgatcttagttatttcttgccttctgctagcttttgactgtgtttgctcttgcttttctagttcttttaattgtgatgttacggtgtcaattttggatctttcctgctttctcttgtgggcatttagtgctataaatttccctctacacactgctttgaatgcatcccagagattccggtatgttgtgtctttgttctcgttggtttcaaagaacatctttatttctgccttcattttgttatgtacccagtagtcattcaggagcaggttgttcagtttccatgtagttgagtggttttgagtgagattcttaatcctgagttctagtttgattgcactgtggtctgagagatagtttgttataatttctgttcttttacatccgctgaggagagctttacttcccagtatgtggtcagttttggaataggtgtggtgtggtgctgaaaaaaaatgtatattctgttgatttggggtggagagttctgtagatgtctattaggtccacttggtgcagagctgagttcaattcctgggtatccttgttgactttctgtctcgttgatctgtctaatgttgacagtggggtgttaaagtctcccattattaatgtgtgggagtctaagtctctttgtaggtcactcaggacttgctttatgaatcttggtgctcctgtattgggtgcatatatatttaggatagttagctcttcttgttgaattgatccctttaccattatgtaatggccttctttgtctctttcgatctttgttggtttaaagtctgttttatcagagactaggattgcaacccctgcctttttttgttttccatttgcttggtagatcttcctgcatccttttattttgagcctatgtgtgtctctgcacgtgagatgggtttcctgaatacagcacactgatgggtcttgactctttatccagtttgccagtctgtgtcttttaattggagcatttagtccattgacatttaaagttaatattgttatgtatgaatttgatcctgtcattatgatgttagctggttattttgcttgttagttgatgcagtttcttcctagtctcgatggtctttacattttggcatgattttgcagcggctggtaccggttgttcctttccatgtttagtgcttccttcaggagctcttataaggcaggcttggtggtgacaaaatctctcagcatttgcttgtctgtaaagtattttatttctccttcgcttatgaagcttagtttggctggatatgaaattctgggttgaaaattattttctttaagaatgttgaatattggcccccactctcttctggcttgtagggtttctgccgagagatccactgttagtctgatgggcttccctttgagggtaacccgacctttctctctggctgcccttaacattttttccttcatttcaactttggtgaatctgacaattatgtgtcttggagttgctcttctcgaggagtatctttgtggtgttctctgtatttcctgaatctgaacgttggcctgccttgctagattggggaagttctcctggataatatcctgcagagtgttttccagcttggttccattctcccgatcactttcaggtacaccaagcagacgtagatttggtcttttcacatagtcccatatttcttggaggctttgctcatttcgttttattcttttttctccaaacttcccttctcacttcatttcattcatttcatcttccattgctgataccctttcttccagttgatcgcatcagctcctgaggcttctgcattcttcacgtagttcttgagccttggttttcagctccatcagctcctttaagcacttctctgtattggttattctagttatacattcttctacattttttttttccaaagttttcaacttctttgcctttggtttgaatgtcctcccgtagctcagagtaatttgatcgtctgaagccttcttctctcagctcgtcaaagtcattctccatccagctttgttccgttgctggtgaggaactgcgttcctttggaggaggagaggtgctctgctttttagagtttccagtttttctgttctgttttttccccctctttgtggttttatctacttttggtctttgatgatggtgatgtacagatgggtttttggtgtggatgtcctttctgtttgttagttttccttctaactgagaggaccctcagctgcaggtctgttggaataccctgccgtgtgaggtgtcagtgtgcccctgctggggggtgcctcccagttaggctgctcggggggtcaggggtcagggacccacttgaggaggcagtctgcccgttctcagatctccagctgcgtgctgggagaaccactgctctcttcaaagctgtcagacagggtcatttaagtctgcagaggttactgctgtctttttgtttgtctgtgccctgcccctagaggtggagcctacagaggcaggcaggcctccttgagctgtggtgggctccacccagttggagcttccctgcggctttgtttacctaatcaagcctgggcaatggcgggcgcccctcccccagcctcgttgccgccttgcagtttgatctcagactgctgtgctagcaatcagtgagactgcgtgggcgtaggaccctccgagccaggtgcgggatataatctagtggtgtgccgttttttaagcccgtcggaaaagcgcagtattcgggtgggagtgacccgattctccaggtggcatccgtcacccctttctttgactcagaagggaactccctgaccgcttgcgcgtcccaagtgaggcaatgcctcgccctgcttccgctcgcacgcggtgagcccacccactgacctgcgcccactgtctggcactccctagtgagatgaacccggtacctcagatggaaatgcagaaatcacccgtcttcggcgtcgctcacgctgggagctgtagactggagctgttcctattcggccatcttggctcctccccc

SEQ ID NO: 10491 - DNA, 6181 bp, Homo sapiens
tttatggtcttaacttttttttttttattattatacattaagttttagggtacatgtgcacattgtgcaggttagttacatatgtatacatgtgccatgctggtgcactacacccactaactcgtcatctagcattaggtatatctcccaatgctgtccctcccccctccccccaccccacaacagtccccagagtgtgatattccccttcctgtgtccatgtgatctcattgttcaattcccacctatgagtgagaatatgcggtatttgttttttgttcttgcgatagtttactgagaatgatgatttccaatttcatccatgtccctacaaaggacattaactcatcattttttatggctgcatagtattccatgttgtatatgtgccacattttcttaatccagtctatcattgttggacatttgggttggttccaagtctttgctattgtgaataatgccgcaataaacatacgtgtgcatgtgtctttatagcagcatgatttatagtcctttgggtatatacccagtaatgggatggctgggtcaaatggtatttgtagttctagatccctgaggaatcgccacactgacttccacaatggttgaactagtttacagtcccagcaacagtgtaaaagtgttcctatttctccacatcctctccagcacctgttgtttcctgactttttaatgattgccattctaactggtgtgagatggtatttcatagtggttttgatttgcatttctctgatggccactgatgatgagcattttttcatgtgttttttggctgcataaatgtcttcttttgagaagtgtctgttcatgtccttcacccactttttgatggcgttgtttgtttttttcttgtacatttgtttgagttcattgtagattctggatattagccctatgtcagatgagttggttgcaaaaattttctcccatgttgtaggttgcctgttcactctgatggtagtttcttttgctgtgcagaagctctttagtttaattagatcccatttgtcaattttgtcttttgttgccattgcttttggtgttttagacatgaagtccttgcccatgcctatgtcctgaatggtaatgcctaggttttcttctagggtttttatggttttaggtctaacgtttaaatctttaatccatcttgaattgatttttgtataaggtgtaagggagggatccactttcagcttcctacatatggctagccagttttcccagcaccatttattaaatagggaatcctttccccattgcttgtttttctcaggtttgtcaaagatcagatagttgtagttatgcggcgttatttctgagggctctgttctgttccattgatctatatctctgttttggtaccagtaccatgctgttttggttactgtagccttgtagtatagtttgaagtcaggtagtgtgatgcctccagctttgttcttttggcttaggattgacttggcaatgcgggctcttttttggttccatatgaactttaaagtagttttttccaattctgtgaagaaaatcattggtagcttgatggggatggcattgaatctgtaaattaccttgggcagtatggccattttcacgatattgattcttcctacccatcagcatggaatgttcttccatttgtttgtatcctcttttatttccttgagcagtggtttgtagttctccttgaagaggtccttcacatcccttgtaagttggattcctaggtattttattctctttgaagcaattgtgaatgggagttcactcatgatttggctctctgtttgtctgttgttggtgtataagaatgcttgtgatttttgtacattgattttgtatcctgagactttgctgaagttgcttatcagcttaaggagattttgggctgagacaatggggttttctagatatacaatcatgtcatctgccaacagggacaatttgacttcctcttttcctaattgaataccctttatttccttctcctgcctaattgccctggccagaacttccaacactatgttgaataggagtggtgagagagggcatccctgtcttgtgccagttttcaaagggaatgcttccaggttttgcccattcagtatgatattggctgtgggtttgtcatagatagctcttattattttgaaatacgtcccatcaatacctaatttattgagagtttttagcatgatgggttgttgaattttgtcaaaggctttttctgcatctattgagataatcatgtggtttttgtctttggctctgtttatatgctggattacatttcttgatttgcgtatattgaaccagccttgcatcccagggatgaagcccacttgatcatggtggataagctttttgatgtgctgctggattcggtttgccagtattttattgaggatttttgcatcaattttcatcaaggttattggtctaaaattctcttttttggttgtgtctctgcctgactttggtatcaggatgatgctggcctcataaaatgagttagggaggattccctctttttctattgattggaatagtttcagaaggaatggtaccagttcctccttgtacctctggtagaattcggctgtgaatctatctggtcctggactctttttggttggtaaactattgattattgccacaatttcagctcctgttattggtctattcagagattcaacttcttcctggtttagtcttgggagagtgtatgtgtcgaggaatttatccatttcttctagattttctagtttatttgcgtagaggtgtttgtagtattctctgatggtagtttgtatttctgtgggatcggtggtgatatcccctttatcattttttattatgtctatttgattcttctctctttttttctttattagtcttgctagcggtctatcaattttgttgatcctttcaaaaaaccagctcctggattcattgattttttgaagggttttttgtgtctctatttccttcagttctgctctgattttagttatttcttgccttctgctagcttttgaatgtgtttgctcttgcttttctagttcttttaattgtgatgttagggtgtcagttttggatctttcctgctttctcttgtgggcatttagtgctataaatttccctctacacactgctttgaatgcgtcccagagattctggtatgttgtgtctttgttctcattggtttcaaagaacatctttatttctgccttcatttcgttatgtacccagtagtcattcaggagcaggttgttcagtttccatgtagttgagcggctttgagtgggattcttaatcctgagttctagtttgattgcactgtggtctgagagatagtttgttataatttctgttcttttacatttgctgaggagagctttacttccaagtatgtggtcaattttggaataggtgtggtgtggtgctgaaaaaaatgtatattctgttgatttggggtggacagttctgtagatgtctattaggtctgcttggtgcagagctgagttcaattcctgggtatccttgttgactttctgtctcgttgatctgtctaatgttgacagtggggtgttaaagtctcccgttattaatgtgtgggagtctaagtctctttgtaggtcactcaggacttgctttatgaatctgggtgctcctgcattgggtgcatatatatttaggatagttagctcttcttgttgaattgatccctttaccattatgtaatggccttctttgtctcttttgatctttgttggtttaaagtctgttttatcagagactaggattgcaacccctgcctttttttgttttccatttgcttggtagatcttcctccatccttttattttgagcctatgtgtgtctctgcacatgagatggttttcctgaatacagcacactgatggatcttgactctttatccaatttgccagtctgtgtcttttaattggagaatttagtccatttatatttaaatttaatattgttatgtgtgaatttgatcctgtcattatgattatagctggtgattttgctcgttagttgatgcagtttcttcctagtctcgatggtctttacattttggcatggttttgcagtggctggtaccggttgttcctttccatgtttagtgcttccttcaggagctcttttagggcaggcctggtggtgacaaaatcggtcagcatttgcttgtctgtaaagtattttatttctccttcacttatgaagcttagtttggctggatatgaaattctgggttgaaaattcttttctttaagaatgttgaatattggcccccactctcttctggcttgtagggtttctgccgagagatctgctgttagtctgatgggcttccctttgagggtaacctgacctttctctctggctgcccttaacattttttccttcatttcaactttggtgaatctgacaattatgtgtcttggagttgctcttcttgaggagtatctttgtggcgttctctctatttcctgaatctgaacattggcctgccttgctagattggggaagttctcctggataatatcatgcagagtgttttccaacttggttccattctccccatcactttcaggtacaccaatcagacgtagatttggtcttttcacatagtcccatatttcttggaggctttgctcatttgtttttattcttttttctctaaacttcccttctcgcttcatttcattcatttcatcttccattgctgataccctttcttccagttgatcgcattggctcctgaggcttctgcattcttcacgtagttctcgagccttggtttgcagctccatcagctcctttaagcacttctctgtattggttattctagttatacattcttctaaatttttttcaaagttttcaacttctttgccttcggtttgaatgtccttccatagctcagagtaattcgatcgtctgaagccttcttctctcagctcgtcaaagtcattctccatccagctttgttctgttgctggtgaggaactgcgttcctttggaggaggagagacgctctgtgttttagagtttccagtttttctgttctgttttttccccatctttgtggttttatctacttttggtctttgatgatggtgatgtacaggtgggtttttggtgtggatgtcctttctgtttgttagttttccttgtaacagacaggaccctcagctgcaggtctgttggaataccctgctgtgtgaggtgtcagtgtgcccctgctggggggtgcctcccagttaggctgctcgggggtcaggggtcagggacccacttgaggaggcagtctgcaggttctcagatctccagctgtgtgctgggagaaccactcctctcttcaaagctgtcagacagggacatttaagtctgcagaggttactgctgtctttttgtttgtctgtgccctgcccccagaggtggagcctacagaggcaggcagacctccttgagctgtggtgggctccacccagttcgagcttcctagctgctttgtttacctaagcaagcctgggcaatggcggacgcccctcccccagcctcgctgctaccttgcagtttgatctcagactgctgtgctagcaatcagcgagattccgtgggcataggaccctccgagccaggtgtgggatatagtctcgtggtgcgccgttttttaagccggtctgaaaagcgcaatattcgggtgggagtgacccgattttccaggtgcgtccgtcacccctttctttgactcggaaagggaactccctgaccccttgcgcttcccaggtgaggcaatgcctcgccctgcttcggctcgcgcacggtgcgctcacccactggcctgcgcccactgtctggcactccctagtgagatgcacccagtacctcagatggaaatgcagaaatcacccgtcttctgcgtcgctcacgctgggagctgtagactggagctgttcctattcggccatcttggctcctcctggtcttaacttttatgaactcttatacagccacttgtccaattttccaaaacagcaattctaaacttttctctccagctaattattaaacttaatatcctatcctgatgctattggaagattgtcactccagagac

SEQ ID NO: 10492 - DNA, 7917 bp, Homo sapiens
tcacatattttttttttttttttttttttttgagacggagtctcgctgtgtctcccaggttggagtgcagtggcgcgatctcggctcactgcaagctccgcctcccaggttcatgccattctcctgcctcagcctcccaagtagctgggactacaggcgcccgccaacacgcccggctaattttttgtatttttagtagaaacggggtttcaccgtgttagccaagatggtctggatctcctgacctcatgatccgcccgtctcggcctcccaaagtgctaggattacaggcgtgagccaccgcgcccggcctcttttcacatatttaaggaagtgtgttaaagtctttatctagtacatttgatgcctaatgtctctttttggacgatttctgtagatttattttgtttctataaatagactatgcttttgtgtttttttctatgacttgctatatatttttcgaaaattaggcatttgaaaaaaaaaaaaatcccaaccactttttccagtctttgcagaatggctccttgcagggatagacttttattacttagcagggtacatttttgtccttgggattggcccaggcaatcccagcctttgcaggccttttctcagcctgtatttcccctgagctctttttctccaatttctccacatataatcaaattttatgtgtcttagtttccctacgagtctcactgctgcttctttttggggacatggcagttaaattgtattcccctaccaataatctcctgcccttggggtctatgggtctatagtccccctgtggttttcatgagctgtactcactgcttctcgtgacttttcttagcttgagatctgggccgtatcaattttggccatctaagctccattttaggtgacagaaatcaatccgtcaggttgccctcagacaggttagaacatggaaaattaggtctactcttctctctctggtttgaaggagagctggggactgagccacctcttccccaaaagcatgtaacaccagcaaggtgtgggtcaaaggcaagtaacaatgtcatgaaatttcctagctttttgaatgtgactttttcttcactgggcatttgcttggtttctattgatctctgactgatttccagaactcctatacagttatatagattttagtagtttctttttaatgtgttttataggggaaagatggcttgaatcttcccagttcaccattcttctttaagtttttaacttttgaaggataatttcactggacacaaatttctagattggggcttttctacctttgatactttaaatttttgcttcactaccttccttctggcatggctctgagaagtccaatgtaattcttatccttgctactctaaatttaagttttcttccccctctaaagctcctttcaatattttttctttgtctttgattttctgcagtttgaatatgatatgcctaggtatggagttttgggtatttattcttcttggagttctttgagcttcctagatctgtggtttggtgtctatcattacctttgggaaattctcagtcattattgcttcaaatttttcttctcttcatttttctctttcttcttcttctggtattgtcattacatctttatgtaatgttatgctacactacataaagttatgttacaccttttctaattgtcccacatttcttggatattgttatgtctttccattttttttcttgttgcatttcagcttaggagggttctattaacatttctttaaactcactgattttctttttccttggccatgctcagcctaatagtctattggtgagcccatcaaagccattcttcatttctattacatttgatttgtagcatttagttttcattcttttttttattattatactttaagtttcagggtacatgtgcacaatgtgcaggttagttacatatgtatacatgtgacatgctggtgcgctgcacccactaactcatcatctagcattaggtgtatctcccaatgctatccctcccctctgcccccaccccacaacagtccccagagtgtgatgttccccttcctgtgtctatgttttctcattgttcaattcccacctatgagtaagaatatgcggtgtttggttttttgttcttgcgatagtttactgagaatgatgatttccaatttcaaccatgtccctacaaaggacatgaagtcatcattttttatggctgcatagtattccatggtgtatatgtgccacattttcttaatccagtctatcattgttggacatttggcttggttccaagtctttgctattgtgaatagtgccgcaataaacatacgtgtgcatgtgtcttcatagcggcatgatttatagtcctttgggtctatacccagtaatgggatggctgggtcaaatggtatttctagttctagatccctgaggaatcaccacagtgacttccacaatggttgaactactttacagtcccaccaacagtgtaaaagtgttcctatttctccacatcctctccagcacctgttgtttcctgactttttaatgattgccattctaactggtgtgagatgatatctcattgtggttttgatttgcatttctctgatggccagtgatggtgagcattttttcatgtgttttttggctgcataaatgtcttcttttgagaagtgtctgttcatgtcctttgcccactttttgatggggttgtttgtttttttcttgtcaatttgtttgagttcattgtagattctggatattagccctttgtgagatgagtaggttgcgaaaattttctcccattttgtaggttgcctgttcactctggtggtagtttcttttgctgtgcagaagctctttagtttaattagatcgcatttgtcaattttggcttttgttgccattgcttttggtgttttagacatgaagtccttgcccatgcctatgtcctgaatggtaatgcctaggttttcttctaggttttttatggttttaggtctaacgtttaaatatttaatccatcttgaattgatttttgtataaggtgtaaggaagggatccagtttcagctttctacatatggctagccagttttcccagcaccatttattaaatagggaatcctttccccattgcttgtgtttctcaggtttgtcaaagatcagatagttgtagatatgcggcgttatttctgagggctctgttctgttccattgatctatatctctgttttggtaccagtaccatgctgttttgcttactgtagccttgtggtatagtttgaagtcaggtagcgtgatgcctccagctttgttcttttggcttaggattgacttggagatgcgggctcttttttggttccatatgaacttgaaagtagttttttccaattctgtgaagaaagtcattggtagcttgatggggatggcattgaatctataaattaccttgggcagtatggccattttcacgatattgattcttcctacccatgagcatggaatgttcttccatttgtttgtatcctcttttatttcattgagcagtggtttgtagttctccttgaagaggtccttcacatcccttgtaagttggattcctaggtattttattctctttgaagcaattgtgaatgggagttcacccatgatttggctctctgtttgtctgttgttggtgtataagaaagcttgtgatttttgtacattgtttttgtatcctgagactttgctgaagttgcttatcagcttaaggagattttgggctgagacgatggggttttctagctatacaatcatgtcatctgcaaacagggacaatttgacttcctcttttcctaattgaataccctttatttccttctcctgcctgattgccctggccagaacttgcaacactatgttgaataggagtggtgagagagggcatccctgtcttgtgccagttttcaaagggaatgcttccagtttttgcccattcagtatgatattggctgtgggtttgtcatagatagctcttattattttgagatacgtcccatcaatacctaatttattgagagtttttagcatgaagggttgttgaattttgtcaaaggctttttctgcatctattgagataatcatgtggtttttgtctttggctctgtttatatgctggattacatttattgatttgcgtatattgaaccagccttgcatcccagggatgaagcccacttgatcatggtggataagctttttgatgtgctgctggatttggtttgccagtattttattgaggatttttgcatcaatgttcatcaaggatattgttctaaaattctcttttttggttgtgtctctgcccggctttggtatcagaatgatgctggcctcataaaatgagttagggaggattccctctttttctattgattggaatagtttcagaaggaatggtaccagttcctccttgtacctctggtagaattcggctgtgaatccatctggtcctggactctttttggttggtaaactattgattattgccacaatttcagagcctgttattggtctattcagagattcaacttcttcctggtttagtcttgggagagtgtatgtgtcgaggaatgtatccatttcttctagattttctagtttatttgcgtagaggtgtttgtagtattctctgatggtagtttgtatttctgtgggatcggtggtgatatcccctttatcattttttattgtgtctatttgattcttctctctttttttctttattagtcttgctagcggtctatcaattttgttgatcctttcaaaaaaccagctcctggattcattgattttttgaagggttttttgtgtctctatttccttcagttctgctctgattttagttatttcttgccttctgctagcttttgaatgtgtttgctcttgcttttctagttcttttaattgtgatgttagggtgtcaattttggatctttcctgctttctcttgtaggcatttagtgctataaatttccctctacacactgctttgaatgcgtcccagagattctggtatgtggtgtctttgttctcgttggtttcaaagaacatctttatttctgccttcatttcgttatgtacccagtagtcattcaggagcaggttgttcagtttccatgtagttgagcggctttgagtgagattcttaatcctgagttctagtttgattgcactgtggtctgagagatagtttgttataatttctgttcttttacatttgctgaggagagctttacttccaactatgtggtcaattttggaataggtgtggtgtggtgctgaaaaaaatgtatattctattgatttggggtggagagttctgtagatgtctattaggtctgcttggtgcagagctgagttcaattcctgggtatccttgttgactttctgtctcgttgatctgtctaatgttgacagtggggtgttaaagtctcccattattaatgtgtgggagtctaagtctctttgtaggtcactgaggacttgctttatgaatctgggtgctcctgtattgggtgcataaatatttaggatagttagctcctcttgttgaattgatccctttaccattatgtaatggccttctttgtctcttttgatctttgttggtttaaagtctgttttatcagagactaggattgcaacccctgcctttttttgttttccatttgcttggtagatcttcctccatccttttattttgagcctatgtgtgtctctgcacgtgagatgggtttcctgaatacagcacactgatgggtcttgactctttatccaacttgccagtctgtgtcttttaattgcagaatttagtccatttatatttaaagttaatattgttatgtgtgaatttgatcctgtcattatgatgttagctggtgattttgctcattagttgatgcagtttcttcctagtctcgatggtctttacattttggcatgattttgcagcggctggtactggttgttcctttccatgtttagcgcttccttcaggagctcttttagggcaggcctggtggtgacaaaatctctcagcatttgcttgtctataaagtattttatttctccttcacttatgaagcttagtttggctggatatgaaattctgggttgaaaattcttttctttaagaatgttgaatattggcccccactctcttctggcttgtagggtttctgccgagagatccgctgttagtctgatgggctttcctttgagggtaacccgacctttctctctggctgcccttaacattttttccttcatttcaactttggtgaatctgacaattatgtgtcttggagttgctcttctcgaggagtatctttgtggcgttctctgtatttcctggatctgaacgttggcctgccttgctagattggggaagttctcctggataatatcctgcagagtgttttccaacttggttccattctccacatcactttcaggtacaccaatcagacgtagatttggtcttttcacatagtcccatatttcttggaggctttgctcatttctttttattcttttttctctaaacttcccttctcgcttcatttcattcatttcatcttccattgctgataccctttcttccagttgatcgcatcggctcctgaggcttctgcattcttcacgtagttctcgagccttggttttcagctccatcagctcctttaagcacttctctgtattggttattctagttatacattcttctaaatttttttcaaagttttcaacttctttgcctttggtttgaatgtcctcccgtagctcagagtaatttgatcgtctgaagccttcttctctcagctcgtcaaaatcattctccatccagctttgttctgttgctggtgaggaactgcgttcctttggaggaggagaggcgctctgcgttttagggtttccagtttttctgttctgttttttccccatctttgtggttttatctacttttggtctttgatgatggtgatgtacagatgggttttcggtgtagatgtcctttctggttgttagttttccttctaacagacaggaccctcagctgcaggtctgttggaataccctgccgtgtgaggtgtcagtgtgcccctgctggggggtgcctcccagttaggctgctcaggggtcaggggtcagggacccacttgaggaggcagtctgcccgttctcagatctccagctgcgtgctgggagaaccactgctctcttcaaagctgtcagacagggacacttaagtctgcagaggttactgctgtctttttgtttgtctgtgccctgcccccagaggtggagcctacagaggcaggcaggcctccttgagctgtggtgggctccacccagttcgagcttcctggctgctttgtttacctaagcaagcctgggcaatggcgggcgcccctcccccagcctcgttgccgccttgcagtttgatctcagactgctgtgctagcaatcagcgagattccgtgggcgtaggaccctctgagccaggtgtgggatatagtctcgtggtgcgccgtttcttaagccggtctgaaaagcgcaatattcgggtgggagtgacctgattttccaggtgcgtccgtcacccctttctttgactcggaaagggaactccctgaccccttgcgcttcccaggtgaggcaatgcctcgccctgcttcggctcgcgcacggtgcgcacacacactggcctgcgcccactgtctggcactccctagtgagatgaacccggtacctcagatggaaatgcagaaatcacccgtcttctgcgtcgctcacgctgggagctgtagaccggagctgttcctattcggccatcttggctcctccccct

SEQ ID NO: 10493 - DNA, 6041 bp, Homo sapiens
tatattttcttcttttttttttttattatactttaagttttagggtacatgtgcacattgtgcaggttagttacatacgtatacatgtgccatgctggtgcgctgcacccactaactcgtcatctagcattaggtatatctcccaatgctatccctcccccctccccccaccccacaacagtccccagagtgtgatattccccttcctgtgtccatgtgctctcattgttcaattcccacctatgagtgagaatatgcggtgtttggttttttgttcttgcgatagtttactgagaatgatgatttccaatttcatccatgtccttacaaaggacatgaactcatcattttttatggctgcatagtattccatggtgtatatgtgccaccttttcttaatccagtctatcattgttggacatttgggttggctccaagtctttgctatcgtgaatagtgccgcaataaacatacgtgtgcatgtgtctttatagcagcatgatttatagtcctttgggtatatacccagtaatgggatggctgggtcaaatggtatttctagttctagatccctgaggaatcgccacactgtcttccacaatggttgaactagtttacagtcccaccaacagtgtaaaagtgttcctatttctccacatcctctccagcacctgttgtttcctgactttttaatgactgccattctaactggtgtgagatggtatctcatagtggttttgatttgcatttctctgatggctagtgatgatgagcattttttcatgtgttttttggctgcataaatgtcttcttttgagaagtgtctgttcatgtccttcacccactttttgatggggttgtttgtttttttcttgtaaatttgtttgagttcattgtagattctggatattagccctttgtcagatgagtaggttgcaaaaattttctcccattttgtaggttgcctgttcactctgatggtagtttcttttgctgtgcagaagctctttagtttaatgagatcccatttgtcaattttgtcttctgttgccattgcttttggtgttttagacatgaagtccttgcccatgcctatgtcctgaatggtaatgcctaggttttcttctagggtttttatggttttaggtctaaagtttaaatctttaatccatcttgaattgatttttgtataaggtgtaaggaagggatccagtttcagctttctacatatggctagccagttttcccagcaccatttgttaaatagggaatcctttccccattgcttgtttttctcaggtttgtcaaagatcagatagtcgtaggtatgcggcgttatttctgagggctctgttctgttccattgatctatatctctgttttggtaccagtaccatgctgttttggttactgtagccttgtagtatagtttgaagtcaggtagtgtgatgcctccagctttgttcttttggcttaggattgacttggcgatgcaggttcttttttggttccatatgaactttaaagtagtttttttccaattctgtgaagaaagtcattggtagcttgatggggatggcattgaatctgtaaattaccttgggcagtatggccattttcgcgatattgattcttcctatccatgagcatggaatgttcttccatttgtttgtatcctcttttatttccttgagcagtggtttgtagttctccttgaagaggtccttcacatcccttgtaagttggattcctaggtattttattctctttgaagcaattgtgaatgggagttcactcatgatttggctttctgtttgtctgttgttggtgtataagaatgcttgtgatttttgtacattgattttgtatcctgagactttgctgaagttgcttatcagcttaaggagattttgggctgagacaatggggttttctagatatacaatcatgttgtctgcaaacagggacaatttgacttcctcttttcctaattgaataccctttatttccttctcctgcctaattgccctggccagaacttccaacactatgttgaataggagcggtgagagagggcatccctgtcttgtgccagttttcaaagggaatgcttccagtttttgcccattcagtatgatattggctgtgggtctgtcatagatagctcttattattttgaagtacgtcccattaatacctaatttattgagagtttttagcatgaagtgttgttgaattttgtcaaaggctttttctgcatctattgagataatcatgtggtttttgtctttggctctgtttatatgctggattacatttattgatttgcgtatattgaaccagccttgcatcccagggatgaagcccacttgatcatggtggataagctttttgatgtgctgctggattcggtttgccagtattttattgaggatttttgcatcaatgttcatcaaggatattggtctaaaattctcttttttggttgtgtctctgccaggctttggtatcagaacgatgctggcctcataaaatgagttagggaggattccctctttttctattgattggaatagtttcagaaggaatggtaccagttcctccttgtacctctggtagaattcggctgtgaatccatctggtcctggactctttttggttggtaaactattgattattgccacaatttcagatcctgttattggtctattcagagattcaacttcttcctggtttagtcttgggagagtgtatgtgtcgaggaatgtatccatctctcctagattttctagtttatttgcatagagctgtttgtagtattctctgatggtagtttgtatttctgtgggatcggtggtgatatcccctttatcattttttattgcgtctatttgattcttctctctttttttattagtcttgctagtggtctatcaattttgttgatcctttcaaaaaaccagctcctggattcattgattttttgaagggttttttgtctctctatttccttcagttctgctctgattttagttatttcttgccttctgctagcttttgaatgtgtttgctcttgcttttctagttcttttaattgtgatgttagggtgtcaattttggatctttcctgctttctcttgtgggcatttagtgctataaatttccctctacacactgctttgaatgcgtcccagagattctggtatgttgtgtctttgttctcgttggtttcaaagaatatctttatttctgccttcatttcgttaggtacccagtagtcattcaggagcaggttgttcagtttccatgtagttgagcagctttgagtgagattcttaatcctgagttctagtttgattgcactgtggtctgagagatagtttgttacaatttctgttcttttacatttgctgaggagagctttacttccaagtatgtggtcaattttggaataggtgtggtgtggtgctgaaaaaaatgtatattcttttgatttggggtggagagttctgtagatgtctattaggtctgcttggttcagagctgagttcaattccctgggtatccttgttgactttctgtctcgttgatctgtctaatgttgacagtggggtgttaaagtctcccattattaatgtgtgggagtctaagtctctttgtaggtcactcaggacttgctttatgaatctgggtgctcctgtattgggtgcatatatatttaggatagttagctcttcttgttgaattgatccctttaccattatgtaatggccttctttgtctcttttgatctttattggtttaaaggctgttttatcagagactaggattgcaacccctgccttttttaattttccatttgcttggtagatcttcctccatccttttattttgagcctatgtgtgtctctgcacgtgagatgggtttcctgaatacagcacactgatgggtcttgactctttatccaatttgccagtctgtgtcttttaattggagaatttagtccatttacatttaaagttaatattgttatgtgtgaatttgatcctgtcattatgatgttagcaggtgattttgctcgttagttcatgcagtttcttcctagtctcgatggtctttacattttggcatgattttgcagcggctggtaccagttgttcctttccatgtttagtgcttccttcaggagctcttttagggcaggcctgctggtgacaaaatctctcagcatttgcttgtgtgtaaaggattttatttctccttcacttatgaagcttagtttggctggatatgaaattctgggttgaaaattcttttctttaagaatgttgaatattggcccccactcttctggcttgtagggtttctgccgagagatcagctgttagtctgatgggcttccctttgagggtaacccgacctttctctctggctgcccttaacatttcttccttcatttcaactttggtgaatctgacaattatgtgtcttggagttgctcttcttgaggagtatctttttggcgttctctgtatttcctgaatctgaatgttggcctgccttgctagattggggaagttctcctggataatatcctgcagagtgttttccaacttggttccattctccccatcactttcaggtacaccaatcagatgtagatttggtcttttcacatagtcccatatttcttggaggctttgctcatttctttttattcttttttctctaaacttcccttctcgcttcatttcattcatttcatcttccatcgctgataccctttcttccagttgatcgcattggctcctgaggcttctgcattcttcacgtagttctcgagccttggttttcagctccatcagctcctttaagcacttctctgtattggttattctagttatacattcttctaaatttttttcaaagttttcaacttctttgcctttggtttgaatgtcctcccgtagctcagagtaatttgatcgtctgaagccttcttctctcagctcgtcaaagtcattctccatccagctttgttccgttgctggtgaggaactgcgttcctttggaggaggagaggcactctgcgttttagagtttccactttttctgttctgttttttccccatctttgtggttttatctacttttggtctttgatgatggtgatgtacagatgggttttcggtgtggatgtcctttctgtttgttagttttccttcttacagacaggaccctcagctgcaggtctgttggaataccctgccgtgtgaggtgtcagtgtgcccctgctggggggtgcctcccagttaggctgctaaggggtcaggggtcagggacccacttgaggaggcagtctacccattctcagatctccagctgcgtactgggagaaccactgctctcttcaaagctgtcagacagggacatttaagtctgcagaggttactgctgtctttttgtttgtctgtgccctgtccccagaggtggagcctacagaggcaggcaggcctccttgagctgtggtgggctccacccagttggagcttcctggctgctttgtttacctaatcaagcctgggcaatggcgggcgcccctcccccagcctcgctgccgccttgcagtttgatctcagactgctgtgctagcaaccagcgagactccgtgggcgtaggaccctctgagccaggtgtgggatatagtctcatggtgcgccattttttaagccagtctgaaaagcgcaatattcgggtgggagtgacccgattttccaggtgcgtctgtcacccctttctttgactcggaaagggaactccctgaccccttgcgcttcccaggtgaggcaatgcctcgccctgcttcggcttgcgcacagtgcgcgcacccactggcctgcgcctactgtctggcactccctagtgagatgaacctggtacctcagatggaaatgcagaaatcacccgtcttctgcgtcgctcacgctgggagctgtagactggagctgttcctattcggccatcttggctcctctctgcc

SEQ ID NO: 10494 - DNA, 6063 bp, Homo sapiens
atacacatattagtttattttttttttttaatttttttttttttattatactctaagttttagggtacatgtgcacattgtgcaggttagttacatatgtatacatgtgccatgctggtgcgctgcacccactaacgtgtcatctagcattaggtatatctcccaatgctatccctcccccctcccccgaccccaccacagtccccagagtgtgatattccccttcctgtgtccatgtgatctcattgttccattcccacctatgagtgagaatatgcggtgtttggttttttgttcttgcgatagtttactgagaatgatggtttccaatttcatccatgtccctacaaaggacatgaactcatcattttttatggctgcatagtattccatggtgtatatgtgccacattttcttaatccagtctatcattgttggacatttgggttggttccaagtctttgctattgtgaatagtgccgcaataaacatacgtgtgcatgtgtctttagagcagcatgatttataatcctttgggtatatacccagtaatgggatggctgggtcaaatggtatttctagttctagatccctgaggaatcgccacactgacttccacaatggttgaactagtttacagtcccaccaacagtgtaaaagtgttcctatttctccacatcctctccagcacctgttgtttcctgagtttttaatgattgccattctaactggtgtgagatgatatctcatagtggttttgatttgcatttctctgatggccagtgatgatgagcatttcttcatgtgttttttggctgcataaatgtcttcttttgagaagtgtctgttcatgtccttcgcccactttttgatggggttgtttgtttttttcttgtaaatttgtttgagttcattgtagattctggatattagccctttgtcagatgagtaggttgcgaaaattttctcccatgttgtaggttgcctgttcactctgatggtagtttcttttgctgtgcagaagctcttgagtttaattagatcccatttgtcaattttggcttttgttgccattacttttggtgttttggacatgaagtccttgcccacgcctatgtcctgaatggtaatgcctaggttttcttctagggtttttatggttttaggtctaacgtttaaatctttaatccatcttgaattgatttttgtataaggtgtaaggaagggatccagtttcagctttctacatatggctagccagttttcccagcaccatttattaaatagggaatcctttccccattgcttgtttttctcaggtttgtcaaagatcagatagttgtagatatgtggcattatttctgagggctctgttctgttccattgatctatatctctgttttggtaccagtaccatgctgttttggttactgtagccttgtagtatagtttgaagtcaggtagtgtgatgcctccagctttgttcttttggcttaggattgacttggcgatgcgggctcttttttggttccatatgaactttaaagtagttttttccaattctgtgaagaaagtcattggtagcttgatggggatggcattgaatctgtaaattaccttgggcagtatggccattttcacgatattgattcttcctacccatgagcatggaatgttcttccatttgtttgtgtcctcttttatttccttgagcagtggtttgtagttctccttgaagatgtccttcacatcccttgtaagttggattcctaggtattttattctctttgaagcaattgtgaatgggagttcactcatgatttggctctctgtttgtctgttgttggtgtgtaagaatgcttgtgatttttgcacattgattttgtatcctgagactttgctgaagttgcttatcagcttaaggagattttgggctgagacgatggggttttctagataaacaatcatgtcgtctgcaaacagggacaatttgacttcctcttttcctaattgaataccctttatttccttctcctgcctgattgccctggccagaacttccaacactatgttgaataggagcggtgagagagggcatccctgtcttgtgccagttttcaaagggaatgcttccagtttttgcccattcagtatgatattggctgtgggtttgtcatagatagctcttattattttgaaatacgtcccatcaatacctaatttattgagagtttttagcatgaagggttgttgaattttgtcaaaggctttttctgcatctattgagataatcatgtggtttttgtctttggctctgtttatatgctggattacatttattgatttgcgtatattgaaccagccttgcatcccagggatgaagcccacttgatcatggtggataagctttttgatgtgctgctggattcggttggccagtattttattgaggatttttgcatcaatgttcatcaaggatattggtctaaaattctccttttttggttgtgtctctgcccggctttggtatcagaatgatgctggcctcataaaatgagttagggaggattccctcttttctattgattgggatagtttcagaaggaatggtaccagctcctccttgtacctctggtagaattcggctgtgaatccatctggtcctggactctttttggttggtaaactattgattattgccacaatttcagagcctgttattggtctattcagagattcaacttcttcctggtttagtcttgggagagagtatgtgtcgaggaatgtatccatttcttctagattttctagtttatttgcgtagaggtgtttgtagtattctctgatggtagtttgtatttctgtgggatcggtggtgatatcccctttatcattttttattgtgtctatttgattcttctctctttttttctttattagtcttgctagcggtctatcaattttgttgatcctttcaaaaaaccagctcctggattcattgattttttgaagggttttttgtgtctctatttccttcagttctgctctgattttagttatttcttgccttctgctagcttttgaatgtgtttgctcttgcttttctagttcttttaattgtgatgttagggtgtcaattttggatctttcctgctttctcttgtaggcatttagtgctataaatttccctctacacgctgctttgaatgcgtcccagagattctggtatgtggtgtctttgttctcgttggtttcaaagaacatctttatttctgccttcatttcgttatgtacccagtagtcattcaggagcaggttgttcagtttccatggagttgagcggctttgagtgagattcttaatcctgagttctagtttgattgcactgtggtctgagagatagtttgttataatttctgttcttttacatttgctgaggagagctttacttccaactatgtggtcaattttggaataggtgtggtgtggtgctgaaaaaaatgtatactctgttgatttggggtggagagttctgtagatgtctattaggtctgcttggtgcagagctgagttcaattcctgggtatccttgttgactttctgtctcgttgatctgtctaatgttgacagtggggtgttaaagtctcccattattaatgtgtgggagtctaagtctctttgtaggtcactgaggacttgctttatgaatctgggtgctcctgtattgggtgcataaatatttaggatagttagctcttcttgttgaattgatccctttaccattatgtaatggccttctttgtctcttttgatctttgttggtttaaagtctgttttatcagagactaggattgcaacccctgcctttttttgttttccattggcttggtagatcttcctccatccttttattttgagcctatgtgtgtctctgcacgtgagatgggtttcctgaatacagcacactgatgggtcttgactctttatccaacttgccagtctgtgtcttttaattgcagaatttagtccatttacatttaaagttaatattgttatgtgtgaatttgatcctgtcattatgatgttagctggtgattttgctcattagttgatgcagtttcttcctagtctcgatggtctttacattttggcatgattttgcagcggctggtaccggttgttcctttccatgtttagcgcttccttcaggagctcttttagggcaggcctggtggtgacaaaatctctcagcatttgcttgtctataaagtattttatttctccttcacttatgaagcttagtttggctggatatgaaattctgggttgaaaattcttttctttaagaatgttgaatattggcccccactctcttctggcttgtagggtttctgccgagagatccgctgttagtctgatgggctttcctttgagggtaacccgacctttctctctggctgcccttaacattttttccttcatttcaactttggtgaatctgacaattatgtgtcttggagttgctcttctcgaggagtatctttgtggcgttctctgtatttcctgaatctgaacgttggcctgccttgctagattggggaagttctcctggataatatcctgcagagtgttttccaacttggttccattctccacatcactttcaggtacaccaatcagacgtagatttggtcttttcacatagtcccatatttcttggaggctttgctcatttctttttattcttttttctctaaacttcccttctcgcttcatttcattcatttcatcttccatcgctgataccctttcttccagttgatcacatcggctcctgaggcttctgcattcttcacgtagttctcgagccttggttttcagctccatcagctcctttaagcacttctctgtattggttattctagttatacattcttctaaatttttttcaaagttttcaacttctttgcctttggtttgaatgtcctcccgtagctcagagtaatttgatcgtctgaagccttcttctctcagctcgtcaaaatcattctccatccagctttgttctgttgctggtgaggaactgcgttcctttggaggaggagaggcgctctgcgttttagagtttccagtttttctgttctgttttttccccatctttgtggttttatctacttttggtctttgatgatggtgatgtacagatgggttttcggtgtagatgtcctttctggttgttagttttccttctaacagacaggaccctcagctgcaggtctgttggaataccctgctgtgtgaggtgtcagtgtgccctgctggggggtgcctcccagttaggctgctcgggggtcaggggtcagggacccacttgaggaggcagtctgcccgttctcagatctccagctgcgtgctgggagaaccactgctctcttcaaagctgtcagacagggacacttaagtctgcagaggttactgctgtctttttgtttgtctgtgccctgcccccagaggtggagcctacagaggcaggcaggcctccttgagctgtggtgggctccacccagttcgagcttcccagctgctttgtttgcctaagcaagcctgggcaatggcgggcgcccctcccccagcctcgttgccgccttgccgtttgatctcagactgctgtgctagcaatcagcgagattccgtgggcgtaggaccctctgagccaggtgtgggatatagtctcgtggtgcgccgtttcttaagccggtctgaaaagcgcaatattcgggtgggagtgacccgattttccaggtgcgtccgtcacccctttctttgactcggaaagggaactccctgaccccttgcgcttcccaggtgaggcaatgcctcgccctgcttcggctcgcgcacggtgcgcacacacactggcctgcgcccactgtctggcactccctagtgagatgaacccggtacctcagatggaaatgcagaaatcacccgtcttctgcgtcgctcacgctgggagctgtagaccggagctgttcctattcggccatcttggctcctcccccg

SEQ ID NO: 10495 - DNA, 6168 bp, Homo sapiens
atatatattttttcttttattattattataccttaagatttagggtacatgtgcacaatgtgcaggttagttacatatgtatacatgtgccatgctggtgtgctgcacccattaacacgtcatttagcattaggtatatctcctaatactatccctccccactccccccaccccacaacagtccccggagtgtgatgttccccttcctgtgtccatgtgttctcattgttcaattcccacctatgagtgagaatatgcggtgtttggttttttgttcttgcgatagtttactgagaatgatgatttccaatttcatccctgtccttacaaaggacatgaactcatcattttttatggctgcatagtattccatggtgtatatgtgccacattttcttaatccagtctgtcattgttggacatttgggttggttccaagtctttgctattgtgaatagagccacagtaaacatacgtgtgcatgtgtctttatagcagcatgatttatactcctttgggtatatacccagtaatgggatggctaggtcaaatggtatttctagttctagatccctgaggaattgccacactgacttccacaatggttgaactagtttacagtcccaccaacagtgtaaaagtgttcctatttctccacatcctctccagcacctgttgtttcctgacatttaatgattgccattctaactggtgtgagatggtatctcattgtggttttgatttgcatttctctgatggccagtggtggtgagcattttttcatgtgttttttggctgcataaatgtcttcttttgagaagtgtctgctcatatccttcacccactttttgatggggttgtttgttttcttcttgtaaatttgtttgagttcattgtagattctggatattagccctttgtcagatgagtaggttgcgaaaattttcttccattttgtaggttgcctgttcactctgatggtagtttcttttgctgtgcagaagctctttagtttaattagatcccatttgtcaattatggcttttgttgccattgcttttggtgttttagacatgaagtccttgcccatgcctatgtcctgaatggtaatgcctaggttttcttctagggtttttatggttttatgtctaacatgtaagtctttactccatcttgaattaattttcatataaggtgtaaggaagggatccagtttcagctttctacatatggctagccagttttcccagcaacatttattaaatagggaatcctttccccattgcttgtttttctcaggtttgtcaaagatcacatagttgtagatatgcggcgttatttctgagggctctgttctattccattggtctatatctctgttttggtaccagtaccatgctgttttggttactgtagccttgtagtatagtttgaagtcaggtagcgtgatgcctccagctttgttcttttggcttaggattgacttggtgatgcgggctcttttttggtgccatatgaactttcaagtagttttttccaattctgtgaagaaagtcattggtagcttgatgcggatggcattgaatctataaattaccttgggcagtatggccattttcacaatattgattcttcctacccatgagcatggaatgttcttccatttgtttgtatcctcttttatttcattgagcagtggtttgtagttctccttgaagaggtccttcacgtcccttgtaaggtggattcctaggtattttattctctttgaagcaattgtgaatgggagttcactcatgatttggctctctgtttgtctgttactggtgtataagaatgcttgtgatttttgtacattgactttgtatcctgagactttgctgaaattgcttatcagcttaaggagattttgggctgagacaatagggttttctagatatacaatcatgtcatctgcaaacagggacaatttgacttcctcttttcctaactgaataccctttatttccttctcctgcctaattgccctggccagaaattccaacactatgttgagtaggagtggtgagagagggcatccctgtcttgtgctagttttcaaagggaatgcttccagtttttgcccattcagtatgatattggctgtgggtttgtcatagatagctcttattatttcgagatacatcccatcaatacctaatatattgacagtttttagcatgaagggttgttgaattttttcaaagatcttttcttcatctattgagataatgatgtggtttttgtctttggttctgtttatatgctggattacatttattgatttgcgtatgttgaaccagtcttgcatcccagggatgaagcccacttgatcatggtggataagctttttgatgtgctgctggatttggtttgccagtattttattgaggatttttgcatcaatgttcatcaaagatattggtctaaaattctctttttttgttgtgtctctgccaggctttggtatcagaatgatgctggcctcataaaatgagttagggaggattccctctttttctattgattggaatagtttcagaaggaatggtaccagttcctccttgtacctctggtagaatttggctgtgaatccacctggccctggactctttttggttggtaagctattgattattgccacaatttcagagcctgttattggtgtattcagagattcaacttcttcctggtttagtcttgggagagcgtatgtgttgaggaatttatccatttcttctagattttctagtggttatttgcgtagaggtgtttgtagtattctctgatggtagtttgtattcctgtgggatcggtggtgatatcccctttatcattttttatagcgtctatttgattcttctctctttttttctttattagtcttgctagcggtctgtcaattttgttgatcctttcaaaaagcagctcctggattcattaattttttgaagggttttttgtgtctctatttccttcagttctgctcggattttagttatttcttgccgtctgctagcttttgaatgtgtttgttcttgcttttctagttctttgaattgtgatgttagggtgtcaattttggatctttcctgctttctcttgtgggcatttagtgctataaatttccctctacacactgctttgaatgtgtcccagagattctggtacgttctgtctttgttctcattggtttcaaagaagatctttgtttctgccttcattttgttatgtacccagtagtcattcaggagcgggttgttcagtttccatgtatttgagcagttttgagtgcgtttcttaatcctgaggtctagtttgattgcactgtggtctgagagacagttggttataatttctgttcttttacatttgctgaggagagctttacttccaactatgtggtcaattttggaataggtgtggtgtggtgctgaaaaaaatgtatattctgttgatttggggtggagagttctgtagatgtctattaggtctgcttggtgcagagctgagttcaattcctgggtatccttgttaactttctgtctcgttgatctgtctaatgttgacagtggggtgttaaactctcccattattattatgtgggagtctaagtctctttgtaggtcactcaggacttgctttatgaatctcggtgctcctgtattgggtgcatatatatttaggatagttagctattcttgttgaattgatccctttacaattatgtaatggccttctttgtctcttttgatctttgttggtttaaagtctgttttatcagagactaggattgcaacccctgctttttttgttttccatttgcttggtagatcttcctccatccctttattttgagcctatgtgtgtctctgcacatgagatggatttcctgaataagcacactgatgggtcttgactctttatccaatttgtcagtctgtgtcttttaattggagcatttagcccatttacatttaaggttaatattgttatgtgtgaatttgatcccgtcattatgatgttagctggttattttgctcgttagttgatgcagtttcttcctagccttgatggtctttacaatttggcatgattttgcagtggctggtaccggttgttcctttccgtgtttagtgcttccttcaggagctcttgtagggcaggcgtggtggtgacaaaatctctcagtatttgcttgtctgtaaagtattttatttctccttcacttaggaagcttagtttggctggatatgaaattctgggttgaaaattattttctttaagcatgttgaatactggcccccactctcttctggcttgtagagtttctgcagagagatccgctgttaatctgatgggcttccctttgtgggtaaccccacctttctctctggctgcccttaacattttttccttcatttcaactttggtgaatctgacaattatgtgtcttggagttgctcttctcgaggagtatctttgtggtgttctctgtatttcctgaaactgaatgttggcttgccttgctagattggggcagttctcctggataatatcctgcagagtgttttccaacttggttccattctccccgtcactttcaggtacaccaatcagacgtagatttggtcttttcacatagttccatatttcttggaggctttgttcgtttctttttattcttttttctctgaacttcccttcttgcttcatttcattcatttcatcttccatcactgataccctttcttccagttgattgcttcggctcctgaggcttctgcattcctcacgtagttctcgagccttggctttcagctccatcagctcctttaagcacttctctgcattggttattctagttatacatttgtctaaatttttttcaaagtttttaacttctttgcctttggtctgaatttcctcctgtagctcggagtagtttgatcgtctgaagccttcttctctcaactcgtcaaagtcattctccatccagctttgttccgttgctggtgaggaactgcgttcctttggaggaggagaggcactctgctttttagagtttccagtttttctgctctgttttttccccatctttgtggttttatctacttttggtccttgatgatggtgatgtacagttgggtttttggtgtggatgtcctttctgtttgttagttttccttctaacagacaggaccctcagctgcaggtctgttggagtttgctagaggtccactccagaccctgtttgcctgggtacccgcagtggtggctgcagaacagcagattttcgtgaaccgcgaatgctgctgtctgatcattcctcgggaagttttgtctcagagaagtacccggccggccgtgtgaggtgtcagtctgcccctactcgggggtgcctcccagtcaggctgctcgggggtcaggggtcagggacccacttgaggaggcagtctgcccgttctcagatctccggctgcatgctgggagaaccactgctctcttcaaagctgtcagatagggacatttaagtctgcagaggttactgctgtctttttgtttgtctgtgccctgcccccagaggtggagcctacagaggcaggcaggcctccttgagctgtggtgggctccacccagttcgagcttccctgctgctttgtttacctaagcaagcctgggcaatggcaggcgcccctcccccagactcactgccgccttgcagtttgatctcagactgctgtgctagcaatcagcgagactccgtgggcgtaggaccctcccagccaggtgtgggatatagtctcctggtgtgcctttttttaagccggtcagaaaagtgcagtattagggtgagagtgacccgattttccaggtgccgtctgtggcccctttctttgactaggaaagggaactccctgatcccttgcacttcccgagtgaggtaatgcctcgccctgctttggctggcacacggtgcgctgcacccactgtcctgtgcccactgtctggcactccctagtgagatgaactcggtacctcagatggaaatgcagaaatcacccgtcttctgcgttgctcacgctgggagctgtagaccagagctgttcccattcggccatcttggctc

SEQ ID NO: 10496 - DNA, 6058 bp, Homo sapiens
attttgtggtaagttttcttttttttttttaagaaaattttttttttattatactttaagttttagggtacatttgcaccttgtgcaggttagttacatatgtatacatgtgccatgctggtgcactgcacccactaactcatcatctagcattaggtatatctcccaatgctatccctcccccctccccccacccaacaacagtccccagagtgtgatattccccttcctgtgtccatgtgatctcattgttcaattcccacctatgagtgagaatatgcggtgtttggttttttgttcttgcgatagtttactgagaatgacgttttccaatttcatccatgtccctacaaaggacatgaactcatcattttttatggctgcatagtattccatggtgtatatgtgccacattttcttaatccagtctatcgttgttggacatttgggttggttccaagtctttgctattgtgaataatgccgcaataaacatacgtgtgcatgtgtctttatagcagcatgatttatagtcctttgggtatatacccagtaatgggatggctgggtcaaatggtatttccagttctagatccctgaggaatcgccacactgacttccacaatggttgaactagtttacagtcccaccaacagtgtaaaactgttcctatttctgcacatcctctccagcacctgttgtttcctgactttttaatgattgccattctaactggtgtgagatggtatctcattgtggttttgatttgcatttctctgatggccagtgatgatgagcattttttcatgtgtcttttggctgcataaatgttttcttttgagaagtgtctgttcatgtccttcgcccactttttgatggggttgtttgtttttttcttgtaaatttgtttgagttcattgtagattctggatatgagccctttgtcagatgagtaggttgcgaaaattttctcccattttgtaggttgcctgttcactctgatggtagtttcttttgctgtgcaggagctctttagtttaattagatcccatttgtcaattttggcttttggtgccattgcttttggtggtttagacatgaagtccttgcccatgcctatgtcctgaatggtattgcctaggttttcttctagggtttttatggttttaggtctaacatttaagtcttaaatccatcttgaattgatttttgtataaggtgtaaggaaaggatccagtttcagctttctacatatggctagccagttttcccagcaccatttattaaatagggaatcctttacccattgcttgtttttctcaggtttctcaaaaatcagatagttgtagatatgcggcgttatttctgagggctctgttctgttccattgatctatatctctgttttggtaccagtaccatgctgttttggttactgtagccttatagtatagtttgaagtcaggtagtgtgatgcctccagctttgttcttttggcttaggattgacttggcgatgcgggctcttttttggttccatatgaactttaaagtagttttttccaattctgtgaagaaaggcattggtagcttgatggggatggcattgaatctgtaaattaccttgggcagtatggccattttcatgatattgattcttcctacccatgagcatggaatgttcttccatttgcttgtatcctcttttatttccttgagcagtggtttgtagttctccttgaagaggtccttcacatcccttgtaagttggattcctaggtatttgattctctttgaagcaattgtgaatgggagttcactcatgatttggctctctgtttgtctgttgctggtgtataagaatgcttgtgatttttgtacattgattttgtatcctgagactttgctgaagttgcttatcagcttaaggagattttgggctgagacaatggggttttctagatatacaatcatgtcgtctgcaaacagggacaatttggcttcctcttttcctaattgaataccctttatttccttctcctgcctaattgccctggccagaacttccaacactatgttgaataggagtggtgagagagggcatccctgtcttgtgccagttttcaaagggaatgcttccagtttttgcccattcagtatgatattggctgtgggtttgtcatagatagctcttattattttgaaatacgtcccatcaatacctaatttattgagagtttttagcatgaagcgttgttgaattttgtcaaaggctttttctgcatctattgagataatcatgtggtttttgtctttggctctgtttatatgctggattacatttattgatttgcgtatattgaaccagccttgcatcccagggatgaagcccacttgatcttggtggataagctttttgatgtgctgctggattcggtttgccagtattttactgaggatttttgcatcaatgttcatcaaggatattggtctaaaattctctttttttgttgtgtctctgcctggctttggtatcagaatgatgctggcctcataaaatgagttagggaggattccctctttttctattgattggaatagtttcagaaggaatggtaccagttcctccttgtacctctggtagaattcagctgtgaatccatctggtcctggactctttttggttggtaagctattgattattgccacaatttcagatcctgttattggtctattcagagattcaacttcttcctggtttagtcttgggagggtgtatgtgtcgaggaatttatccatttcttctagattttctagtttatttgcatagaggtgtttgtagtattctctgatgatagtttgtatttctgtgggatcggtggtgatatcccctttatcattttttattgtgtctatttgattcttctctctttttttctttattagtcttgctagcggtctatcaattttgttgatctttcaaaaaaccagctcctggattcattaattttttgaagggttttttgtgtctctatttcctgcagtctgctctgattttagttatttcttgccttctgctagcttttgaatgtgtttgctcttgcttttctagttcttttaattgtgatgttagggtgtcaattttggatctttcctgctttctcttgtgggcatttagtgctataaatttccctctacacactgctttgaatgtgtcccagagattctggtatgttgtgtctttgttctcattggtttcaaagaacatctttatttctgccttcatttcgttatgtacccagtagtcattcaggagcaggttgttcagtttccatgtagttgagcggtttggagtgagattcttaatcctgagttctagtttgattgcactgtggtctgagagagagtttgttataatttctgttcttttgcatttgctgaggagagctttacttccaagtatgtggtcaattttggaataggtgtggtgtggtgctgaaaaaaatgtatattctgttgatttggggtggagagttctgtagatgtctattaggtccgcttggtgcagagctgagttcaattcctgggtatccttgttgactttctgtcgcgttgatctgtctaatgttgacagtggggtgttaaagtctcccattattaatgtgtgggagtctaagtctctttgtaggtcactcaggacttgctttatgaatcttggtgctcctgtattgggtgcatatatatttaggatagttagctcttcttgttgaattgatccctttaccattatgtaatggccttctttgtctcttttgatctttgttggtttaaagtctgttttatcagagactaatattgcaacccctgcctttttttgttttccatttgcttggtagatcttcctccatccttttattttgagcctatgtgtgtctctgcatgtgagatgggtttcctgaatacagcacactgatgggtcttgactctttatccaacttgccagtctttgtcttttaattggagcatttagtccatttacatttaaagttaatattgttatgtgtgaatttgatcctgtcattatgatgttagctggtgattttgctcgttagttgatgcagtttcttcctagtcttgatggtctttacattttggcatgattttgcagcggctggtaccagttgttcctttccatgtttagtgcttccttcaggagctcttttagggcaggcctggtggtgacaaaatctctcagcatttgcttgtctgtaaagtattttatttctcctttgcttatgaagcttagtttggctggatgtgaaattctgggttgaaaattcttgtctttaagaatgttgaatattggcccccactctcttctagcttgtagggtttctgctgagagatccgctgttagtctgatggctcacctatgaggtaacccgacctatctctctggctgccctaaacatgtgctccttcatctcaactttggtgaatctgacagttatgtgtcttggagttgctcttctcgaggagtatctatgtggcgttctctgtatttcctgaatctgaacgttggcctgccttgctagattggggaagttctcctggataatatcctgcagagtgttttccaacttggttccattctccccatcactttcaggtacaccaatcagacgtagatttggtctttcacatagtcccatatttcttggaggctttgctcatttgtttttattcttttttctctaaacttcccttctcacttcatttcattcatttcatcttccatcgctgataccctttcttccagttgatcgcatcggctcctgaggcttctgcattcttcacgtagttctcgagccttggttttcagctccatcagctcctttaagcacttctctgtattggttattctagttatacattcttctaaattttttccaaagtttttcaacttctttgcctttggtttgaatgtcctcccgtagctcagagtaatttgattgtctgaagccttcttctctcagctcgtcaaagtcattctccatccagctttgttccgttgctggtgaggaactgcgttcctttggaggaggagaggcgctctgctttctagagtttccagtttttctgttctgttttttccccatctttgtggttttatctacttttggtctttgatgatggtgatgtacagatgggttttcggtgtggatgtcctttctgtttgttagttttccttctaacagacaggaccctcagctgcaggtctgttggagtactgggccctgtgaggtgtcagtctgcccctgctggggggtgcctccctgttaggctgctcaggggtcaggggtcagggacccacttgaggaggcagtctgccggttcccatatctccagctgtgtactgggagaaccactgctctcttcaaagctgtcagacagggacatttaagtctgcagaggttactgctgtctttttgtttggctgtgccctgcccccataggtggagcctacagaggcaggcaggcctcctggagctgtggtggctccacccagttcgagctttaggctgctttgtttacctaaggaagcctgggcaatggcgggcgcccctcccccagcctcgctgccgccttgcagtttgatctcagactgctgtgctagcaatcagtgtgactccgtggggtaggaccctccgagccaggtgcgggatataatctcgtggtgcgccgttttttaagcgggtctgaaaagcgcaatattcgggtgggagtgacccgattttccaggtgccgtccgtcacccctttctttgactcggaaagggaactccctgaccccttgctcttcccaagtgaggcaatgcctcgccctgcttcggctcgcgcacggtgcacgcacccactgacctgcgcccactgtctggcactccctagtgagatgaacccggtacctcagatggaaatgcagaaatcacccatcttctgcgtcgctcacgctgggagctgtagaccagagctgttcctattcggacatcttggctcctccc

SEQ ID NO: 10497 - DNA, 10342 bp, Homo sapiens
ttttttttttttttttttttttttttttttttttttttttttttgagacggagtctcgctctgtcgcccaggccggactgcggactgcagtggcgcaatctcggctcactgcaagctccgcttcctgggttcacgccattctcctgcctcagcctcccgagtagctgggactacaggcgcccgccaccgcgcccggctaattttttgtatttttagtagagacggggtttcaccttgttagccaggatggtctcgatctcctgacctcatgatccacccgcctcagcctcccaaagtgctgggattacaggcgtgagccaccgcgcccggcctaaactttcaatttttaaaaaaactttttaactctcttgtaggaacacttagcttaaaacacaaacacattgtacatctatatacattttttttttttttgagatggagtttcgcttttgttgcccaggctggagtacaatggcatgaactcggctcaccacaacctccacctcctgggttcaagcaattctcctgcctcagcctcccgactagctgggattacaggcatgcgccaccacacccagctaattttgtatttttagtagagatgaaatttccccatgttggtcaggctggtcccgacctcaggtgatccgccctcctcagcctcccaaagtgctgggattacagacgtgagctaccactcctggccccccccccaattttttttatagccttgttctacaagtttttttttttaattttttaaatttttaacattttaagcatttttgttaaaaatgaagacacaaacataatagcctatccagggtcaacatcatcaatatcatcgtcttccacttccacgtcttgtcccactggaaggtcttctggggcagtaacatacatggagctgtcatttcctaggataacagtgctgccttctggaaaacctccttaaagggcctgcctgaggctgttttacagttaacatttttttaaataagtagaaggagtaagtctacaataacaataaaagcattgcataataaatacatgagccagtaacagtcacttattaaatattacataatgtacataattgtatgtgttacacttttatgtaacaactttaagcactgtttacaccagtatcaccacaaacatgtaatgggttacactacagccttacagtggctaccacgtcactaagctataggaatgaatgaatgaatgaatttatttatttaagacagggtctcgctctgttgccaggactgcagtgcagtggtgctatctcggtccactgcaacttctgcttcctgggttcaagtgattcttatgcctcagcctcccaagtagctgagactacaagcgtacaccaccatgcctggctaatttttggatttttagtagagatatggttttgtcatgttggccaggttggtctggaactcctggcctcaagtggtcctcctgccttggcctcccagagtgctgggattacaggcatgagccactgcgcccaactgaaatattttagtttcattatagtcttacgggaccactgtggtatatgaggtctgttgttcactgaaatgttctgtggtacatgattgtacatgattgtgtgctataaaaatttaacatttgaccagttatcactgcccgctccctcactttttggaaggctaaaattatcaatgattttctagggtttcacttctgtatataactaaagcagtgtttaatgacagggaatttggggctgagtctgtggtataattctaaattgtaatgtgtcatttttatgtttttgattttgttttaatagaaagcttttgatgtaaaaactattttaactttacatcaatgtgtattatcctgtgaaaatgttttgaagatacttagatctatggttgaagatacagatgctttgtattatgtttcagatatgagcaagacagtgggcatgacagtggaagtgaggatgcctgttttgattcttcacaaccatttaccttagttactataggcatgcagaaattttttatacccaagtcacctacttcttctaatgaacctgaaaatagagttctccctatgccaacaagtattgggattttccttgactgtgataaaggcaaagtaaatttctatgatatggatcagatgaaatgcctttatgaacgccaagtggactgttcacatacactgtatccagcatttgcattaatgggcagtggaggaattcagcttgaagaacccatcacagcaaaatatctggaataccaagaggacatgtagttgaaacatctgatgtgactcaggataaaaactgtaaacaaagcaatgccttagcgttaaccttcgtaactaattacatatcgctgagtgttctgtcaccccacttgtgtttgagtatgattcttcttgaaatacagaaaatctaaacagccttgtgtcttcatgtcgttgttctgcctttcacaaatgatgaaagtgaagatgttctttccaagttaatactgaagtggttaactttgcaactggactgtcttttactttatgtacaggatatctaatttatttctgtcagctggtgttgctgacactttccttatggtgggggggatacaaaagtatttattatgattctcttctgtttgacttttcatttttatatcatgtttatgtcctaagagaagatattttttaaatgccttatggataggaattagtactaagcaatgtgtcttgcatttgttttcaataggaaaacaaagttctagataggttaaaagaaaaacaccataaaagtggtagtatatttaagtggaaaattatgtattttaaagtgtgtaactattaaaaatatattgcctggaaaaggaatactactgttttgttttgttaagaccacaaactgtattgctaaggacattttaagagtctgcttagccataacactcatttaacagcatgggtagtaagcatggtttcttgcagaaaacacaaagttctcagctaacacattaaacttctcactttatatactttttttcagagaaatttatctttagtttttcttattctgtgaaaatatttgttcttatgtcaaagaattatttttcagatatattggtaaagatggactgatattaaaagtcatatttattcttttacccccttactgtgttttgtgattttcatttttggcccaattattacatatcaggttttcctgatttatatttacatgtttgaaaagttcattatatattttagtagcgttacatatattataaatttttgtaacatttaaatgttcacttatgtggcattttctgtttctcattggtaataagcatttctaatataagcaagtaaaaatacaaatttaattacttagaaatgataactaagatcacaatgactgtgtaccctttaaaatatcttttaatttgaggaattacattctatctaaattgtgtgtctgtttttgaaaggtgttgctttcaagtaggtggtttttatttaaagtacttatttttttgaggttaaaatattcagaaactacttttatgcattgtagcagtaatcatttatggaatgcttttgacatgttttaacagggtaaccaaaacttttaggcctgttttttttggttgtccttgttgttatatttttaatggaaatctgttactcaggctggtagcattaaattagctttttaccctcaactcaagtagcaaatatcatggagaacttcagtgtttagcaggctgttaatttcccatctatgaatagcactttatgatgtaggctaaactaagcaaataatgcagcgttatgtggatcattatgcaataaagctgctaaagtcacatttgtggttgatactcaagccttgtacaagcacatatcatgtagacatttttaaatgtgaagctttaacaggaataggatagctgtttcaaaccttgtgcaattgtaaataaattgtttagctgtgtttctttcatttttaataaaaaattaaaaagaattcatgtgtaattattcagatctgcattccaggaatttttagtatgtttacatgaaaagttgaaacaaactgattatgaaaagatgattagctgtacatattaactcagagctacagttttatatgaaatcattttgaacatttatttattagcttaatttctgtgaaagtgattattagagaagcttaacataaaacttcaattgtttcatatattaaatttttttaatataaaacaatataaaattttatttttttattacataagctaataataatagtgcaagtttgttcttttatccccaaaggaaaaatatggtaaaagttatatcttgactaaggatctgagggtcaacattttaataccaaaatgctgtgtttataattaatatattcaaaatatactcatctttaaaccaaatgttatatactaaaagacatcagaaagtatctactaaatagtacaatatagtaaccaccttgtaacactgtacttaatatagcccagttttataaaatactgtaaatagttctaccgtctaagcaattctagattttatttttccctttgtgcaacaaatcagaatgcgtgattatagaatgctaaaagctcttggagatactttgccaggcatctttgaggagaaattttagagaatcaacgacacttgattaagcatttatgaaccataagtttttcttctgctctcctgtggaaaaaaaacaaacataaaataaaacaacaaaccatattggcaattgcatatgtttataaacattccattattttttttttctgttttaattatcttttaagatgaaataatctgtccataggctagagcagcaagtttatgcaagagaatatgaaaacatccttccttctagtagaatatgtatccatagtgcatgatgtccactgaagtttgtaatatttttacatgcaatgttactattgcagttattaacaacctataatgttttgcacatagtaggctttcaaatgctgttaggattcaacatgggacataaagcctaagaatggaaccagattccctagggtttcagtatttgatttctagatgactagaagactgccctggtgtaatctatgtgtcttggaatttttttatggtgatgaacaaagtaaacatttgacctggaaatcactggaaatattcgaaccaaacaaaagagtaataaaaagtaaacctatccttaactttaaaaccaagcatgggttcttctggttgatgggtgtatagttgagaaagcatatttctccagaactattcagtttcactgacagggaagtattttttggcacaataaccaattattgaattattttattttattttattttattatactttaagttctagggtacatacgcacaacacgcaggtttgttacatatgtttacatgtgccatgttggtgtgctgcacccattaactcatcatttacgttatgtatatctcctaatgctatccctctcccctcccccacaccccacaacaggccccggtatgtgatgttccccaccctgtgtccaagtgttctcattgtgcatttcccacctatgagtgagaacatgtggtgtttggttttctgtccttgcgatagtttgctcagaatgatggattccagcttcatccatgtccctacaaaggacatgaactcatccttttttaatggctgcatagtattccatggtgtatatgtgccacattttctttatccagtctatcattgatggacatttgggttggttcccagtccttgctattgtgaatagtgccacaataaacatacgtgtgcatgtttctttatagtagcatgattgataatcctttgggtttatgcccagtaatgggatggctgggccaaatggtatttctggttctagatccttgaggaattgccacactgacttccccaatggttgaactagtttacagtcccatcaacagtgtaaaagtgttcctatttctccacatcctctccagcacctgttgtttcctgactttttaatgattgccattctaactggtgtgggatggtatctcattgtggttttgatttgcatttctcagatggcgagtgatgatgagcattttttcatgtgtctgttggccacataaatatcttcttttgagaagtgtctgttcatatcctttgcccactttttgatggggttgtttgattttttcttgtaaatttgtttaagttctttgtagattctggatattaaccctttgtcaggtgggtagattgtaaaaattttctcccattctgtaggttgcctgttcactctgatagtagtttcttttgctgtgcagaagctctttagtttacttagatcccattagccaattttggcttctgttgccattgcttttggtgtttaagtcatgaagtccttacccatgcctacgtcctgaatggtaatgcctaggttttcttctagggtttttatggttttaggtctgacatttaagtctttaatccatcttgaattaatttttgtataaggtgtaaggaagggatccagtttcagctttctacatatggctagccagttttcacaacaccatttgttaaatagggaatcctttccccatttcttgtttttgtcaggtttgtcaaagatcagatggttgtagatgtgtggtattatttccaacgactctattctgttccattggtctatgtctctgttttggtaccagtaccatgctgtttttgttactgtagacttgtagtatagtttgaagtcaggtggcatgatgcctccagctttgttcttttggcttaggattgtcttggaaatgtgggctcctttttggttccatatgaactttaaagtagttttttccaattctgtgaagaaagtcatttggtagcttgatggggatggcattgaatctataaattaccttgggtggtatggccattttcacaatatttattcttcctatccatgagaatggaatgtccttccatttgtttctgtcctcttttatttcgttgagcagtggtttgtaattctccttgaagaggtccttcacatcccttgttggttggattcctaggtattttattctctttgaagcaattgtgaatgggcgttcactcctgatttggctctctgtctgttaatggtgtataggaatgcttgtgatttttgcacattgattttgtatcctgagactttgctgaagatgcttatcagcttaaggagattttgggctgagatgatggggttttctaaatatacaatcatgtcatctgcaaacagggacaatttgacttcctcttttcctaattgaataccctttatttatttctcctgcctgattgccctggccagaacttccaacactatgttgattaggagtggtgagagagggcatccctgtcttgtgccaggtttcaaagggaatgcttccagtttttgcccattcagtatgatattggctgtgggtttgtcataaatagctcttattattttgagatacgtcccatcaatacctaatttattgagagtttttagcatgaagggctgttgaattttgtaaaaggccttttctgcatctattgagataatcacgtggtttttgtctttggttctgtttatacaatggattatgtttattgatttacatatgttaaactggccttgcatcccagggatgaagctagcttgaccgtggtgaataggcttttttatgtgctgctggattcggtttgccggtattttatcgaggatttttgcatcgatgttcaacagggatattggtctaaaattctctttttttgttgtgtttctgccaggctttggtatcaggatgatgctggcctcataaaatgaattagggaggattctctctttttctattgattggaatagtttcagaagcaatggtaccagctcctctttgtacctctgatagaattcggctgtgaatccatctggttctggactttttttgattggtaggctattaattattgcctcaatttcagaacctgttattagcctattcagggattcagcttcttcctggtttagttttgggagggtgtatgtgtccaggaatttacccatttcttctagattttctagtttatttgcatagaggtgtttatagtattctctgatggtagtttgtatttctgtgggattggtgatgatatcccctttatcattttttattgcatctatttgattcttctctcttttcttctttattagtcttgctagcggtctatcaattttgtagatgttttcaaaaaaccagctccttggattcattgattttttgaagggttttttgtgtctccatctccttcagttctgctctgatgttagttagttcttgccttctgctagcttttgaatgtgttttctcttccttctctagttcttttaattgtgacattagggtgtcaattttagatctttcctgctttctcttgtgggcatttagtgctataaatttccctctacacactgctttgaatatgtcccagagatgctggtatgttgtgtctttgttctcattggtttcgaagaacatctttatttttgccttcatttcattatgtacccagtagtcattcaggagcaggttgttcagtttccatgtagttgcgcggttttgaatgagtttctcaatcctgaattctagtttgattgcactgtggtctgagagacagtttgttataatatctattcttttacatttgctgaggagtgctttacttccaaccatgtggtcaattttggagtaagtgtgatgtggtgctgagaagaatgtatattctgttgatttggggtgaagagtcctgtagatgtctattagaccctcttagtgcagagctgagttcaattcctggatatccttgttaactttctgtctcgttgatttgtctaatgttgacagtgaggtgttaaagtctcccattattattgtgtggtagtctaagtctctttgtaggtctttaagggcttgctttgtgaatctgggttctcctgtattgggtgcatatatatttaggatagttagctcttttcttgttgaattgatccctttacgtttatgtaatggccttctttgtctgttttgatctttgttggtttaaagtctgttttatccaagactaggattgcaacccctgcctttttttgttttccattttcttggtagatcttcatccgtttattttgagcctatgtgtgtctgtctgcatgtgagataggtctcctgaatacagcacactgatgggtcttgactctttatccaatttgccagtctgtgtcttttaattgtagcatttacctcatttacatttaaggttaatattgttatgtgtgaatttgatcctgtcattatgatgttagctggttgttttgctcattagttgatgcagtttcttcctagcctccatggtctttacaatttcgcatgtttttgcagtggctggtaccagttgttgctttccatgtttagtgcttccttcaggagctcttgtaaggcaggcctggtggtgacaaaatctttcagcatttgcttgtctgtagaggattttatttctcttccacttacgaagcttagtttggctggatatgaaattctgggctgaaaattcttttctttaagaatgttgaatattggcccccactttcttctggcttgtagagtttctgctgagagatctgctgttagtctgatgggcttccctttgtgggtaacccgacctttctctctggctgcccttaacattttttccttcatttcaactttggtgaatctgacaattatgtgtcttggagttgctcttctcgaggagtatctttgtgacattctctgtattcctgaatttgaatgttggcctgccttgctaggttgtgaaagttctcctggataataccctgaagagtgttttccaactgggttccattctccccatctctttcagttacaccaatcagatgtagatttggtcttttcacatagtcccatatttcttggaggctttattcatttctttttacttttttctctaaacttctcttcttgcttcatttcattcatttgctcttcagtcactgataccctttcttccacttgattgaattggctactgaagcttgtgcatgtgtcacgtagttcttgtgccatggttttcagctccatcaggtcatttaaagacttctctacactgtttattctagttagccattcgtctactcttttttcaaggtttttagcttctttgcgatgggttcgaa

SEQ ID NO: 10498 - DNA, 6055 bp, Homo sapiens
attaatagataatatttttttttaaatttttttttaattatactttaagttttagagtacatgtgcacattgtgcaggttagttacatatgtatacatgtgccatgctggtgtgctgcacccactaactcgacatctagcattacgtatatctcccaatgctatccctcccccctccccccaccacacaacagtccccagagtgtgatgttccccttcctgtgtccatgtgatctcattgttcaattcccacctatgagtgagaatatgcggtgtttggttttttgttcttgcgatagtttactgagaatgattatttccaatttcatccatgtccctacaaaggacatgaattcatcattttttatggctgcatagtattccatggtgtatatgtgccatattttcttaatccagtctatcattgttggacatttgggttggttccaagtctttgctattgtgaatagtgccgcaataaacatacgtgtgcatgtgtctttatagcagcatgatttatagtcctttgggtatatacccagtaatgggatggctgggtcaaatggtatttctagttctagatccctgaggaattgccacactgacttccacaatggttgaactagtttacagtcccaccaacagtgtaaaagtgttcctatttctccacatcctctccagcacctgttgttttctgactttttaatgattgccattctaactggtgtgagatggtatctcattgtggttttgatttgcatttctctgatggccagtgatggtgagcattttttcatgtgttttttggctgcataaatgtcttcttttgagaagtgtctgttcatgtcctttgcccactttttgatggggttgtttgtttttttcttgtaaatttgtttgagttcattgtagattctggatattagccctttgtcagatgagtaggttgcaaaaattttctcccattttgtaggttgcctgttgactctgatggtagtttcttttgccgtgcagaagctctttagtttaattagatcccatttgtcaattttgtcttttgttgccattgcttttggtgttttagacctgaagtccttgcccatgcctatgtcctgaatggtaatgcctaggttttcttctagggttttgatggttttaggtctaacgtttaagtctttaatccatattgaattgatttttatataaggtgtaaggaagggatccagtttcagctttctacatatggctagccagttttcccagcaccatttattaaatagggaatcctttccccattgcttgtttttctcatgtttgtcaaagatcagatagttgtagatatgcggcgttatttctgagggctctgttctgttccattgatctatatctctgttttggtaccagtaccatgctgttttggttactgtagccttgtagtatagtttgaagtcaggtagtgtgatgcctccagctttgttcttttggcttaggattgacttggcgatgcgggctcttttttggttccatatgaactttaaagtagtattttccaattctgtgatgaaacgcattggtagcttgatggggattgcattgaatctgtaaattaccttgggcagtatggccattttcacgatattgattcttcctacccatgagcatggaatgttcttccatttgtttgtatcctcttttatttccttgagcagcggtttgtagttctccttgaagaggtccttcacatcccttgtaagttggattcctaggtattttattctctttgaagcaattgtgaatgggagttcactcatgatttggctctctgtttgtctgttgttggtgtataggaatgcttgtgatttttgcacattgattttgtatactgagactttgctgaagttgcttatcagcttaaggagattttgggctgagacaatggggttttctagatatacaatcatgtcatctgcaaacagggacaatttgacttcctcttttcctaattgaataccctttatttccttctcctgcctgattgccctggccagaacttccaacactatgttgaataggagtggtgagagagggcatccctgtcttgtgccagttttcaaagggaatgcttccagtttttgcccattcagtatgatattggctgtgggtttgtcatagatagctcttattattttgaaatatgtcccatcaatacctaatttattgagagtttttagcatgaaggttgttgaattttgtcaaaggccttttctgcatctattgagataatcatgcggtttttgtctttggctctgtttatatgctggattacatttattgatttgcatatattgaaccagccttgcatcccagggatgaagcccacttgatcatggtggataagctttttgatgtgctgctggattcggtttgccagtattttattgaggatttttgcatcaatgttcatcaaggatattggtctaaaattctcttttttgtttgtgtctctgcccggctttggtatcagaatgatgctggcctcataaaatgagttagagaggattccctctttttctattgattggaatagtttcagaaggaatggtaccagttcctccttgtacctctggtagaattcggctgtgaatccatctggtcctggactctttttggttgttaagctattgaatattgccacaatttcagatcctgttattggtctattcagagattcaacttcttcctggtttagtcttgggagagtgtgtgtgtcaaggaatttatccatttcttctagattttctagtttatttgcgtagaggtgtttgtagtattctctgatggtagtttgtatttctgtgggatcggtggtgatatcccctttatcattttttattgtgtctatttgattcttctctctttttttctttattagtcttgctagcggtctatcaattttgttgatcctttcaaaaaaccagatcctggattcattaattttttgaagggttttttgtgtctctatttccttcagttctgctctgattttagttatttctcgccttctgctagcttttgaatgtgtttgctcttgcttctctagttcttttaattgtgatgttagggtgtcaattttggatctttcctgctttctcttgcgggcatttagtgctataaatttccctctacacactgctttgaatgagtcccagagattctggtatgttgcgtctttgttctcgttggtttcaaagaacatctttatttctgccttcatttcgttatgtacccagtagtcattcaggagcaggttgttcagtttccatgtagttgagcggttttgagtgagattcttagtcctgagttctagtttcattgaactgtggtctgagagatagtttgttataatgtctgttcttttacatttgctgaggagagctttacttccaagtatgtggtcaattttggaataggtgtggtgtggtgctgaaaaaaatgtatattctgttgatttggggtggagagttctgtagatgtctattgggtctgcttggtgcagagctgagttcaattcctgggtatccctgttgactttctgtctcgttgatctgtctaatgttgacagtggggtgttaaagtctcccattattattgtgtgggagtctaagtctctttgtaggtcactcaggacttgctttatgaatctgggtgctcctgtattgggtgcatatatatttaggatagttagctcttcttgttgaattgatccctttaccattatgtaatggccttctttgtctcttttgatcttttttggtttcaagtctgttttatcagagactaggattgcaacccctgcctttttttgttttccatttgcttggtagatcttcctccatccctttattttgagcctatgtgtgtctctgcatgtgagatgggtttcctgaatacagcacactgatgggtcttgactctttatccaatttgccagtctgtgtcttttaattggaggatttagtccatttacatttaaagttaatagtgttatgtgtgaatttgatcctgtcattatgatgttagctggttattttgctcattagttgatgcagtttcttcctagtctcgatggtctttacattatggcatgattttgcagcggctggtaccagttcttcctttccatgtttagcgcttccttcaggagctcttttagggcaggcctggtggtgacaaaatctctcagcatttgcttgtctgtaaagtattttatttctccttcacttgtgaagcttagtttggctggatatgaaattcttggttgaaaattcttttctttaagaatgttgaatattggcccccactctcttctggcttgtagggtttctgctgagagatccgctgttagtctgatgggcttccctttgagggtaacccgacctttctctctggctgcccttaacattttctccttcatttcacctttggtgaatctgacaattatgtgtcttggagttgctcttctcgaggagtatctttgtggtgttctctgtatttcctgaatctgaatgttggcctgccttgctagattggggaaattctcctggataatatcctgcagagtgttttccaacttggttccattctccccatcactttcaggtacaccaatcagacgtagatttggtcttttcacatagtcccatatttcttcaaggctttgcttgtttctttttattcttttttctctaaactttccttcttgcttcatttcattcatttcatcttccattgctgataccctttcttccagttgatcacatcggctcctgaggcttctgcattcttcacgtagttctcgagccttggttttcagctccatcagctcctttaagcacttttctgtattggttattctagttatacattcttctaaatttttttcaaagttttcaacttctttgcctttggtttgaatgtcctcccgtagctcagagtaatttgatcgtctgaagccttcttctctcagctcgtcaaagtcattctccgtccagctttgttccattgctggtgatgagctgcattcctttggaggaggagaggcactctgatttttagagtttccagtttttctgttctgttttttccccatctttgtggttttatctacttttggtctttgatgatggtgatgtacagatgggtttttggtgtggatgtcctttctgtttgttagttttccttctaacagacaggaccctcagctgcaggtctgttggagtaccctgccgtgtgaggtgtcagtgtgcccctgctggagggtgcctcccagttaggctgctcaggggtcaggggtgagggacccacttgaggaggcagtctgcctgttctcaaatctccagctgcgtactgggagaaccactgctctcttcaaagctgtcagacagggacatttaagtctgcagaggttactgctgtctttttgtttgtctgtgccctgcccccagaggtggagcctacagaggcaggcaggcctccttgagctgtggtgggctccacccagttcgagcttctgggctgctttgtttacctaagcaagcctgggcaatggcgggcgcccctcccccagcctcgctgccaccttgcagtttgatctcagactgctgtgctagcaatcagcgagactccgtgggcgtaggaccctctgagccaggtgcaggatataatctcgtggtgtgctgttttttaagcccgtcggaaaagcgcagtattcgggtgggagtgacccgattttccaggtgccgtccgtcacccctttctttgattaggaaagggaactccctaaccccttgcgcttcccgagtgaggcaatgcctcgccctgctttggctcacgcacggtgcgcgcacccactgacctgtgcccactgtctggcactccctagtgagatgaacccggtacctcagatggaaatgcagaaatcacccgtcttctgcgtcgctcaggctgggagctgtagactggaactgttcctattcggccatcttggctcctcccca

SEQ ID NO: 10499 - DNA, 6052 bp, Homo sapiens
ttgtttttgtttttttgttttttttttttttattatactttaagttttagggtacatgtgcacattgtgcaggttagttacatatgtatacatgtgccatgctggtgcgctgcacccactaactcgtcatctagcattaggtatatctcccaatgctatccctcccccctcccccgaccccaccacagtccccagagtgtgatattccccttcctgtgtccatgtgatctcattgttcaattcccacctatgagtgagaatatgcggtgtttggttttttgttcttgcgatagtttactgagaatgatggtttccaatttcatccatgtccctacaaaggacatgaactcatcattttttatggctgcatagtattccatggtgtatatgtgccacattttcttaatccagtctatcattgttggacatttgggttggttccaagtctttgctattgtgaataatgccgcaataaacatacgtgtgcatgtgtctttatagcagcatgatttatagtcctttgggtatatacccagtaatgggatggctgggtcaaatggtatttctagttctagatccctgaggaatcaccacactgacttccacaatggttgaactagtttacagtcccaccaacagtgtcaaagtgttcctatttctccacatcctctccagcacctgttgtttcctgactttttaatgattgccattctaactggtgtgagatgatatctcatagtggttttgatttgcatttctctgatggccagtgatgatgagcattttttcatgtattttttggctgcataaatgtcttcttttgagaagtgtctgttcatgtccttcacccactttttgatggggttgtttgtttttttcttgtaaatttgtttgagttcattgtagattctggatattagccctttgtcagatgagtaggttgcgaaaatgttctcccattttgtaggttgcctgttcactctgatggtagtttcttttgctgtgcagaagctctttagtttaattagatcccatttgtcaattttggctttggttgccattgcttttggtgttttggacatgaagtccttgcccacgcctatgtcctgaatggtaatgcctaggttttcttctagggtttttatggttttaggtctaacgtttaaatctttaatccatcttgaattgatttttctataaggtgtaaggaagggatccagtttcagctttctacatatggctagccagttttcccagcaccatttattaaatagggaatcctttccccattgcttgtttttctcaggtttgtcaaagatcagatagttgtaggtatgtggcgttatttctgagggctctgttctgttccattgatctatatctctgttttggtaccagtaccatgctgttttggttactgtagacttgtagtatagtttgaagtcaggtagtgtgatgcctccagctttgttcttttggcttaggattgacttggcgatgcgggctcttttttggttccatatgaactttaaagtagttttttccaattctgtgaagaaagtcattggtagcttgatggggatggcattgaatctgtaaattaccttgggcagtatggccattttcatgacattgattcttcctacccatgagcatggaatgttcttccatttgtttgtgtcctcttttatttccttgagcagtggtttgtagttctccttgaagaggtccttcacatcccttgtaagttggattcctaggtattttattctctttgaagcaattgtgaatgggagttcactcatgatttggctctctgtttgtctgttgttggtgtataagaatgcttgtgatttttgtacattgattttgtatcctgagactatgctgaagttgcttatcagcttaaggagattttgggctgagacgatgggcttttctagataaacaatcatgtcgtctgcaaacagggacaatttgacttcctcttttcctaattgaataccctttatttccttctcctgcctgattgccctggccagaacttccaacactatgttgaataggagcagtgagagagggcatccctgtcttgtgccagttttcaaagggaatgcttccagtttttgcccattcagtatgatattggctgtgggtttgtcatagatagctcttattattttgaaatacgtcccatcaatacctaatttattgagagtttttagcatgaagggttgttgaattttgtcaaaggctttttctgcatctattgagataatcatgtggtttttgtctttggctctgtttatatgctggattacatttattgatttgcgtatattgaaccagccttgcatcccagagatgaagcccacttgatcatggtggataagctttttgatgtgctgctggattcggtttgccagtattttattgaggatttttgcatcaatgttcatcaaggatattggtctaaaattctcttttttggttgtgtctctacccggctttggtatcagaatgatgctggcctcataaaatgagttagggaggattccctctttttctattgattggaatagtttcagaaggaatggtaccagttcctccttgtacctctggtagaattcggctgtgaatccatctggtcctggactctttttggttggtaaactattgattattgccacaatttcagctcctgttattggtctattcagagattcaacttcttcctggtttagtcttgggagagtgtatgtgtcgaggaatttatccatttcttctagattttctagtttatttgcgtagaggtgtttgtagtattctctgatggtagtttgtatgtctgtgggatcggtggtgatatcccctttatcattttttattgtgtctatttgattcttctctctttttttctttattagtcttgctagtggtctatcaattttgttgatgctttcaaaaaaacagctcctggattcattgattttttgaagtgttttttgtgtctctatttccttcagttctgctctgattttagttatttcttgccttctgctagcttttgaatgtgtttgctcttgcttttctagtacttttaattgtgatgttagggtgtcaattttggatctttcctgctttctcttgtgggcatttagtgctatacatttccctctacacactgctttgaatgcgtcccagagattctggtatgctgtgtctttgttctcgttggtttcaaagaacatctttatttctgccttcatttcgttatgtacccagtagtcatttaggagcaggttgttcagtttccatgtagttgagcagctttgagtgagattcttaatcctgagttctagtttgattgcactgtggtctgagagatagtttgttataatttctgttcttttacatttgctgaggagagctttacttccaagtatgtggtcagttttggaataggtgtggtgtggtgctgaaaaaaatgtatattctgttgatttggggtggagagttctgtagatgtctattaggtccacttggtgcagagctgagttcaattcctgggtatccttgttgactttctgtctcgttgatctgtctaatgttgacagtggggtgttaaagtctcctattattaatgtgtgggagtctaagtctctttgtaggtcactcaggacttgctttatgaatctgggtgctcctgtattgggtgcatatatatttaggatagttagctcctcttgttgaattgatccctttaccattatgtaatggccttctttgtctcttttgatctttgttggtttaaagtctgttttatcagagactaggattgcaacccctgcctttttttgttttccatttgcttggtagatcttcctccatccttttattttgagcctatgtgtgtctctgcacgtgagatgggtttcctgaatacagcacactgatgggtcttgactctttatccaacttgccagtctgtgtcttttaattggagaatttagtccatttacatttaaagttaatattgttatgtgtgaatttgatcctgtcattatgatgttagctggtgattttgctcgttagttgatgcagtttcttcctagtctcgatggtcttcacattttggcatgattttgcagcggctggtaccggttgttcctttccatgtttagcgcttccttcaggagctcttttagggcaggcctggtggtgacaaaatctctcagcatttgcttgtctgtaaaggattttatttctccttcacttatgaagcttagtttggctggatatgaaattctgggttgaaaattcttttctttaagaatgttgaatattggcccccactctcttctggcttgtagggtttctgccgagagatccactgttagtctgatgggcttccctttgagggtaacccgacctttctctctggctgcccttaacattttttccttcatttcaactttggtgaatctgacaattatgtgtcttggagttgctcttctcgaggagtatctttgtggcgttctctgtatttcctgaatctgaacgttggcctgccttgctagattggggaagttctcctggataatatcctgcagagtgttttccaacttggttccattctccgcatcactttcaggtacaccaatcagacgtagatttggtcttttcacatagtcccatatttcttggaggctttgctcatttctttttattcttttgtctctaaacttcccttctcgcttcatttcattcgtttcatcttccattgctgataccctttcttccagttgatcgcatcggctcctgaggcttctgcattcatcacgtagttctcgagccttggttttcagctccatcagctcctttaagcacttctctgtattggttattctagttatacattcttctaaatttttttcaaagttttcaacttctttgcctttggtttgaatgtcctcccgtagctcagagtaatttgatcgtctgaaaccttcttctctcagctcgtcaaagtcattctccatccagctttgttccgttgctggtgaggaactgcgttcctttggaggaggagaggcgctctgcgttttagagtttccagtttttctgttctgttttttccccatctttgtggttttatctacttttggtctttgatgatggtgatgtacagatgggttttcggtgtggatgtcctttctgtttgttagttttccttctaacagacaggaccctcagctgcaggtctgttggaataccctgctgtgtgaggtgtcagtgtgcccctgctggggggtgcctcccagttaggctgctcgggggtcaggggtcagggacccacttgaggaggcagtctgcccgttctcagatctccagctgcgtgctgggagaaccactgctctcttcaaagctgtcagacagggacatttaagtctgcagaggttactgctgtctttttgtttgtctgtgccctgcccccagaggtggagcctacagaggcaggcaggcctctttgagctgtggtgggctccacccagttcgagcttcccagctgctttgtttacctaagcaagcctgggctatggcaggcgcccctcccccagcctcgctgccgccttgcagtttgatctcagactgctgtgctagcaatcagcaagactccgtgggcgtaggaccctccgagccaggtgtgggatatagtcttgtggtgcgccgtttttaaagccggtctgaaaagcgcaatattcgggtgggagtgacccgattttctaggtgcctccgtcacccctttctttgactcggaaagggaactccctgaccccttgcgcttcccaggtgaggcaatgcctcgccctgcttcggctcgtgcacgttgcgcacacccactggcctgcgcccactgtctggcactccctagtgagatgaacccggtacctcagatggaaatgcagaaatcacctgtcttctgcgtcgctcacactgggagctgtagaccggagctgttcctattcggccatcttggctcctcctctat

SEQ ID NO: 10500 - DNA, 41345 bp, Homo sapiens
  SITE (19396): n equals a,t,g, or c
  SITE (19398): n equals a,t,g, or c
ttttttttaatttattttttattattatactttaagtttcagggtacatgtgcacattgtgcaggttagttacatatgtatacatgtgccatgctggtgtgctgcacccactaattcgtcatctagcattaggtatatctcgcaatgctatccctcccccctccccctaccccacaacagtccccagagtgtgatattccccttcctgtgtccatgagatctcattgttcaattcccacctatgagtgagaatatacggtgtctggttttttgttcttgcgatagtttactgagaatgatgatttccagtttcacccatgtccctacaaaggacataaactcatcattttttgtggctgcatagtattccatggtgtatatgtgccacattttcttaatccagtctatcattgttggacatttgggttggttccaagtctttgttatggtgaataatgccgcaataaacatacgtgtgcatgtgtctttatagcagcatgatttatagtcctttgggtacatacccagtaatgggatggctgggtcaaatggtatttcctgttctagatccctgaggaatcgccacactgacttccacaatggttgaactagtttacagttccaccaacagtgtaaaagtgttcctatttctccacatcctctccagcacctgttgtttcctgactttttaatgattgccattctaactggtgtgagatggtgtctcattgtagttttgatttgcatttctctgaaggccagtgatgatgagcattttttcatgtgttttttggctgcataaatgtcttcttttgagaagtgtctgttcatgtccttcgcccactttttgatggggttgtttgtttttttcttgtaaatttgttggagttcattgtagattctggatattagccctttgtcagatgagtaggttgtgaaaattttctcccatgttgtaggttgcctgttcactctgatggtagtttcttttgctgtgcagaagctctttagtttaattagatcccatttgtcaattttggcttttgttgccattgcttttggtgttttggacatgaagtccttgcccatgcctatgtcctgaatggtaatgcctaggttttcttctagggtttttatggttttaggtctaacgtttaagtctttaatccatcttgaattgatttttgtataaggtgtaaggaagggatccagtttcagctttctacatatggctagccagttttcccagcaccatttattaaatagggaatcctttccccattgcttgtttttctcaggtttgtcaaagatcagatagttgtagatatgcggcgttatttctgagggctctgttctgttccattgatctatatctctgttttggtggcagtaccacgctgttttggttactgtagccttgtagtatagtttgaagtcaggtagtgtgatacctccagctttgttcttttcgcttaggattgacttggtgatgtgggctcttttttagttccatatgaactttaaagtagttttttccaattctgtgaagaaaggcattggtagcttgatggggatggcattgaatctgtaaattaccttgggcagtatggccattttcacaatattgattcttcctacccatgagcatgggatgttcttccatttgtttgtatcctcttttatttccttgagcagtggtttgtagttctccttgaagaggtccttcacatcccttgtaagttggattcctaggtattttattctctttgaagcaattgtgaatgggagttcactcatgatttggctctctgtttgtctgtggttggtgtataagaatgcttgtgatttttgtacattgattttgtatcctgggactttgctgaagttgcttatcagcttaaggagattttgggctgagacaatggggttttctagatatacaatcatgtcgtctgcaaacagggacaatttgacttcctcttttcctaattgaataccctttatttccttctgctgcctaattgccctggccagaacttccaacactatgttgaataggagtggtgagagagggcatccctgtcttgtgccagttttcaaagggaatgcttccagtttttgcccattcagtatgatactggctgtgggtttgtcatagatagctcttattattttgaaatacgtcccatcaatacctaatttattgagagtttttagcatgaatggttgttgaattttgtcaaaggctttttctgcatctattgagataatcatgtggtttttgtctttggctctgtttatatgctggattacatttattgatttgcgtatattgaaccagccttgcatcccagggatgaagcccacttcatcatggtggataagctttttgatgtgctgctggattcgttttgccagtattttattgaggatttgtgcatcgatgttcttcaaggatattggtctaaaattctctttttttgttgtgcctttgcctggctttggtatcagaatgatgctagcctcataaaatgagttagggaggattccctctttttctgttgattggaagagtttcagaaggaatggtactagttcctccttgtacctctggtagaattcggctgtgaatccatctggtcctggactctttttggttggtaagctattgattattgccacaatttcagctcctgttattggtctattcagagattcaacttcttcctggtttagtcttgggagagtgtatttgtcgaggaatttatccatttcttctagattttgtagtttatttgcgtagaggtatttgtagtattctctgatggtagtttgtatttctgtgggatcggtggtgatatcccctttatcattttttattgtgtctatttgattcttctctctttttttctttattagtctggctaacggtctatcaattttgttgatcctttcaaaaaaccagctcctggattcattaattttttgaagggttttttgtgtctctatttccttcagttctgctctgattttagttatttcttgccttctgctagcttttgcatgtgtttgctcttggttttctagttcttttaattgtgatgttagggtgtcaattttggatctttcctgctttctcttgtgggcatttagtgctataaatttccctctacacactgctttgaatgtgtcccagagattctggtatgttgtgtctttgttctcattggtttcaaagaatatctttatttctgcctttatttcgttatgtacccagtagtcattcaggagcaggttgttcagtttccatgtagttgagcgcttttgaatgagattcttaatcctgagttctagtttgattgcactgtggtctgagagatagtttgttataatttctgttcttttacatttgctgaggagagctttacttccaagtaagtggtcaattttggaataggtgtggtgtggtgctgaaaaaaatgtatattctgttgatttggggtggagagctctgtagatgtctattaggtctgcttggtgcagagctgagttcaattcctgggtatccttgttgactttctgtctcgttgatctgtctaatgttgacagtggggtgttaaagtctcccattattaatgtgtgggagtctaagtctctttgtaggtcactcaggacttgctttatgaatctgggtgcccctgtattgggtgcatatatatttaggatagttagctcttcttgttgaattgatccctttaccattatgtaatggccttctttgtctcttttgatctttgttggtttaaagtctgttttatcagagactaggattgcaacccctgcctttttttgttttccatttgcttggtagatctttctccatccttttattttgagcctatgtgtgtctctgcacgtgagatgggtttcctgaatacagcacactgatgggtcttgactttttaatccaatttgccagtctgtgtcttttaattggagcatttagtccatttacatttaaagttaatattgttatgtgtgaatttgatcctgtcattatgatgttagctggtgattttgctcgttagttgatgcagtttcttcctagtctcgatggtctttacattttggcatgattttgcagcggctggtaccggttgttcctttccatatttagcgcttccttcaggagctcttttagggcaggcgtggtggtgacaaaatctctcagcaattgcttgtctgtaaagtattttatttgtccttcacttatgaagcttagtttggctggatatgaaattctgggttgaaaattcttttctttaagagtgttgaatattggcccccactctcttctggcttgtagggtctctgccgagagatctgctgttagtctgatgggcttccctttgagggtaacccgacctttctctctggctgcccttaacattttttccttcatttcaactttggtgaatctgacaattatgtgtcttggagttgctcttctcaaggagtatctttgtggcgttctctgtatttcctgaatctgaatgttggcctgccttgctagattggggaagttctcctggataatatcctgcagcgtgttttccaacttggttccattctccccatcactttcaggtacaccaatcagacgtagatttggtcttttcacatagtcccatatttcttggaggcttttctcatttctttttattcttttttctctaaacttcccttctcgcttcatttcattcatttcatcttccattgctgataccctttcttcctgttgatcgcattggctcctgaggcttctgcattcttcacgtagttctcaagccttggttttcagctccatcagctcctttaagcacttctctgtattggttattctagttatacattcttctaaattgttttcaaagttttcaacttctttgcctttggtttgaatgtcctcccgtcgctcacagtaatttgattgtctgaagccttctactctcagctcgtcaaagtcattctccatccagctttgttccgttgctggtgaggaactgcgttcctttggaggaggagaggcactctgctttttagagtttccagtttttctgttctgttttttccccatctttgtggttttatctacttttggtctttgatgatggtgatgtacagatgggtttttggtgtggatgtcctttatgtttgttagttttccttctaacagagaggaccctcagctgcaggtctgttggagtaccctgccgtgtgaggtgtcggtatgcccctgctggggggtgcctcccggttaggctgctcgggggtcaggggtcagggacccacttgaggaggcagtctgcccgttctcagatctccagctgcgtgctgggagaaccactgctctcttcaaagctgtcagacagggacatttaagtctgcagaagttactgctgtctttttgtttgtctgtgccctgcccccagaggtggagcctacagaggcaggcaggcctccttgagctgtggtgggctccacccagttcgagcttcctggctgctttgtttacctaatcaagcctgggcaaaggcgggcgcccctcccccagcctccctgccaccttgcagtttgatctcagactgctgtgctagcaatcagcgagactccctgggcgtaggaccctccgagccaggtgcaggatataatcttgtgatgcgccgtttttcaagccggtcggaaaagcacagtattcgggtgggagtgacctgattttccaggtgctgtccgtcacccctttttttgactcggaaagggaactccctgaccccttgcgcttcccaagtgaggcaatgccttgccctgcttcggctcgtgcacggtgtgctcacccactgacctgcgcccactgtctggcactccctagtgagatgaacccggtacctcagatggaaatgcagaaatcacccgtcttctgcgtcgctcacactggtagctgtagaccggagctgttcctattcggccatcttggctcctccaggtgaacagatttttattttgaaattctaatccacaaattaggtccaagtttgggtctcagaaatctgtgtttctaccaaacactgcaaatctcccctttcattagggaagttgtaataaatactgatgtaggctcattggtgtgtggcaaaccatagtggcttgtatcagtccaggagtgggttagtgacttaaattagtccgaggtgatagatggcaaggtcttatagttcagggtttttgagagaggattttcttcctactgtttttcctgaacaaagacacgtacagccccagttattggtgtcagccattttatgaaagtgaggagaattagccttaggatgaagaaagtgtgtgtttgtgagagcagaaacagaaaatgaatcagaaatcttaataacaaaatgagccatcaatcaactaaatccaatgcctgcactggccctggacttttattatgtgacaagtggttttcttatttgttaagcaagttgtatttcctgttctttgctgttagaagctttctaatttcacctaattgtgatttttttcaaaagattttttttttactttagaaaaaaaatctaggaaaagtatttcccaattttctgctattattaagtaaaattaaggtattagtctacatcatttctctctgataataaatttggaatccaggaaggaacaatcaattttttgcaattatgtgacggataccacttcaggatcaatatcttcaactcttatgtctttggtattaatcactaggaaaaaataaattattggttaataaatgtatagaagtatgcatatttgaaagtaaattcagtaaacgagactggctaaatgctagggtattcaacattctagtctatagttgtaaagttgagaattaattttcccatggaaaaatgaaatgaaatattttattaaaatattcacacatatatgtgatgctcattttagctgtgggataggcttccgggcaaagcctctgttggctctgggtgggacaggtgtcacatttcctgcagatatccaattgaatttgggtgcttacatactactgctagccagagcttgtggtgtccttccttttaaatgctgttttgtatccagtaggttacacataagactggtaagtttctccagaagtaaaaagggactagaaactcaaccttcctccccataagttttatatataaatatacatttgctggatgagagtggcagctgttaacatattgcaagaaagacaatagagtttctaaataaggagtctgaacctatgtgaagatttggaggcaaagcctaaggtttggaaaggaattgtggttccctattccatgtaaaactggcaccaggacttaatttagtcagcctgactgcaagaatgcaccttaggggaaatgcatgcacaggcatgcacaagtgtgtgtgcctgtgtatcttcatgcctttgcatccataggtaacctataacactttggggcctgtgcagcttagtgaaggacactctgagcatagcagaagaaaggctccacaggtatcctcagttgttagctaaagctgaactattttccacgcaattatcattgagacaattgttttggagcccaacctcagggagtttaaattcctactctatcaatgagtactaagggtgaccagaaatgatttataggttggagtcttaggaacagtaacaaattgaaactgtaagaacatattagaatttctgctagtcaaacaggatgagagaaacataagattttgaaggactaatataaatatcttattgctattataagctgataaaacccaggacatgctaattatgcttacaggacaaggtggcatatatgaactgccctgcctagaactttcccccaactcagtccttaaaacttaccccaggagctaatagaatgttagatgcagactggcaagcaaagattcactcaccagagttagagagcgcttcgtagggtttcaggtgtgaggaaagtaggattggcaggtgagctaaacaagcaaaagtagtacttccctccctgatccctgaactagagaaaagagaaagttgctaaagacaaactgttacaagaagcatatgaaccaggcgtccttgaataacttctttcctaaccccaccaatagcactggaatacagaggaacacaaaaaaattttccctgtgatttggggaatttcagtggaactttgacatttttgagggtggcttttgtgtacagaaaatataacttggaggcttctttatcttttaaaattattacttatttcattgatatttcagattaagtcctagttcttccttaaactttgaagttcaaatttaaaatcttattttatttatttatatgtttattaatagctcaaattttaacatcactcttaagagagattttacaatttgtttaaattctctatttttttttcttttgtggggggcactgagtctcactctgttgcccaagctggagtgcagtggtccgatcctggctcactgcaaccttggcctcctgggttcaagcgattctcgtgcctcagtcacctgagtagctgggattataggaatgcaccagcacatcaggctaatttttgtacttttgatagaaagggggttttgccatgttggccagactggtcttgaactcctggcctcaagtgttctgcctgcctcagcctcccaaagccctgggattacaggaatgagccaccatgctgggccataaattctcttaagcattttaaacagcatttacaaatttagtatatttaattttctctttaagtagttcgtccaacaagtgaattttctcaaagtaccaaaatatatctggtaaatctaatgaattgaacttagtaattaattataataatgtttaaatctcttaaacattctaaactgttttcacatgtggttgaacattatcattttcagcttaaaactgtaagtctaaatcaataattcagatatataaattgaaacataagtctgatcttttaagtgttctaatattctaaattatcttaaatattaagaacaattaaaacaataaatatataaagattattccaaaagctaacataaaatatttctattatcagtgttattttcatttccatttctagtttttatttctcaaaacctggtctcataacttgcagtatcaacatcacctgggaaattgttagaaatacaaattctcaggccctaccccagccctccagaaacagaaactcaggatggggcccagcaatttgtgttttaataagagttacagatgattctgatgatgcttaagtctaataactattgcatgtttaattctaaagcacttcaagggtaaggcattagtgacataaaaataaatgatcctacaatttgaggttgccttctcaaatagctttggggttaaatgctcaactggctgaagttgcatattaatgtgagatttttggccaggcaggaaatttggggcattagacatctcaggtgatctttcttgtgataatatttagggacctcatgtaaaatactctatgattcccaaacatagttattgcatagctcacatctgctagacccaaatcatatataacttattaaccaaatctaagtctgcagctctcacccgagctgcatcactgcttgattagatttagataagttgtttcttgcctgatcctagtctgattctttttatgtactttcttccctggtggagctacaatttctataggttcgtaagtgatgtcaactttaattttaatgtaatatccactttgattctgtctatctctaaagatgtgtctttctggactcagcataaacatcatgctaatagcaggaagattaaacattaaggggtaggggtaggcttgtgtgccacttttatctaaaatttaaagtggggtcttgctgtagttactcataccacaagaatggaaggggcactagcagtagagctggtgtcatagcatcgaaatgcgtgatttacagtaaaaaataatgagaatggtaaccccccagagtagtgcaacaaagcagctctacatctgagcgggagtggataggagacttcaaatttcccttcgctcctaatgagcccccagtgggtgttagaattagctgagagagcaactatagaatataggttaccagaagaaggtgacaatgttacagaagcagaggagtggaccatgaactgtgggttagaaagagactatggctcatctcagggttccaggccagggagctgacttctggttgccaatagaggaagagtggaggggttgctttcatactgagtaacacctgtgcagaagagctgacaagatgagatacatctgcagaaaatgaccggcatatgatcaagctacaccaccaccaagttgaaggaaataaaacaagaaaaaataagcaaaacccacgaagaagtatagaaggaaggaagagagtaagggagggaagaaggaatgaaggagaaaataaatagcaaaaatagtcctataactttcaataaagactttcttactttggcaatcaaaagggaccctggctcactggcttgctcccaccactaaaactgaaatgattctacacgattgtgccgatttactcgcagagctcagagcccacagttggtgttttttgttgttgttgttttttgtttttgtttttgttttttttttgctaaggatgggccttttgcaaaaaagatgaagacaaatgctagggaaactcatactgatttgctaaactaattagcctattgtgatggttaatattgagtgttaactttattgggttgaaggatgcaaagtactgttcctgggtgtgtctgtgagggtgttgccaaaggagcttaacatttgagtcagtggactcagtgagtcagaggcagatgcaaccttaatctgggtggacaccatccccttggctgccagtgcagctagaaacagcaggcagaagaaggtggagtgagcagacttgctgagtcttctggcctttatctttctcctgtgctggatgtttcctgccctcaaacaccagactccaagttcttcggcttttaggctcttggacttacactagtggtttactaggggcccttgggcttttggccacagattgaaggctgcattgtccattgcctgcttccctacttttgaggtgttgggactcggactgaaccactgctggcttccttgcttctcagctttcagacagcctatcatgggacgtcaccttgtgatcatgtgagtcaattctccttaataaactccctttcatatatatatatatgaatatgtatgtatatatatatatgaatatgtatatattcatatgtatatgtatatattcatatgtatatgtatatattcatatgtgtgtatatatatatatatctcctagtagttctgtccctctagagagccctgactaatacagattttggtagcctgtatcgtaaaatatctggaaaaagctaacagtctgaaagaaaaagactaataaagcaaccacaacagaagcaaagaaaacacgaaaagtaaaagagaatttttaaaaattagtaaatttagagaaattcaggaagacactgtgttcataatcccaagaatcagtgccatgaaaattaggtaatcagacagcaagaagaatacagaaagctacacacataattactgaaataaaatgtgagaaaggctaaactaagaaataaaaagaactgcgtagtattaatgatcagaaagaaaaagttaaggaaatttcccaggatattgatgtaaaaagaacaaaaatgctaaagtataattaagaataaaaatggaaaaagcaaataataaacattttcttgaactgaacacacacacacattcagatgtgaaggtcatacaatgtgccaagaaaaatgctccagacctggttatatcttggtaaaagttgtgaacttgaaggagaaagaaaaaatatcttaagagtttctaggacagagtgaaagattatttacaaaattcagaatcaaaccagtgtcagccttatatacagattagaatactaggaaacaaagtagggcaaagtcttcaaagtcctaaatgaaaatgctttgttgttgttgagacagggtgtcactctgtcacctaggctggggtgcagtggcaatatcacaactcactgtagtctctacctcctgggctcaagtgatcctcccacctcatcccccacctagtggctgggactacaggcactcaccacactcagctatttttttagggggggtggggtagggggagagaaaggagtctcactatgttgcccagacttatctagaactcctgggctcaagtgatcctcctgcctgtgcttcccaaaatgctgagattacaggcatgagccaccacacccagctggaaatgcttttgaacctagaattctataccatgtaatattcaaagtaagagtacaagagagagctttcaacaagcaatgagctttgaaaaattttgttttccaagcccaaatcactcatttaatcatttcaaacaatcaacagacaatcatcagagaagggaggaaagagaaagacataggaaacaaaatatctaaagcctgtagttcaataactagattaactcatttttagtgtgaaggtaattctcttgttaaaaaagtttttctaaagatgtagagatataatgtaaaaaatgtaataataatctcaattaaaattctagatagcttgaataaaaagagtggagcagggaaatagagataaaaataagccatatatagtgtattgattatatagtgttagcactagagatagtctgaattctagagtttgaaaaatatttacacacacacacacaaatatataaatatatatttagagagagagagagagagaaaggagagagagaggagagagagtccaggctggagtgcaatgtcatgatcactgcaaactctgtctaatcatctcaaaccatcctctcacctccctgagtagttgggactgcaggcactcaccaacaggcccagctaatttttgtagagatgaagtttcgccatgttgcccaggctggtctcaaactcctgagctcaagccatttgcccacttcagcctcccaaagtgctggtattacaagcgtgagccactgtacatggcatatatgtatatatatatatatatattttttttttttcctaaactgaagagtaatacattcagtcatatagtaaattcattcattaattcatcaagtacttattgaatacctgttccatgcccagcactggattcagtataggggatccgatagggagatgtggccctgcccacaaagagtttggaatacatttcagtgaattaggaatctgacatgggaagctcagggtactgtgggaccacacaggaatggtacctgacccaggcttgatgagagatagaagaggcaactaatttctttaggaaatgactcagataaaatcgggagtaggcggtgggggaagatgtatgcatgagaatgtatgcatgacactgaaagagaccatgtgctttgaaagaactgaaacacttcaggtgggttggagtataaagttcactggggtagtagcatgagatgaaactggaggggcaagcaggtgctggatcatgctgggccgtctgactgatgctggagcaatagtagtagcccttgaaagcttcttatgaaggaaagaagggtggtgtgatacgtttgcatattagaacattaactcaggttctgcataagcatggtagaaatgcttttgcctctccaaaaccaataaaattttgctataaagaattcatccaattgtgatggttaatactgagtgtcaacttgattggattgaaagatgcaaagtattgatccttgatgtgtctgtgagggtgttgccaaaggagattaacatttgagtcagtgggctaggaaaggcagacctacccttaatctgctcggcaccatctaatcagctgccagaaaatataaagcaggcaggaaaaattgaaaaggtgaggctggcctagcctcccagcctacatctttctcgtgtgctggatggtttctgccctggaacatccaacggtctccaagttcttcagttttgagactcagactggctcttcttgctcctcaagcttgcagacagcctattgtgagacctatatctatctatatttatcctattatttctgtccctctagggaaccctgtttaatacaccagtgtagcctgggtttgaaaaaaaagcttgggttttttaatttggggttcaaatctcacctccgtcacttactagctgtgtgattcaaatatgtcagttagcctctttgaggctcagtttctgtcttgttaaaagaaaaacatgaaaacacttttatcttctcttcagggcttttgtggcatcataagtgagaatttcatatgctgactgtatgtggactgttttgttccaagaagcagcagctcatctcaaaatagatgaagtcaaagagagggaattgtaagagtgcactggcatgtctctcagaagccagtggcaagaccgaagcttggtctcaggaacaactgaatcaggaatttgaaaactgtcaagatcctgtttctctcctctacacattggctttcttcttattccctaaggactgagtgtttgttttttggccatccaaaagcttggggctgtcatttcttttgttcaaagaacacccaggctgaattgtaatttcttggtttcatttccaaatttctagggagagactcttctttgctctctggtgtttgttctgcacccaattaactgtggcagtgggtgagtgtttgcactcagatgggttggagatatttctcaggagagcaatactttctcaaaaggagacataacagtcagggcctaagcagaaatcacatggcccacacaaattaggataatttaagaatgattctatagaaaatgactaattataaaaatgtaggtaaattataggaagaccatgaggtattatacacaaacctagggctagcagcatctatagacagttaaggatgaggtgagggagaatttaccagagcccaaaaggggagagttggaaagatcaggctgtcttgagaggagtagtgaccttctgtttaaggacacaggcagcccaagggagggatctgggaaatatacatcctgaccctatactttgcttcccgtatcctatctgacctctccattggccaaaactccccaagggcacaggattgtatcgatactatctatacaggtcagcttccttgggtagactgtggagtggagatggtggagagtgcactggggtataagcaaaggtaagtggacacttactactgggtctgtcctgcagctccctgagcaaaacacccttgccttgtaccccagtgcactcatacaactctccaccatggagaagctgtatgtttgtccttaagcggcatacaactacatccatatccatatccatatttcctatttagcattgactaatttcatccattgatttccagacaataaattccttttttgttgtttttaggaatgactgatgtaggtttcagttatataactgccgttgttctattgagtccatgtaaaatagatcctaattctttcagatccctagtattcaaaatatcaatggatagacttgttgaaaaattgggtaagcaagatttgtctttaaagacaagtacattaagacaaatgtttgtagaaaaaggtcatttttctgggcaattttattatatttggctaacataacttatatgtaagtgcttagtattgtattcagagtctcagtatagacattttttagaatcccaatctctcatagtttagcatctaagcgttacccacaattgattcagaatgtataaaagtataaactttattatatatgtggaaaatctctgtacatcctatgactattctaaaagtaatgaatttgtaagggagaatggaagaaaaaatgccagaaaactttaaagtgatttatctttcggaataagctttatgagaaattttaaacaaccttatttctttgttttatttaaaaatgatggccgggctcagtggctcacacttataatcccagcactttgggagtctgaggcgggcagatcacgaggtcaggagttcaagaccagcctgaccaacatggtgaaaccccgtctctactaaaaaatacaaaaactagctggaagtagtggcgtgcatctgtaatcccagctattcaggaggctgaggcaggagaattgcttgaagctgggaggtggaggttgcggtgagccaagatcatgccattgcactccagcctgggtgacagagggagactctgtcacaaaaataaaaataaaaaaaaaataaaataaaaagttacagtgtccttttaaattagatttgatgaaatggtgagcatctgcgttagaaacacaggataaaaagatttttttttttttttttggtaattgatctataccactgccacaaaactgaaaggtgaagtcatgacaagaaccactaaatgaaatgcatacacgtcattcaaaatgaaaactatcattagctaatggtcctaggacctgatctgtatacaaaggaatggaatcatatatgcaaaggtactaaaatgagactttaacaagtaagagattaaaatcttacaatctaatcactaggttttacagcttaaaaaaatactcttatcagtttttccactttaccctaggagtccttcttaactctgaaaatatactcctattctcaaattttgtctctgtttgtaccattgaaaggttacaatgtggtgttttcctcagaccaactgtttatatttacaaataaaagtctattttaaaaatgtttcagaccagtcagggagcagaactctggtaagaagagtattctacttgggaacaaggagggagttttaaggacatcatctactataattgctttgctctcccaggtagtaggaattacagaattttataaaaatcactggcatggtattacttattatttagtcttggtttcttaatatgtcaatttggccttcccataagagtagctacatgttaaaaaaaaggaaaagactaagatccagaagacgtcagaaagactgctggctttttaatatcttccaggtgctacaaaagccacatatagtcttgtatgttgacatgggccctgcaaggccagggcagaagagtatgactccaccatgtaaaggatgccaattggtggagccatggtagctggatttgggaggctgactagttcacaacctctgataaactgtcatccaagcctgaaccacggtcacataggagagccaggagtaaatgcattttaggtggcataactccttgtgttgcagcaaagaaagcaattatgaaaatggtcctgcattcattggaatgaaacctttgattctgaaggttactcatggactactgtgttaaatcttacttgataccatttaagtctgtataaaagtatgagtacatggtcagttttatcatgtaaaccaaatataatgcatttataaaattaaaactgaatttgcaaatttttgaacaacacacaatgatatgaaacaatgttcaccatatgaaattgaattacaaaagcaagaagtgaaataatatagagtgtaagatctcagttttgctaaaatggactttaaaatttactgtaaactaaatacacaaaaatagaaacctttctgtgctgataactgtttctgctgtgagaatagggaaaactttctctatttttcttatgtttctctgtctattgtcaatctaagctagttttaaaatgaacagaagttatttctataatcagaaaagaattaagtaaatgttgtttacaagatgaagtgaaaagaaaaaagttctgccatagcagcagacacaacccatttaaaagtgtttaatcattctaggtaattgtttaaagaaagttgcctataaataaacaagcctaccactaaatctactgaaattaggccctgtgttagagtaagcatatgaatgttgttggtaattacagtggcacaaaagcagtcctctggttttgtggtttatgattcataatcatttatttttttattcaatattaagaaatactctgaaagttactattgtcttaagaaaaagaaaatgtacttgtgtagtctttgaaaaaggcaatgtccaaagccatgtgactgcttctgttttatgagagaaacccacagtgtctcataggtctcttccagacacactggaatggtgccaatgtaagaatattaacaaagaacaagcactgagccaaataatttaattatcatttgttgacttcgtccatctaaactacatgaatctttatcccaatgacacaaaggcatcatttcactaaagctgatgaataactgcttacatattttcccactgaatacttaaattttgtcttgttcatttgcatggtttttatagttttggtttgttcttgctgttttgtatgttaaaggcattcaacttttgtctatcaaagttgtggcaaatattttcctagactgctgattaccattctgtttatggtattttttgtaaaatacagaagttagttttttagagggttatatctattggtgtttttctttgtgaattctgctgattgtattagttgattcaacaaatatttattacatactatgtgccagatactcctctatgtgatatgatacaacagtgatccaaaacaccgaatactcttgccctcatggagcttgcactcttacagaaggagacagacaattaacaattaaaatacatccaacttttgtagcacctgaatcctgaatcagttgtgggctgtctttaagaaaaagaatacaggaccttagaaagggaccatggaagtgaagggcttctgagcatatcgcatgggaatgagtgatatggagacaaataaagtggaggagaaagataggaagtgctaggtcagaagtagggatcacaaatttttcagagaagcctcactgagaatgtcaaatttgaacaaagaccaagaggagggacagaagcacacaaagaggatatctggggaaaagcatggtaggagaagaaaagagacagtgctaaatccctacagggagagaatgccaataatgttccaggaatgaaaaggaggtgggtagggctgaaacagagaaagccagagaaaaataatagaagatgagtcatagaggtaccaaatgaaattatgggagacggggagcagatgatgncntcgttgcaggcccagtcaattttcttggttttctctctctcagagtgagaggaggtcactagaggtgaaatgatttaacttatgctttcacttagattgataggttaagaataaacagtagggagaaagaatgcaaatagagagatggataaggaggatattgccataatccaggcgagagatcatggtggcttggatgagtctgcctggggaatgtgaggaaatataatttgtttttgaatatgtcttgaagatggaactatcaggattttctggtaaaatggatgtagattgtaaaaaaggagagtctatgggtgttgttctaagtaaatatggaactttaagtttattgaaatgagaaattcttttagagaataagcttttcggatacaagacaaatgagaagttccacttggagtatattaaatttgagatgtccattggatatacgaagtaagattgtcacacatgcagttggagctcagtagaaaagtccaggatgaatatatacctttaaacatcatcagcatatacttggaacttaaaagccataatatcagatatgagtcatataaatcactgtaacagttaacacgaggaataagcatagaaatgggaagaaacaatcagaagattgagtccttgaaggatgccaatgtttaggttagaaagatgtgggagaaccagcaagagagaatgtggtaggcagcaaaatggccttccaaagatgctcacatcccagcctttcaaaacctgttaatatattttggagagattgtcctggagtatccaggtggacccaatgtaatcagaatactgctcataagagggaggcaggaggatcagaaccaaagacagagatgtgatgacagaagcagaggtcagtgaggtaatatgattgctagaagggaggcacaagccaaggaattcaagtagcctctagaagctgcaaaagacaaggaaacaaattcccccctagcacctccagaaggtttgccaccgtgatattagctcagtgaaactccttttgcagttttgacctccagaactgtaagataaatttgtgttgctttaaaccactaagtttgttgtaatttgccaagagagggataggaagtaaatgcagagactgagaaaggagtagttagtgaagtaaacagatagataagagagtgtcatgtcacaggggccaaatgaggaagtgtttcaagaaggaagtagaataatggtcatttgataaactatgtcaaatgctgcttataggtcaagtaagataaagcctgagaaatgaacattgtttttagcaacatggaggtcacggatgaccttgacaggagaagatttggtagatggactatagagaaagccaaatcagaattggcttcgagagagtggagggtagccgggcatggtggtgcatgcctgtagtcccagctactcagggggctgaggtgggaggatggcttgaccccgggaggcagaggttacagtgtgccaagatcacaccactgcacttcagcctgggcgatagagccagaccttgtctgaaaaggtaaataaataaataaggtaaaataagggagagtggaaggaaggaactggagaaagaattgctgtggagtagtgactgctatgtgcttcctgtttttcccgtttttgaatgagagtctcttatctccataccatagattaaaaagaaacaactattaattcatacaatgacttggatggtgtattagtccattcttacattgctatgaagaaatacccgagactgggtaatttttgaaggaaagaggtttaattgactcacagttcctcagggctggggaggcctcaggaaacttacaatcatggtggaagagaaagcaaacatatccttcttcacatggtggcagcaacaagtgccgagcaaaaggggcttataaaaccattagatcttgtgagaactcaatcagtatcatgagaacagatgagggaaactgtccatgattcaattatctccacctggtctgtcccatgacacgtggggattatgggaacttcaaaatgagatttgggtgaggacacagccaggccatatcagatgttctcaaaggatttatactgactgaaaaaggccagtctcaaaaatcatatatcctccgtgattccacttatttaacattcaaaaaatggcaaaatgatagagacaaacaagaggtgaatgttttttagggattagggagggaagtagacaaggaaagggtgtgaacaatgaaaggagtccttgtgatggaactgttttgtattgactattgttatagttacacaaatttacatgtgataaagcttcatggacctaaatacatgcacacacacatacacacactacatgaatgcatgtaaaactagtgtaaatggaattaaggtcaacagtttatatcattgtcaatttctggttgtaatatttactttagttatgctatcactgggggaaactaagtgaaaattagtttcacgtgaatatacaattatctcaaaaagttaaaaagaatggtagaaatacacctaaagtaaattgactaaatttgcaagttaaatggcaagacttctcaaagtggattttaaaaaagtagtccatctatatatagtttacaacagacctacctaaaacataaagacacaaaattatgaatgtgaagaaatggaaaattatatttgaggtaaatataagcaaagaaagatgatgttacttcttataataatgtttaagaaatatattttgaagccaaagcattattgggaaaaaaggttacagaaaaataataaaaggagcaattcaccagtctgcatatacatttagtacatataaggactgtaaagaacaggtatacaggacattatgaacgtttttaatgccactggaccttatgcttaaaaatggttaagatggtaattttatgttatatgtatttttaccacaataaaaagagaaattgtaaggttgatagattagaaatctgtactcaagaattaaagcattttcattttttaaacatgtatgacactattaagaaataacatattttggcataaaatgagtcatacagatcatgcttctgctgataattcaaaaaaatttaaaaggaaaaaatatagcaaatatgatctccatgtatatggaaattttattttattttatttacttcaagcctttaatttgagacatgatggaaaaatcttgtaggcacacttggaaaagtcatgattaccgctgagtgaaaacaatctaactggaaagatttaatgcctgtcagctaatgtcaaagctgaaattctggaagtatgacatgctgcagggctgaaaggaatggaaaattagtgttccccttctttttcttcaacagaatccacaccaacctcctcataatctttttcaagggcagccatgtcctcacaggcctcagaaaatgcttcttctcccatctcctcacccatttcccagtgaacaaaggaacagttggcataactcaagtcagacttgtggcccaggcaaacccaggcctcagcaatggctatggtgttgctcagcatgcacgcagctctctttatgttggccagatttccagcaggtaccacagtgggaagctggcaattaatgccaactttgaggctagtgaaacaccaatccacaaactggatggtgcatttggtcttgttagtggaatagcagtaagtattgacatatttgggaaccacattaccacggtgtaataggcagtaagccatgtatttaccatagtgagagtcacatttcaccatctggttgcctggctcaaagtgagcactggtgacctctgctatgcatggtagtcttacccagcagagatgacagggcatatgtgaccaaagagaagaggatgcaggaagagggtaccaggtcggtctggaattctgtcagactccatgaaatctgagagaagcagtgatggagaacacaatctggctaagaaagcagttaaagattagggtagtttgggtgctcagtattggggtttctacaacagatgccatagatggcctcattgtctactatgaaggcacaatcaaagtgctgcaaggtggtactggtggtggaatggagttgtagagctcaaccgcagctgtggaaacctgcagggctaggtaaatggagaacttcagtttagactttgtggcataatcaacagagaagtgaacccagaaccagtttctccaccaaagctgtggaaaaccgagaagccctgaagacctgtgcactggtgaaccagcttgcgaatttggtccaaaggccaatgatcttgccaatgtcgtgatgcccccaggcatagttatgggcagcgtcttccttgtctgtgatgagctgctcagggtggaagagctggtggtaggtgccagtgcaaacttcatcagtgactatgggttccaggtttataaacactgccctggacacaaacttgcctgctcactgaagaggcgtagaatcaattatctccttacccagtggtcttgtcacttggcattgggctatcgtgctggatgctttgttccaggtagtagagctcccggcagcattgccaatccagacatcagcctcgccaaggtggatgaagatgcactcacacgtagtggctacaggttagaaaagcaaaagtcagaagatactgggtctctgttaccatccctgacatgttaagagtcaaataggcaacacattgtatttggaaattgttttttaaaaaaaaaggcataaatagctcatgaaacactttaagaagaaatgataatggaaattcgaaaatatttctatctgaatgataatgcaaatgctgtaaatcaaaatgtgtgggatttggctaaaaccacaattaaaaggcaaaagccttaattgcgtatattaggaaagaagaaaaactaaaaatcagcacaacttccagtttacacaggcagaaaaagaataatgaagtcatccaaagaaagtagaaagaaggaaaaacgtaaagatgagaatagaagatttttaaatggaaaataaccaatagctatcccatcaggggctggagggaagaggaaatggagacatcagttcaaggggtacatggtttatttacaaaagatgagtaacttctagaggactgctgtacaattgtacttaacaatactgcattgtccacttaaaaatttgtcatgagagtaaatcttaggctaagtgctcttatcacaataaaaaaatacagaaacagtagagtaaaaagtgctcaaagttaattcttttaaataaactaatacaatagacaaatcactggcagattaataagagagagaggctttaatgaaaactagaccacacaatcataaaataacattttgccaattattttgaaaatatattttttaagaaaaaaatacactttacagaatagattcaagaataaataaaagtctgagtaatcctattaaaataaatgaaattaaatcagtagtcaacaatttaagcattggtggaaaacacaacgacaaaaacgacaataacagcaaaaccaacaatgactgaaacaagaaaaaaacatgtattttaaatatatttacaagataatttcaataaacaagggtttgatagtatctattttattcacactgttctaaagtaaaagaaaaagtaagacagctcctcaacaattttatattttggtaaactatactttgataaaatctgtcagggatgttagtgaaaaaatttcagatcattatcttttataaaaattgatataaaaataatagcttaaatattaccaaatataacaaagaaaaacatgcacatttaaatcatgacaaagaatgatgaatttttttcttaagaatgcaagcataacaatgttaaaacgtgataaattaacatgtaatttatcactaagaaattaacaatttttaaaacatatgattatttcaatacatgcaggaaaatcattcaataaactcaggactcctttataatataaactcttaacaaataggagtaagggaccctatttaatatgaaaaaaagttagctaccaaatattactttaaccaagatactttgtaataaaatgttaaaaacatgcctttaaatcgagaacaaggcctcaatgccttcttctattcatcattgtgtggagttcctgctaaatggagaaggtatgcaaaataaatttgcaaggattagaaaaatataaaactgtcatcatttgcaaagattatgattatgtatatgaaagtccaagagaagttacagagaatggttatttaaaaattaaattcatatatacaaacagcaaacaaaaatataatttcaaaatatagcaattacagaagcaacgagagtactagaaatagaagtaacttcacagaggcaagactttaatgagaaagtcataaacctttattgaaagttataaaagacctaattaaatgtagagatacattacttacacataagacttactataacaaatatatgagttcttcctcctatttatctatactttcaaaaaaaaccccaagattttatcatttttatgaagcatgataaactcatcttaaaacttatgttagactataaagtgcctaaaacagttgagacttctcaaaaaacaaaaatgataatggtctagtcattcaaaatatattatgaaactatagtaaataaaaatttaactgaaaaaaagtaatagatagaaaaatccatttactgaacagatcgagccatgtatatgtgggtcctacccatgtatatgtgggttctacccacatatacatggcttgatctgttcagtaaatgattctgggtcaattggctaaacatacagaaataactaagatcaaatatatccttactttatataaaacacacatttttctaattgcattagaggcatgaaatgaaaagcaaaactagatgtttaggagaaaaaaagataatatttaaaaaattttgctgtgcctatatttcttaagcaaattaccctgaaaaggatgaaaaatcaatctggatatatagaagatatttgcagttcagaaaaccaaaactcattagtgtatggaatatgcaaataatttcttccaaacaagaaaaagagaagctagttattgaaaatgtttagcaaaagataattgatagaagaaagcataagctgcaaattaacattagaaagaatgttatattccattaaggatatacaaactaaaactgcaataaagtaacattttatatccatcagattggcaaaaataatgtctgataaatccaagtgttgggaaaccaggtctcctattatctgtggtagcataagttggtagagatatttgaacagaaatttggtagagtagtttggaagaacttgtcatacataataaaactagtagctgcatttccagaagtctttcataaactcctgcatatgtgcacaagaaaacatagaaaggtgtgctaatttcagcactgtttgtaaaagcaaacacatggaaatagcctaagagttgaaaacaacctaggtaagggaatggataacaaaccattgtttattcactagaaaaaatatcagacaaaagtgaaaaataaaagtgaatgaatcatgtctacctacatcaccaggtataattctcaaaaacatacaatgttgactaaagcaaaatgacactagaatacttaacatttgataccatttatgtaaaattttatacatgaaaataatattatatattgcagtggatatatttatgtttactaagagtacaaaaacaacataggtgaatggaaacacaaactaaagaatagtatttataaggtgtgagtgggaaagaagaggtaggagcaggaagggcttttgtcttagttgtagactttttgaaaaaatagagaaaattgagccaaatatagaaaaatattaatatctcctgggcatcaatggggcctatagttttcagttattcctttgtttgcaatattttattattaaaaattaaaacaagaatacatgaaatattgtgactgctttaacattcaggttctataggatcactgaaaactacatatgaaaaccaaattatttggtttcagtgaatgtgtgaaatgcatttggatttggtgtcattgatatactgcatttaggaagaaataaattcaatacacaggaaactgataaatgtatgattttatagaaataaatattaaaatgtttacttatgaaatcttgttctcctatttccttccctgctactcaaatagaaaaacatgtatctgaaatcacatattaagtctatgagaaaatgatatgaagcacagataccatctctgtgtaagttttcagtaatgctatacatgtaaaaagtaaatagttattcttgaaaataaagtcaatttaatatgcctgatcaatactgccctatgccatggtctaaaaatttttattatttaaaatgttacaaaggcatgatgaacaattataatcaatatttctcatattacattccatttgagtttagtaatatgagattagctttttcttcttgagtcattctgctttactatctcattttccttcagcagtaattattccaatttgtcatggtgttacagcaaaaatccaaaaaacataaaaaacttcttagctcatcttggtgccctaaattttcttggatttcaccaattttgtttattaggtcatacactgtctaattatatattagctgagtttatgatttaatattgatagtgagagtgaaaataatttggccattacattactctattaaaatggaaagctctataaacacagccagctctttttagctccatctagtctttgttgccattaatcagcattggagattgagagttttagatcattattctcaaaattgatacttgctcaatttcatagcttactttatgtgtcttgaaaacacataaagtagagatatctaaagaacaagaccatagggtacaggatttccatcaagcagagggcactaatttgcacatatttttattttgctaaatgattactaccaagtgcagattcacgctttgtactaaggtaatgtggagagctttcaggaagggctatcctgggtccagaagcttaatgtgtaggaaatccagtattacagattaaactagtcttgtaagtctttgttcatctttacggtctcaagaagagaactatgatcaaaagaaactgaagtggtagtcattttatttacatcacgttcatgtgcatatactctgtgctacaatcttcaaaattatgtttattgctcaaattcttccagaaaacccaaatctggtgtacattttatttccttcttagatgttttacctgttttgttggcatgcacaacttgaggtaagcctgtttcatcttatgagattgaaacaaaactctttttgagcataagtatagaattggacaattcagagcaattagtgctcttattgtctcagtgggctcctttgaaatgtttatagtaggctacattgtgaagatattgtgaaagtatttttatgtttcaagatagcaaacactttgaataaatcagtaaaaataaattttattggaaatttttgttttcacacacatttttgccttttctgttgataaccaaacattagagtattgctcatttttgcagaatttaaaggtgtctcaagcagcagactacaaggataaataaaaattaaaatgtattttcctagaacaccaggaaaacattttaaatttgaattcatttggaaatgtatttgtgttaaatgttttttgagtacctattcaaagaatgactaattaggtcccatttattaaacaataaatgactctcgtgttgctatcatggaagctacagtgtaatcaggttgaccaggaacatacataggaaaagttgaaaaataaggctaaatgacagcaagagtaatgaagattaccctccactaagaatattaatgccagaagataagaggccacacaatgggttggagtggtgagaaaatctatcagagtttgagctgtagaagtttaggatgtaagagaaattttaagatgaaacttttagaaaagcacattaaatgggctagggaaactgagaatagaaggaaggggaaaaattaataaagatttagctaagaagacaaggtcaaagaaagatgggggagaaaagaaattaggaggttgagttagacattagccttgggaaaaaagatgggcatgtattcacagagaaatatagaaaggaaaagacaagttaaagtttgaaatgtttggaacttaaacattttttaaaagactctatttgacatattgtttgcatcatatgaagttaaaggtattagactattttttaatttatacaccagcacattcatatggtttacaatactcaatcagcacttcctacttctagctttcatatcttgctttccttttctctaatatgtgaggtttttatcatagcctcacatattatatagttttttatttcctttcccagctagaaaattattttaggaagacaggaatttttctgatgttattgttattgaaaaaccattgcaactagaactagtacttaatattgttaagtgaataaataagtttgtttatactttttgtttttgctcttcattatttttccttgctttctaattaaagatgatttttggaattatcaaaaagtaagacatgcattcaatacagagtcaaggatgatcaaaagcagtgttgcttccaaacagggcccaactgaaaccaggtagcatgaatgtgcagtgggcaaggttgctgtatttctaggatgaatgctatgttagtccatttgcatttctttttgtaaaggaatagctgaggtttatttggctcacagttctgcaggctatactagcatggcaccagcatctgcttggcttcctggtgaggcctaggaaggttttactcatcacagaaggcaaagggggagcaagtgtgtcacatgacaagagagagcaagcaaggagttggacaggggagcaccacatgcttttaaagaaccagatgtcttgggaactcatcccactcattactgcagggatggcaccaagccattcatgagggatctgctaccatgccacagatgctttcttcccatcaggccccaccttcaacactggggatcacattttaacatgagatttggagggaacaaacatccaagctatatcatatgctcttttaaaaatactatattataaagtgctccttataaagttccagtggtggacaaaaaattgaactggacataattactagagaaaggaattgtttcgtgtaagaaacaggcagggcccaggtgaggttttccagcatagccatgaggctaatgaagatagtagccatcagttgacagctgatcctagtaaggaaaaaaacttcagtgggtctggggaagtgtgaaattatgtttgtaaaggggaagtatgaagtttaagatagaggggatggtgatcaaatggagtttgtgggttcaatcttcttcatatccagagaaatagtatgcatctcctttactctgaaagaacactgcctggccctatcaaagtaggcaacattcttgtccagtcaccaaataccctcttcttcctaccctggtttatgtgcaattctttttaaattctagtaacccctttcttactccattaagtgtccatatatattatctctttctctttctctctctctttcatgcaatacttcctggcatccatgttatcaccaattaaaagggtaaaaggaaagtttgcttttttatattataaggatttcaatctgacaaaaggtttaactcattactccatagttttccttgtggaaacatattgaagaagactcagtcaaaatatttgttggcataatgttcattttaggaaatcagagcatatctacttcctttaaatgtcctgaatctcccatcttatttgttggtatgtcatacaaacagtttctgtgatttactgtgaacttagtgaattgaataccttttaatatgatttttgtctattattaaacatgtgtaattaactttaaagaattttaatgttttatgagttgggagttcatttgacaaaaaaatgactggcatgtgtgaaacattgtgctaaataatcagaaaagtaacttttcatagagcatggttaattttaccttaacttagtagagatagttatatcatcttggcagtgttattcacaatctcaaacatcttccgagagaaagcagcagcattaattaaaaattccagagcaaaattaatgtcagacttcaaataaaaataattaattttcaaaatttaccctctgctggtatttcgaagtacaaaatttatttaccttatattattaaaataatgagatctagcatttataaaatattatacatttgccttcttcatccaaatgtttttacatatactccttaattttgccctcaccatcacctatttttgacaaactatttgactaagattttaaatataaaaagggcagtaagcacttaatatttatatcattttttaattcatcaaaaatgtaaattgtatcctcaccaggagagtgagtcactaatagacataagaatatgttgtatttataataaatcttacagggattgctttgtatgcatttagactgcaaatgggaactacaatcatgggaactgtgtgaatcattatgtttcacagtatgagatgccttgcctcaaccgttaagtgatgagagttttagattggacttattaaatgtgtaattatatacagagatagcaacatggactattgaggtttgagaagatttgtacatactttgaaccctagagcacatgacttctaagaaacaaatggaggcataattttcaaaataaatagccaattttaatttttttttttctgtgggggaaacaaaaattagtgaaagtttgctaaactgttataggttgtgagtttttatgataccatctgctgttgtagcataattagatattttaaaaataacatttaattttgtaacaagtaaccctttacatatgtgacttataaagttacacgtggtgtattcttttaagattttcattaatactaatggcttcctgtcccctaaaatgcaaatgataggtattaatagataggtaggtagggagagagagagagagagagagagagagactaagtctagcttataatttcagggggatcacagatctcttgagtctttaagtatccattgatctcggatgctctgccatgacagttgcttcatatatttgaatatgtcaataaactgcttatatcctgggtatagagaactcacctgaggatagttatgttattttgatataagacccctgcttgagctactcatttaaaattttataaaggaaataaattgcttaaattgaaatcctcaccagctcttatatttctatatagggtttaaactatttaggattataagaggaatgatatttaaaagttgacgtagccaggcatggtcgtcacgcctgtaattccagcactttgggaggctgaggtgggcggatcacaaggtcaggagttcgagaccagcctggccaacatggtgaaaccccgtctctactaataatacaaaaattagctgggcatggtggcacatgcctgtaatctcagctactctagaggctgaggcaggagaatcacttgaacctgggaggcggaggttgcagtgagccgagattgtgccactgcactctagcctaggcaacagagagagactctgtcaaaaaaaaaaaaaaacaaaaaaagttgacataattaggtatactgtattttactaggacaatttttactgatgttatagttgcctagtttaagttaataacctaattttgccctttcttttttgtcttaggccttgagcatctttccagattttttctgctgagctcaccattattttggctttgaaactcagtgtgatagaggtgatcgtgaggcatgccatgtgtagatgtctttcagctaataaatgaccatcctaaaattgagcttgtcaatagtggcttttcagatgagagcagggacagaacctcacctaggtatacacttggcttgatttaaattacaattgcacaaaaacagcaaagaagttagcagtagttttgccccttggttctcgagaccatgttcatctgattacaaaagacacagcaagtgctgctcaacctcctgctccctttctaggcttctagcccctcattttgcctcacaggagagctctactggacagacaattagcatgggattggaggccattctccagctttctgcatctgtcaaatgatggagagggtttgcctttttcagatctttgtgaaagggatcacccatttcttttaaacatctaatatatttcacacagaatggctataaaaagtaatcagttacatgtataacaccattgctttctcaacaatcagtgaagacagttgaatttacagccagaagacaatcacattatattggaccacatattcatacttcatttatttctccctcaagtattgcagctgtaatagctcctaggaagctttaaaaaatatgcaagaacattttaaacttccaggaacactcagacttcaaactactttttcttcttgtataacatctttaaataattaatttttttgtttcttttttagtgttctggtttgggaaatattaagataactggaaatgggaaaaaaaaggagaaggaatttgtgatttttcaatttccatgaaatcaacaaccttgcttcctagagtggattcttacagaggtcaatagtacacttgtgtgttgttgaaaattgttaacactcctatctaaaagccacaggatagtattccaaagactgtgaacaacaactccagggctcccagggatcctcagttgctgttaccaccagtggatttttttcaaaagcatttttaagaaatggtcataagcaggaatcaaatggtttggaatgaatctgttttgttggaagaaggggtttaattaactttcgagctgcacaaattaatctggactttagtgagggcctgaaaattgattaaaatgtgagcaccttttcagaaagtatttgaccaggaaataaattcatttcttcaaggtcagtgaccctacaagttgacaagtgattcagattaatacacacttgggtttcaagtttcacctattgcttggcagaagcttctgccccatcccccacccccagtgctgcttgtcatccacctgatctagttgtcaccttttcttctggactgtttttctgacagaaaccctttgcagagtttttggctggggggtggggaggtggttggggggcattgcaatcagtgcaacgtttcattttagttgttttattgaagatttaatcaacattatgatttaaaaataaggcagaaaataacttcacctagattaaacttacctcttaaagataataaatgtccatcaaacagaatgatttgtaaaatagtttcataaaatcctacttgatttaatgacctacctaatttttgcagtgtcttttattttttcttcttgggggctaaacacacataacacgcactcatgcacgtgcacacacacacaggcatatacatagacactccaagcatttggagactctcctctatattatctagtaatacaagctcagaggtcaagccttactgtaagagaatatggaaataattagagaaattttgtgtgagagtaaatgaagagactatttattctaagaagagaggaaattgtaaaaataaaaagtctcatcattgatttcaaaggagaacttgaaacaggattcaatcttgctaccctcatttaaaaaataagaaattgtggtcttagaaggttctgatctaccacattctttcatagttcacatgaagtggcaatgggatgatttaaggtgtttttatttccccttgatttaatgtcaagtataatttagtggacaattatatgtaacacctttgataattaattttccactccaaattaggctttggcaatcctcttatcctggtgtcattattcttatagaatactgtacacgttaactttgttttcttttctcattccctattaatgcttgttttttcaaataaatattaactattccacataacttctaagtaaagtttcagactttaataatacatttttttaattacagagtcagcatattctttgcaaaaaaaatccttagcaaatacctagagaaggtagagtttagcggagcaggaattttcttcatcttttaaattaaaaaattgaaccaactctccatgtacttcaacaactttttaccctcaaaagagaagagttttaacatcattaaatccgaacatatatttgaaaaaattagaaataatggccttatcagatagttacttatacttttttttaattttattattattatactttaagttttagggtacatgtgcaccacgtacaggtttgttacatatgtatacatgtgccatgttggtgtgctgcacccattaactcgtcgtttagcattaggtatatctcctaatgctatccctccctgctccccccaccccacaacagtccccggtgtgtgatgttccccttgttgtgttcatgtgttctcattgttcaattcccacctatgagtgagaacatgcggtgtttggttttttgtcctggcaatagtttgctgagaatgatggtttccagctcatccatgtccctacaaagggacataaactcatcattttttatggctgcatagtattccatggtgtatatgtgccacattttcttaatccagtctatcattgttggacatttgggttggttccaagtctttgctattgtgaatagtgctgcaataaacatacatgtgcatgtgtctttatagcagcatgatttataatcctttgggtatatacccagtaatgggatggctgggtcaaatggtctttctagttgtagatccctgaggaatcgccacaccgacttccacaatggttgaactagtttacagtcccaccaaccatgtgaaagtgttcctgtttctccacatcctctccagcacctgttgtttcctgactttttaatgatcaccattctaactggtgtgagatggtatctcattgtggttttgatttgcatttctctgatggccagtgatgatgagttttttcatgtgttttttggctgcataaatgtcttcttttgagaagtgtctgttcgtatactttgcccactttttgatggggttgtttggtttttttcttgtaaatttgtttgagttcattgtagattctggatattagccctttgtcagataagtaggttgcaaaaattgtctcccattttgtaggttgcctgttcactctgatggtagtttcttttgctgtgcagaagctctttagtttaattagatcccatttgtcaattttgtcttttgttgccattgcttttggtgttttagacatgaagtccttgcccatgcctatgtcctgaatggtattgcctagattttcttctagggtttttatggttttaggtctaacctgtaagtctttaatccatcttgaattaatttttgtatactgtgtaaggaagggatccagtttcagctttctacatatggctagccagttttctcagcaccatttattaaataggggatcctttccccatttcttgtttttgtcaggtttgtcaaagatcttatagttgtagatatgcggcattatttctgagggctctgttctgttacattggtctgtatctgctttggtaccagtaccatgctgttttggttactgtagccttgtaatatagtttgaagtcaggtagcgtgatgcctccagctttgttcttttggcttaggattgacttggcgatgcaggctcttttttggttccatatgaactttaaagtagtttttttccaattctgtgaagaaagtcattggtagcttgatggggatggcattgaatctataaattaccttgggcagtatggccattttcacaatattgattcttcctacccatgagcatggaatgttcttccatttgtttgtatcctcttttatttccttgagcagtggtttgtagttctccttgaagaggtccttcacgtcccttgtaagttggattcctaggtattttattctctttgaagcaattgtgaatgggatttcactcatgatttggctctctgtttgtctgttattggtgtataagaatgcttgtgatttttgcacattgattttgtatcctgagactgctgaagttgcttatcagcttaaggagattttgggctgagatgatggggttttctagatacacagtcatgtcgtctgcaaacagggacaatttgacttcctcttttcctaattgaataccctttatttccttctcctgcctgattgccctggccagaacttccaacactatgttgaataggagtggtgagagagggcatccctgtcttgtgccagttttcaaagggaatgcttccagtttttgcccattcagtatgatattggctgtgggtttgtcattgatagctcttattattttgagatacgtgccatcaatacctaatttgttgagagtttttagcatgaagtgctgttgaattttgtcaaaggccttttctgcatctattgagataatcatgtggtttttgtgtttggttctgtttatatgctggattatgtttattgatattcgtttgttgaaccagccttgcatcccagggatgaagcccacgtgatcatggtagataagctttttgatgtgctgctggattcgttttgccagtattttattgaggatttttgcatcgatgttcatcaaggatattggtctaaaattctctttttttgttgtgtttctgccagactttggtatcaggatgatgctggcctcataaaatgagttagggaggattccctctttttctattgattggaagagtttcaggaggaatggtaccagttcctccttgtacctctggtagaattcggctgtgaatccatctggtcctggactttttttggttggtaagctattaattattgcctcaacttcagagcttgttatttgtctattcagagattcaccttcttcctggtttagtcttgggagggtgtatgtgtacaggaatttatccatttcttctagattttctagtttatttgcatagaggtgtttgtagtattctctgatggtagtttgtatttctgtgggatcggtggtgatatcctctttatcattttttattgcgtctatttgattcttctctcttttctttattagtcttgctaacagtctatcaattttgttgatcttttcaaaaaaccagctcctggattcactgattttttgaacggtttttcatgtctctatttccttcagttctgctctgatcttagttacttcttgccttctgctaggttttgaatgtgtttgctcttgcttctgtagttcttttaattgtgatgttagggtgtcaattttggatctttcctgctttctcttgtgggcatttagtgctataaatttccctctacatactgctttgaatgtgtcccagagattctggtatgttgtgtctttgttctcgttggtttcaaagaacatctttattttagccttcatttcgttatgtacccagtagtcattcaggagcaggttgttcagtttccatgtagttgagtggttttgagtgagtttcttaatcctgagttctagtttgattgcactatggtctgacagacagtttgttataatttctgttcttttgcatttgctgaggagtgctttacttccaactatgtggtcaattttggaataggtgtggtgtggtgctgaaaaaaatgtatattctgttgattttgggtggagagttctgtagatgtctattgggtccacttggtgcagagctgagttcaattcctggatatcctcgttgactttctgtctcattgatctgtctaatgttgacagtggggtgttaaagtctcccactattattgtgtgggagtctaagtctctttgtaggtcactcaggacttgctttatgaatctgggtgctcctgtattgggtgcatatatatttaggatagttagctcttcttgttgaattgatccctttaccattatgtaatggccttctttgtctcttttgatctttgctggtttaaagtctgttttatcagagactaggattgcaacccctgcttttttttgttttccatttgcttggtagatcttcctccatccctttattttgagcctatgtgtgtctctgcatgtgagatgggtttcctgaatacggcacactgatggatcttgactctttatccaatttaccagtctgtgtcttttaattggagcatttagcccatttacatttaaggttaatattgttatgtgtgaatttgatcctgtcattatgatgttagctagttattttgctcattagttgatgcagtttcttcctagcctcgatggtctttacaattggcatgtttttgcagtggctggtagcggttgttcctttccatgtttagtgcttccttcaggagctcttttagggcaggcctggtggtgacaaaatctctcagcatttgcttgtctgtaaagtattttatttgtccttcacttatgaagcttagtttggctggatatgaaattctgggttgaaaattcttttctttaagaatgttgaatattggcccccactctcttctggctggtagagtttctgctgagagatcagctgttagtctgatggacttccctttgtgggtaacctgacctttctctctggctgtccttaacattttttccttcatttcaactttggtgaatctgataattatgtgtcttggagttgctcttctcgaggattatctttgtggcattttctgtatttcctgaacttgagtgttggcctgctttgctcgattggggaagtgctcctggataatatcctgcagagtgttttccaacttgattccattctccccatcactttcaggtacaccaatcagatgtagatttggtcttttcacatagtcccatatttcttggaggctttgttcatttctttttattcttttttctctaaacttctcttcttgcttcatttcattcatttcttcttccatcgctgatatactttcttccagttgatcgcattggctactgaggcttgtgcattcatcacgtagttctcgtgccatggttttcagctccatcaggtcctttaaggacttctctgcattggttattctagttaccattcatctaattttttttcaaggtttttaacttctttgccattggttcagacttcctcctttagctcagagtagtttgatcttctgaagccttcttctctcatcaaagtctttctccatccagctttgttctgttgctggtgaggagctgtgttcctttggagggggagaggcgctctgattttttgagtttccagtttttctgctctgttttttccccatctttgtggttttatctacctttggtctttgatgatggtgacgtacagatgcgtttttggtgtggatgtcctttctgtttgttagttttccttctaacagtcaggaccctcagttgcaggtctgttggagtttgctggaggtccactccagaccctgtttgcctgggtatcagcagcagtggctccagaacagcagatattggtgaaccgcaaatgctgctgcctgatcgttcctctggaagttttgtctcagaagaatacctggtggtgtgaggtgtcagccgcccctacttgggggtggctcccagttaggctcctc

SEQ ID NO: 10501 - DNA, 5966 bp, Homo sapiens
gggctattttcttttctttttctttttttttttaattatactttaagttttagggtacatgtgcacaacgtgcaggtttgttacatacgtatacatgtgccatgttggtgtgctgcacccattaactcgtcatttacattaggtatatctgctaatgctatccctccccgctccccccaccccacaacaggccccagtgtgtgatgttcccgtttctgtgtccaagtgttctcattgttcaattcccacctatgagtgagaacatgcagtgtttggttttttgtccttgggatactttgctgagaacgatggtttccagcttcatccatgtccctacaaaggacataaactcatccttttatatggctgcatagtattccatggtgtatatgtgccacattttcttaatccagtctgtcattgatggacatttgggttggttccaagtctttgctattgtgagcactgctgtaataaacatacgtgtgcatgtgtctttatagcagaatgatttgtaatcctttgggtatatacccagtaatgggatggctgggtcaaatggtatttctagttctagatccctgaggaatcgccacactgacttccacaatggttgaactagtttacagtcccaccaacagtgtaaaagtgttcctatttctccacatcctctccagcacctgttgtttcctgactttttaatgatcgccattctaactggtatgagatagtatggcattgtggttttgatttgcatttctctgatggccagtgatgatgagccttttttcatgtgtcttttggctgcataaatatcttcttttgagaagtgtcgttcatatcctttgcccactttttgatggggttgtttgattttttcttgtaaatttgtttgagttcattgtagattctggatattagccctttgtcagatgagtagattgcaaaaattttctcccattctgtaggttgcctgttcactctgatggtagtttctttggctgtgcagaagctctttagtttaattatatcccatttgtcaattttggcttttgttgccattgcttttggtgttttagacgtgaagtccttgtccatgcctatgtcctgaatggtattgcctaggttttcttctagggtttttatggttttaggtctaacatttaagtctttaatccatcttgaattaatttttgtataaggtgtaaggaaggggtccagtttcagctttctacatatggctagccagttttcccagcaccatttattaaatagggaatcctttccccattgcttgtttttgtcaggtttgtcaaagatcagatagttgtagatgtgtggcattatttctgagggctctgttctgttccattggtctgtatctctgttttggtaccagtaccatgctgctttggttactgtagtcttgtagtatagtttgaagtcaggtagcatgatgcctccagctttgttcttttggcttaggattgacttggtgatgcgggctcttttttggttccatatgaactttaaagtagcttttttccaattctgtgaagaaagtcattggtagcttgatggggatggcattgaatctataaattaccttgggcagtatggccattttcactatattgattcttcctacccatgagcatggaatgttcttccatttgtttgtatcctcttatttccttgagcagtggtttgtagttttccttgaagaggtccttcacatcccttgtaagttggattcccaggtattttattctctttgaagcaattgtgaatgggagttcactcatgatttggctctctgtttgtctgttattggtgtataagaatgcttgtgatttttgcacattgattttgtatcctgagactttgctgaagttgcttatcagcttaaggagatttggggctgagatgatggggtcttctagatacacaatcatgtcatctgcaaacagggacaatttgacttcctcttttcctacttgaataacctttatttccttctcttgcctgattgccctggccagaacttccaacactatgttgaataggagtagtgagagagggcatccctgtcttatgccagttttcaaagggaatgcttccagtttttgcccattcagtatgatattggctgtgggtttgtcataaatagctcccattattttgagatatgtcccatcagtaccaatttattgagagtttttagcatgaagggttgttggattttatcaaaggccttttctgcatctgttgagataatcatgtggtttttgtctttggttctgtttatatgctggattatgtttattgatttgcatatgttgaaccagccttgcatcccagggatgaagcccacttgatcatggtggataagctttttgatgtgtttgctggattcggtttgccagtattttattgatgatttttgcatcgatgttcatcagggatattggtctaaaattctctttttctgttgtgtctctgccaggctttggtatcaggatgatgctggcctcataaaatgagttagagaagattccctctttttctattgattggaatagtttcagaaggaatggtaccagctcctccttgtacctctggtagaatttggctgtgaatctgtctggtcctggactttttttggttggtaagctattaattattgcctcaatttcagagcctgttattggtctattcagagattcaacttcttcctggtttagtcttgggagggtgtatgtgtccaggaatttatccatttcttctagattttctagtttatttgcatagaggtgtttatagtattctctgatggtagtttgtatttctgtgggatcagtggtgatatcccctttatcattttttattgcatctatttgattcttctctcttttcttctttattagtcttgctagtggtctgtcaatgttgttgatcttttaaaaaaaaccagctcctggattcattgattttttgaagggttttttgtgtctctgtctccttcagttctgctctgatcttagttatttcttgccttctgctagcttttgaatgtgtttgctcttgcttctctagttcttttaattgtggtgttagggtgtcaattttagatctttcctgctttctcttgtgggcatttagtgctataaatttccctctacacactgctttaaatgtctcccagagattctggtatgttgtatctttgttctcattggtttcaaagaacttctttatttctgccttcatttcgttatgtacccagtagtcattcaggagcaggttgttcagtttccatgtagttgagcggttttgagtgagtttcttaatcttgagttctagtttgatcgcactgtggtctgagagacagtttgttatcatttctgttcttttacatttgctgaggagtgctttacttccaactatgtggtcaattttggaacaagtgcggtgtggtgctgagaagaatgtatattttgttgaattggggtggagagttctgtagatgtctattagctccacttggtgcagggctgagttcaattcctagatatctttgttaactttctgtcttgtggatctgtctaatgttgacagtgggtgttaaagtctcccattattattgtgtgggagtctaagcctcttcgtaggcctctaaggacttcctttatgaatccgggtgctcctgtactgggtgcatatatatttaggttagttagctcttcttgttgaattgatccctttaccattatgtaatggccttctttgtctcttttgatctttgttggtttaaagtctgttttatcagagactagggttgcaacccctgccttgttttgttttccatttgcttggtagatcttcctccatccctttattttgagcctgtgtgtctctgcacgtgagaagggtttcctgaatacagcacactgatgggtcttgactctttatccaacttgccagtctgtgtcttttaattggagtatttagcccatttacatttaaggtttatattgttatgtgtgaatttgatcctgtcattgagatgttagctggttattttgctcgttagttgatgcagtttcttcctaaccttgatggtctttacgatttggcatgtttttgcagtggctggtaccagttgttcctttccatgtttagtgcttccttcaggagctcttgtagggcaggcctggtggtgacaaaatctctcagcatttgcttgtctgtaaaggattttatttctccttcacttatgaggcttagtttggctggatatgaaattctgtgttgaaaattcttttctttaagaatgttgaatattggcccccactctcttctggcttgtagaatttctgccgagcgatcagctattagtctgatgggcttccctttgtgggtaacccgacctttgtctctggctgcccttaacattttttccttcatttccactttggtgaatctgacaattaagtgtcttggagttgtccttctcaaggagtatctttgtggacttctctgtatttcctgaatttgaatgttagcctgccttgctggattggggaagttctcctgcataatttcctgcagagtgttttccaacttggttccattctccccgtcactttcaggtacaccaatcagatgtagatttggtcttttcacatagtcccatatttcttggagggtttgtttgtttctttttattcttttttctctaaacttctcttctcacttcatttcattcatttgatcttccatcaagataccctttcttccagttgatcgaattggttagtgaggcttgtgcattcatcatgtagttctcgtgccgtggttttcagctccatcaggtcctttaaggacttctgtgtattagttattctagttagccatttgtctaatcttttttcaaggtttttgacttctttgccatgggttcgaacttcctcctttagctcggagaagtttgatcgtctgaagccttcttctctcaactcatcaaagtcattctccatccagctttgttccgctgctggtgaggagctgcgttcctttggagaagaagaggttctctgatttttagaattttcagtttttctgttctgttttttccccatctttgtggttttatctacctttggtctttgatgatggtgacatgcagatggggttttggtgtggatgttctttctgtttgttagttttccttctaacagtcaggaccctcagctgcaggtctgtcggagtttgccagagctcaactccagaccctgtttgcctgggtatcagcagcggaggctgcagaacagcgaatattggtgaacagcaaatgctgctgtctgatcgttcctctggaaattttgtctcagaggggtacctggccgtgtgaggtgtcagtctgcccctactggggggtgcctcccagttaggctactcgggggtcagggacccacttgaggaggcagtctgtccgttctcggatctcaagctgcatgctgggagaaccactgctgtcttccaatctgtcagacagggacatttaagtctgcagaggtttctgctgccttttgtttggctatgccctgctgccagaggtggagtctacaagaggcaggcaggcctccttgagctgtggtgggctccacccagttcgagcttcctggctgctttgtttacctactgaagtctcagcaatggcgggcgcccctcccccagccttgctgccgccttgcagtttgatctcagactgctgtgctagcaatgagcgaggctccgtgggcgtaggaccctctgagccatgcgcgggatataatctcctggtgtgccgtttgctaagaccatcggaaaagtgtagtattagggtgggaatgacccaatttttcagatgctgtctgtcacccctttccttggctagaaaagggaattccctgaccccttgtgct

SEQ ID NO: 10502 - DNA, 6048 bp, Homo sapiens
tttttttttctttaatttatttatttattattattatactttaagttttagggtacatgtgcacaatgtgcaggttagttacatatgtatacatgtgacatgctggtgggctgcacccactaactcgtcatctagcattaggtatatctcccaatgctatccctcccccctccccccaccccacaacaggctccagagtgtgatgttccccttcctgtgtccatgtgttctcattgttcagttcccacctatgagtgagaatatgcggtgtttggttttttgttcttgtgatagtttactgagaatgatgatttccaatttcatccatgtccctacaaaggacatgaactcatcattttttatggctgcataatattccatggtgtatatgtgccacattttcttaatccagtctatcattgttggacatttgggttggttccaagtctttgctattgtgaataatgccacaataaacatacgtgtgcatgtgtctttatagcagcatgatttatagtcctttgggtatatacccagtaaagggatggctgggtcaaatggtatttctagttctagatccctgtggaatcgccacactgacttccacaatggttgaactagtttacagtcccaccaacagtgtaaaagtgttcctatttttccacatcctctccagcacctgttgtttcctgactttttaatgattgccattctaactcgtgtgagatggtatctcattgtggttttgatttgcatttctctgatggccagtgatggtgagcactttttcatgtgttttttggctgcataaatgtcttcttttgagaagtgtctgttcatgtccttcgcccactttttgatggggttgtttgtttttttcttgtaaatttgtttgagttcattgtagattctggatattagccctttgtcagacgagtaggttgcgaaaattttctcccattttgtaggttgcctgttcactctgacggtagtttcttttgctgtgtagaagctctttagtttaattagatcccatttgtcaattttggcttttgttgccattgcttttggtgttttagacatgaagtccttgcccatgcctatgtcctgaatggtaatgtctaggttttcttctagggtttttatggttttaggtctaacttttaagtctttaatccatcttgaattgatttttgtataaggtgtaaggaagggatccagtttcagctttctacatatggctagccagttttcccagcaccatttattaaatagggaatcctttccgcattgcttgtttgtctcaggtttgtcaaagatcagatagttgtagatatgcggcattatttctgagggctctgttctgttccattgatctatatctctgtgttggtaccagtaccatgctgttttggttactgtagctttgtagtatagtttgaagtcaggtagtgtgatgcctccagctttgttcttttggctcaggattgacgtggcaatgcgggctcttttttggttccatatgaactgtaaagtagttttttccaattctgtgaagaaagtcattggtagcttgatggcgatggcattgaatctgtaaattatcttgggcagtatggccatttttcacgatattgattcttcctacccatgagcatggaatgttcttccatttgtttgtaccctcttttatttccttgagcagtggtttgtagttctccttgaagaggtccttcacatcccttgtaagttggattcctaggtattttattctctttgaagcaattgtgaatgggagttcactcatgatttggctctctgtttgtctgttgttggtgtataagaatgcttgtgatttttgtacattgattttgtatcctgagactttgctgaagttgcttatcagcttaaggagattttgggctgagacaatggggttttctagatatacaatcatgtcgtctgcaaacagggacaatttgacttccacttttcctaattgaataccctttattttcttctcctgcctgatcgccctggccagaacttccaacactatgttgaataggagtggtgagagagggcatccctgtcttgtgccagttttcaaagggaatgcttccagtttttgcccattcagtatgatattggctgtgggtttgtcatagatagctcttattattttgaaatacatcccatcaatacctaatttattgagagtttttagcatgaagggttgttgaattttgtcaaagaacttttctgcatctattgagataatcacgtggtttttgtctttggttctgtttatatgctggattatatttattgatttgcgtatattgaaccagccttgcatcccagggatgaagcccccttgatcatggtggataagctttttgatgtgctgctagattcggtttgccagtattttattgaggatttttgcatcaatgttcatcaaggatattggtctaaaattctcttttttggttgtgtctctgcccggctttggtatcaggatgatgctggcctcataaaatgagttagggaggattccctctttttctattgattggaatagtttcagaaggaatggtaccagttcctccttgtacctctggtagaattcggctgtgaatccatctggtcctggactctttttagttggtaagcttttgattattgccacaatttcagatcctgttattggtccattcagagattcaacttcttcctggtttagtcttgggagagtgtatgtgtccagaaacttatccatttcttctagattttctagtttatttgcgtagaggtgtttgtagtattctctgatggtagtttgtatttctgtgggatcggtggtgatatccccattatcattttttattgcgtctatttgattcttctctctttttttctttattagtcttgctagcggtctatgaattttgttgatcctttcaaaaaaccagctcctggattcattaattttttgaagggttttttgtgtctctatttccttcagttctgctctgattttagttatttcttgccttctgctagcttttgaatgtgtttgctcttgcttttctagttcctttaattgtgatgttagggtgtcaattttggatctttcctgctttctcttgtgggcatttagtgctataaatttccctctacacactgctttgaatgcatcccagagattctggtatgttgtatctttgttctcgttggtttcaaagaacatctttatttctgccttcatttcattatgtacccagtagtcattcaggagcaggttgttcagtttccatgtagttgagtggttttgagtgagattcttaatcctgagttctcgtttgattgcactgtggtctgagagatagtttgttataatttctgttcttttacatttgctgaggagtgctttacttccaactatgtggtcaattttggaataggtgtggtgtggtgctgaaaaaaatgtatattctgttgatttggggtggagagttctgtagatgtctattaggtccgcttggtgcagagctgagttcaattcctgggtatccttgttgactttctgtctcgctgatctgtctaatgttgacagtggggtgttaaagtctcccattattaatgtgtgggagtctaagtctctttgtaggtcactcaggacttgctttatgaatctgggtgctcctgtattgggtgcatatatatttaggatagttagctcttcttgttgaattgatccctttaccattatgtaatggccttctttgtctcttttgatctttgttggtttaaagtctgttttatcagagactaggactgcaacccctgcctttttttgttttccatttgcttggcagatcttcctccatccttttattttgagcctatgtgtgtctctgcatgtgagatgggtttcctgaatacagcacactggtgggtcttgactctatccaatttgccagtctgtgtcttttaattggagcatttagtccatttacatttaaagttaatattgttatgtgtgaatttgatcctgtcattatgatgttagctggttattttgctcgttagttgatgcagtttcttcctagtctcgatggtctttacattttggcatgattttgcagcggctggtaccggttgttcctttccatgttgagtgcttccttcaggagctcttttagggcaggcctggtggtgacaaaatctctcagcatttgcttgtctgtaaagtattttatttctccttcacttatgaagcttagtttggctggatatgaaattctgggttgaaaattcttttctttaagaatgttgaatattggccctcattctcttctggcttgtagagtttctgccgagagatctgctgttagtctgatgggcttctctttgagggtaacctgacctttctctctggctgcccttaacattttttccttcatttcaactttggtgaatctgacaattatgtgtcttggagttgctcttctcgaggagtatctttgtggcattctctgtatttcctgaatctgaatgttggcctgccttgctatattggggaagttctcctggataatatcctgcagagtgttttccaacttggttccattctccccgtcactttcaggtacaccaatcagacgtagatttggtcttttcacatagtcccatatttcttggaggctttgctcatttctttttattcttttttctctaaacttcccttcttgcttcatttcattcacttcatcttccatcgctgataccctttcttccagttgatcgcatcggctcctgaggcttctgcattcttcacgtagttctcgagccttggttttcagctccatcagctcctttaagcacttctctgtattggttattctagttatacattcttctaaatttttttcaaggttttcaacttctttgcctttggttgaatgtcctcccgtagctcggagtaatttgatcatctgaagccttcttctctcagcttgtcaaagtcattctccatccagctttgttccgttgctggcgaggaactgcgttcctttggaggaggagagtcgctctgctttttagagtttccagtttttctgctctgttttttccccatctttgtggttttttctacttttggtctttgatgatggtgatgtacagatgggtttttggtgtggatgtcctttctgtttgttagttttccttctaacagacaggaccctcagctgcaggtctgttggagtacccggccgtgtgaggtgtcagtctgcccctgctggggggtgcctcccagttaggctgctcggggggtcaggagtcagggacccacttgaggaggcagtctgcccgttctcagatctccagctgcgtgctgggagaaccactgctctcttcaaagctgtcagacagggacatttaagtctgcagaggttactgctgtctttttgtttgtctgtgccctgcccccagaggtggagcctacagaggcaggcaggcctccttgagctgtggtgggctccacccagttcgagcttcctggctgctttgtttacctaagcaagcctgggcaatggtgggcgcccctcccccagcctcgctgctgccttgcagtttgatctcagactgctgtgctagcaatcagcgagactccgtgggcgtaggaccctccgagccaggtgcaggatataatctgatgcgccattttttaagccggttggaaaagcgcagtattcgggtggaagtgacccgattttccaggtgccgtgtgtcacccctttctttgactaggaaagggaactccctgaccccttgcgcttcccgagtgaggcaatgcctcgccctgcttcggcttgcacacggtgcacgcacccactgacctgcgcccactgtctggcactccttagtgagatgaacccggtacctcagatggaaatgcagaaatcacccgtcttctgctcgctcacgctgggagctgtagactggagctgttcctattcggccatcttggcgcctccccct

SEQ ID NO: 10503 - DNA, 4949 bp, Homo sapiens
tttttttaaattaattaatttatttatttatgaattatacttttgagttctagggtacatgtgcacaacgtgcaggtttgttacatatgtatacatgtgccatgttggtttgctgcacccatcaattcattatttacattagatatttctcctaatgctatccctcccccagccctccaccccctgacaggccccggtgtgtgatgttccccaccctgtgtccaagtgttctcattgttcagttcccacctatgagtgagaacatgcagtgtttggttttctgtccttgtgatagtttgcttagaatgatggtttccagcttcatccacgtccctgcaaaggacatgaactcatccttttttatggctacatagtattccatggtatatatgtgccacaatttcttaatccagtctatcattgatggacatttgggttggttccaagtctttggtactgtgaatagtgccgcaacaaacatatgtgtgcatgagtctttatagtagcatgatttataatcctttgggtatatacccagtaatgggatggctgggtcaaatggtatttctagttctggatccttgaggaaccaccacactgtcttccacaatcattgaactaatttacactcccaccaacagtgtaaaagtgttcctatttctctacatcctctccagcatctgttgtttcctgactttttaatgatcaccgttctaactggtgtgagatggtatctcattgtggttttgatctggatttctctgatgaccagtgatgatgagcattttttcatgtttctgttggctgcataaatgtcttcttttaagaagtgtctgttcatatcctttgcccacttttaggtggggtggttggtcttttccttgtacctttgtttagattctttgtagattctggatattaaccctttgtcagatgggtagatggcaaaaattttctcccattctgtaggttgcttgttcactctgatggtagtttattttgccatgcagaagctctttatttaattagataccatttgtctattttggcttttgttgccattgcttttggtgttttagtcatgaagtccttgcccaggcctatgtcctgaatggtattgcctaggttttcttctaggggttttatggttttaggtctaacatttaagtctttaatccgtcttgaattaatttttatataatgtgtaaggaagggatccagtttcagttttctacatatggctagccagttttcccagcaccatttattaaacagggaatcctttcccgatttcttgtttttgtcaggtttgtcaaagatcagatggttgtagatgtgtggtgttatttctgaggcctctgttctgttacattggtttatatatctgttttgataccagtactatgctgttttggttactgtagccttgtaatatagtttgaagtcaggtagcgtggtgtctccagctttgtttttttttgcttaggattgtcttggcaatgtgggctcttttttggttccatatggactttaaagtagttttttccaattctgtgacgaaagtcattggtagcttgatggggatggcattgaatctgtaaattaccttgggcagtatggccattttcatgatattgattcttcctatccatgagcatagaatgttcttccattttgtttgtgtcctcttttatttcactgagcagtggtttgtagttctccttgaagaggtccttcacatcccttgtaagttggattcctaggtattttattctctttgtagcaattgtggatgggagttcactcatgatttggctctctgtttgtctgttatttgtgtataggaatgcttgtgatttttgcagattgattttgtatcctgagactttgctgaagttgcttatcagcttaaggagattttgggctgagataatggggttttctaaatatacgatcatgtcatctgcaaaccgggacaatttgatttcctcttttcctaattgaataccctttatttctttctcttgcctgaatgccctggccagaacttccaacactatgttgaataggagtggtgagagaggacatcattttcttgtgtgagttttcaaagggaatgctcccagtttttgcccattcagtatgatactggctgtgggtttgtcataaatagctcttattattttgagatacgttccttcaacacctagtttattgagagtttttagcatgaagagctgttgaattttgttgaaggacttttctgcatccattgagataatcatgtgttttttgtcgttggttctgtttatgtgatggattacgtttattgatttgcatatgttgaaccagccttgcatcccagggatgaagcccacttgatcgtggtggataagctttttgatgtgctgctggattcgatttgccagtattttattgaggacttttgcatcgatgtttatcagggatattggtctaaaattctctttttggttgtgtctctgccaggctttagtatcaggatgattctggcctcataaaatgagttaaggaggagtccctctttttctattgattggaatagtttcagaaggaatggtaccagctcctctttgtacctctggtagaatttggctgtgaatccgtttggtcctggactttttttggttggtaggctattaattattgcctcaatatcagaacctgttattggtctattcagagattcaacttcttcctggtttagtcttgggagggtgtatgcgtccaggaatttattcatttctactaggttttctagtttatttgcgtagaggtgtttatagtattctctgatgatagtttgtatttctgtgggattggtggtgatatcccctttatcattttttattgcatctatttgattcttctctcttttttttctttattggttttgctagcggtctatcaattttgttgatcgtttcaaaaaaccagctcctggatttgttgattttttgaagggttttttgtgtctctatctccttcagttctgctttgatcttagttatttcttgccttctgctagcttttgaatgtatttgctcttgcttctctagttctttgaattgtgatgttagggtgtcaattttagatctttcctgctttctcttgtgggcatttagtgctataaatttccctctatacactgctttaaatgtgtcccagagattctggtatgttgtgtctttgttctcattggtttcaaagaacatctttatttctgctttcatttcgttatttacccagtagtcattcaggagcaggttgttcagtttccatgtagttgtgcagttttgagtgagtttcttaatcctgagttctaatttgattgcactgtggtctgagagacagtttgttgtgatttctgttcttttacatttgctgaggagtgctttacttccaactatgtggtcaattttagaataagtgcgatgtggtgctgagaagaatgtatattctgttgatttagggtggagagttctgtagatgtctgttaggtcttcttggtgcagagctgagttcaagtcctggatatccttgttaaacttctgtcttgttgatctgtctaatattgacagtggggtgtgaaaatctcccattattattgtgtgggagtctaagtctctttgtaggtatctaaggacttgctttatgaatctgggtgctcttgtattgggtgcatatctatttaggatagttagctcttctcgttgaattgatccctttaccattatgaaatgaccttcgttgtctcttttgatctttgttggcttaaagtctgttttatcagagcctaggattgcaacccctgctttattttgctttccatttgcttggtagatcttcctccatccctttattttgagcctatgtatgtctctgcacatgagatgggtctcctgaatacagcacactgatgggtcttgactctttatccaaattgccagtctatatcttttaattggagcatttagtccatttacacttaaggttaatattgttatgtgtgaatttgatcccgtcattatgatgttaggtggttattttgcccgttaattgatgcagtttcttcatagcatcgatggtttttacaatttggcatgtttttgcagtggctggtaccggttgttcctttccatgttcaatgcttccttcaggagctcttgtaaggcaggcctgctggtgacaaagtctctcagcatttgcttgtctgtaaaagattttatttctccttcagttatgaagcttagtttggctggatatgaaattctgggttgaaaattcttttctttaagaatgttgaatattggcccccactctcttctggcttgtagggtttctgctgagagatccgctgttagttgatgggcttccctttgtgggtaacccgacctttctctctggctgcccttaaccttttttccttcatttcaactttggtgaatctgacaattatgtgtcttggggttgctcttctcaaggagtatctttttggtgttctctgtatttcctgaatttgaagtttggcctgccttgctaggttggggaagttctcctggataatatcctgaagactgtttcccatcttggttccattctccccctcactttcaggtacaccaatcgaatgtagatttggtcttttcacatagtcccatatttcttggaggctttgttcacttctttttactcttttttctctaaacttgtcttcttgctttatttcattaatttgatcttcaatcactgataccttttcttccacttgatcgaatcggctattgaagcttgtgcatgcatcacgaagttcttgtaccatagttttcagctccatcaggtcatttaaggtcttctctacactgtttattctagtttagccattcctgtaaccttttttcaaggttttt

SEQ ID NO: 10504 - DNA, 6628 bp, Homo sapiens
atatatcttttttttaattttattattattatactttaagttttagggtacatgtgcacaacgtgcaggtttgttacatatgtatacatgtgccatgttggtgtgctgcaccaattaactcgtcatttagcattaggtatatctcctaatgctatccctcccccctcccccaactccacaacagtccccggtgtgtgatgttccccttcctgtgtccatgtgttctcattgttcaattcccacctatgagtgagaacatgcggtgtttggttttttctccttgcgatagtttgctgagatattgactaaattcaaaaagatgttaaatggatttttctgtaaattaaacgttgaaataaaaacacaacaaaatactcttaaaacactaatctactctttaactaaatttgtaaaaaattataaaaggtttgtaaaaatctcaccttatagtcaaactggttaagattaaataaagttatccataaaagttcattaaaaattgggattaacattaataatagactagtacaaagataaaattaaaattaactttctctcttaaacagaattttcacgtaataattaagactaataaaagatatttgctttttcaaatatttgagtcattttaacaaaataagtaacttataataatctaaaagtctattttataatatcaaatgttttaaaactctaacatattcaacaaacgtcccaaaattaaacttcagtttcaagattatctttcctaacccctaacttttagggcacctagaacatcaaaagaaagataaacaagatatttaatatatttaaataggtgggattgcaaaaatgatatttaatcttcttcagattatatttcgataaataacattaatatatgttccaaaattgtataaaatgtctaagattctagtgtatacatatatgctatcaattataattaaggttattatattacaatattataaaatcagaaataaccaaatttctttgtccaaaatcgtgtgatatgtctaggattctagtgtctttttttttattatactttaagttttagggtacatgtgcacaatgtgcaggttaattacatatgtatacatgtgccctgctggtgtgctgcacccattaactcatcatttagcattaggtatatctcctaatgctatccctccccgctccccccaccccacaacagtccccagagtgtgatgttccccttcctgtgtccatgtgttctcattgttcaattcccacctatgagtgagaatatgcggtgtttggttttttgttcttgcgatagtttactgagaatgatgatttccaatttcatccatctccctacaaaggacatgaactcatcattttttatggctgcatagtattccatggtgtatatgtgccacattttcttaatccagtctatcattgttggacatttgggttggttccaagtctttgctattgtgaatagtgccgcaataaacatacgtgtgaatgtgtctttatagcagcatgatttataatcctttgggtatatacccagtaatgggatggctgggtcaaatggtatttctagttctagatccctgaggaatcgccacactgacttccacaatggttgaactagtttacagtcccaccaacagtgtaaaagtgttcctatttctccacatcctctccagcacctgttgtttcctgactttttaatgattgccattctaactggtgtgagatggtgtctcattgtggtcttgatttgcatttctctgatggccagtgatggtgagcattttttcatgtgttttttggctgcataaatgtcttcttttgagaagtgtctgttcacctcctttgcccactttttgatggagttctttgtttatttcttgtaaatttgtttgagttcattgtagattctggatattagccctttgtcagatgagtaggttgcaaaaattttctcccattttgtaggttgcctattcgctctgatggtagtttcttttgctgtgcagaagctctttagtttaattagatcccatttgtcaattttggcttttgttgccattgcttttggtgttttagacatgaagtccttgcccatgcctatgtcctgaatggtaatgcctaggttttcttctagggtttttatggttttaggtctaatgtttaagtctttatccatcttgaattaatttttgtataaggtgtaaggaagggatccagtttcagctttctacatatggctagccagttttcccagcaccatttattaaatagggaatcccttccccagtgcttgtttttctcaggtttgtcaaagatcagatagttgtagatatgtggcgttatttctgagggctctgctctgttccattgatctatatctctgttttggtaccagtaccatgctgatttggttactgtagccttgtagcatagtttgaagtcaggtagcgtgatgtctccagctttgttcttttggcttaggattgacttggcgatgcgggctcttttttggttccatatgaactttaaagtagttttttccaattctgtgaagaaggtcattggtagcttgatggggatggcattgaatctataaattaccttgggcagtatggccattttcatgatactgattcttcctacctatgagcatggaatgttcttccatttgtttgtatcctcttttatttcgttgagcagtggtttgtagttccccttgaagaggtccttcacatcccttgtaagttggattcttaggtattttattctctttgaagcaattgtgaatgggagttcactcatgatttggctctctgtttgtctgatattggtgtataagaatgcttgtgatttttgtacattgattttgtatcctgagactttgctaaagttgcttatcagcttaaggagatttggggctgagacaatggggttttctagatatacaatcatgtcatctgcaaagagggacaatttgacttcctcttttcctaattgaataccctttatttccttcttctgcctaattgccctggccagaacttccaacactatgttgaataggagtggtgagagagggcatccctgtcttgtgccagttttcaaagggaatgcttccagtttttgcccattcagtatgatattggctgtgggtttgtcatagataactcttattattttgagatacgtgccatcagtacctaatttcttgcgagtttttagcatgaagcattgttgaattttgtcaaaggccttttctgcatctattgagatactcatgtgatttttgtctttggttctgtttatatgctggattacatttattgatttgcgtatattgaaccagccttgcatcccagggatgaagcccacttgatcatggtggataagctttttgatgtgctgctggattcagtttgccagtattttattgaggatttttgcttcaatgttcatcaaggatattggtctaaaattctcttttatggttgtgtctctgcctggctttggtatcaggatgatgctggcctcataaaatgagttagggaggattccctctttttctattgattggaatagtttcagaaggaattgtaccaggtcctccttgtacctctggtagaattcggctatgaatccatctggtcctggactctttttggttggtaagctattgattattgccacaatttcagctcctgttattggtctattcagagattcaacttcttcctggtttagtcttgggagggtgtatgtgtcgaggaatttatccatttcttccagattttctagtttatttgcgtagagatgtttgtagtattctctgatggtagtttgtatttctgtgggattggtggtgatatcccctttatcattttttattgcatctatttgattcttctctcttttcttctttattagtcttgctagtggtctatcaattttgttgatcctttcaaaaaaccagctactggattcattaattttttgaagggttttttgtgtctctatttccttcagttctgctctgattttagttatttcttgccttctgctagcttttgaatgtgtttgctcttgcttctctagttcttttaattgtgatgttagggtgtcaattttggatctttcctgctttctcttgtgggcatttagtgctataaatttccctctacacactgctttgaatgtgtcccagagattctggtatgttgtgtctttgttctcgttggtttcaaagaacttctttatttctgccttcatttcgttatgtacccagtagtcattcaggagcaggttgttcagtttccatgtagttgagcggttttgggtgagtttcttaatcctgagttctagtttgattgcactgtggtctgagagacagtttttataatttctgttcttttacatttgctgaggaaagctttacttccaactatgtggtcaattttggaataggtgtagtgtggtgctgaaaaaaatgtatattctgttgatttggggtggagagttctgtagatgtctattaggtctgcttggtgcagagctgagttcaattcctgggtatccttgttaactttctgtctcgctgatctgtctaatattgacagtggggtgttaaagtctcccattattattgtgtgggagtctaagtctctttgtaggtcattcaggacttgctttatgaatctgggtgctcctgtattgggtgcatatatatttaggatagttagctcttcttgttgaattgatccctttaccattatgtaatggccttctttgtctcttttgacctttgttggtttaaagtctgttttatcagagactaggattgcaacccctgcctttttttgttttccatttgcttggtagatcttcctccatctttttattttgagcctgtgtgtgtctctgcacgtgagatgggtttcctgaatacagcacactgatggaccttgactctatccaatttgccagtctgtgtcttttaattggagcatttagtccatttacatttaaagttaatattgttatgtgtgaatttgatcctgtcattatgatgttagctggttattttgctcgttagttgatgcagtttcttcctagtctcgatggtctttacaatttggcatgattttgcagtgtctggtactggttgttcctttccatgtttagtgcttgccttcaggacctcttttagggcaggcctggtgctgacaaaatgctctcagcatttgcttgtctgtaaagtattttatgttctccttcacttatgaagcttagtttgtctggatatgaaattctgggttgaaaattcttttctttaagaatgttgaatattcacccccgactctcttctggcttgtagggtttctgccgagagatccgctgttagtctgatgggcttccctttgtgggtaacccgacctttctctctggctgcccttaacattttttccttcatttccactttggtgaatctgacaattatgtgtcttggagttgttcttctcgaggagtatctttgtggcgttctctgtatttcctgaatctgaatgttggcctgccttgctagattggggaagttctcctggataatatcctgcagagtgttttccaacttggttccattctccccgtcactttcaagtacaccaatcagacatagatttggtctttttacatagtcccatatttcttggaggctttgttcgtttctttttattcttttttctctaaacttcccttctcgcttcatttcattcatttcatcttccatcgctgataccctttcttccagttgatcgcatcagctcctgaggcttctgcattcttcatgtagttctcgagacttggctttcagctccatcagctcctttaagtacttctctgtattggttattctaattatacatttgtctaaatttttttcaaagtttttaacttctttgtctttggtttgaatttcctcctgtagctcggagtagtttgatcgtctgaagacttattctctcaacttgtcaaagtcatcctccgtccagctttgttccgttgctggtgaggaactgcattcctttggaggaggagaggcgctctgctttttagagtttccagtttttctgctctgttttttccccatctttgtggttttacctacttttggtctttgatgatggtgatgtatagatgggttttcggtgtggatgtcctttctgtttgttagttttccttctaacagacaggaccctcagctgcaggtctgttggagtttgctagaggtccactccagaccctgtttgcctgggtatcagcagcggtgtctgcggaaccgcggattttcatgaactgcgaatgctgctgtctgatcattcctctggaagttttgtctcagaggagtacccggccgtgtgaggtgtcagtctgcccctactggggggtgcctcccagttaggctgctcgggggtcaggggtcagggacccacttgaggcagtctgcccattctcagatctccagtgcatgctgggagaaccactgctctcttcaaagctgtcagacagggacatttaagtctgcagaggttactgctgtctttttgtttgtgccctgccc

SEQ ID NO: 10505 - DNA, 4830 bp, Homo sapiens
ttttttttttttaaattatactttaagttctggggtacatgtgcacaacgtgcaggtttgttacataggtatacatgtgccatgttgctttgctgcacccatcaacttgtcgtttacattaggtatttctcccaatgctatccctcccccagccccccacccctgacaggccccaatgtgtgatgttcccctccctgagtccatgtgttctcattgttcaactccctcttatgagtgagaacatgtggtgtttggttttctgtcctgtgataattcgctgagaatggtggtttccagcttcatccatgtccctgcaaaggacatgaactcatcctttttttaggctgcatagtattccatggtgtatatgtgccacattttcttaatccagtctattattgatggacatttgggttggttccaagtctttgctattgtgaatagtgccgcagtaaacatacgtgtgcatgtgtctttatagcagcatgatttataatcctttggatatatacccagtaatgggattgctgggtcaaatggcatttctagttctagatccttgaggaatgaccacactgtcttccacaatggttgaactaatttacactcccaccaatgtgtaaaagtgttcctatttctccacatcctctccagcacctgttgtttcctgactttttaatgatctccattctaactggcatgagatgatatctcactgtggttttgatttgcatttctctaatgaccagtgatgatgagcattttttcatatgtctgttggctgcacaaatgtcttcttttgagaagtgtctgttcctatcttttgcccactttttgatggggttgtttgatcttttcttgtaaatttgtttaagttctttgtagattctggatattagccctttgtcagatgggtagattgcaaaaattttatcccattctgtaggttgtctgttcactctgctgatagttttttttttgctgtgcaaaagctctttagtttaattagatcccatttgtctcttttggcttttgttgccattgcttttagtgttttagtcatgaagtctttgcccatgcctatgtcctgaatggtattgcctaggttttcttctagggtttttatgattttgggtcttatatttaagtctttaatacatcttgaattaatttttgtataaggtgtaaggaagggatccactttcagctttctacatgtggctagccagttttcccagcactgtttataaaatagggaatcctttccccattgcttgtttttgtcaggtttgtcaaagatcagatgattttagatgtgtggtgttatttctgaggcctttgttctgttccattggcctatatctctgttttggtaccagtaccatgctgttttggttactgtagacttgtagtatagtttgaagtcaggtagtgtgatgcctccagctttgttcttttggtttaggattgtcttggctatgcaggctcttttttggttccatataaactttaaagtagttttttccagttctgtgaagaaagtcagtggtagcttgatggggatagctttgaatctataaactactttgggtagtatggcattttcacaatattgattcttcctatccatgagcatggaatgttcttccatttgtttgtgtcctcttttacttcattgagtagtggtttgtagttctccttgaagaggtccttcacatcccttgtaagttggattcctaggtattttattctctttgtagcaattgtgaatggagttcactcatgatttggctctctgtttgtctgttattggtgtatagggatgcttgtgatttttgcacattgattttgtatcctgagactttgctgaagttgcttatcagcttaaggagattttgggctgggacgatggggttttctaaatatacaatcatgtcatctgcaaatagggacaatttgacttcctcttttcctaattgaatatgctttatttctttctcttgcctgattgccctggccagaacttccaatactatgttgaataggagtggtgagagagggcatccttgtcttgtgccagttttcaaagggaatgcgtccagtttttgcccattcagtatgacattggctgtgggtttgtcataaatagctcttattattttgagatacattccatcaatacttagtttattgagagtttttagcatgaagcgctgctgaattttgtcgaaggccttttctgcatctattgagagagtcatgtggtttttgtctttgattctgtttatgtgatggattacgtttattgatttgcatatgttgaaccagccttgcatcccagggatgaagccgacttgattgtggtggataagctttttgatgtgctgctggattcggtttgccagtattttattgaggattttcacatcgatgttcattagggatattggcctaaaattctctttttttgttgtgtctctgccaggatttggtatcaggatgatgctggcctcataaaatgagttagagaggattccctctttttctgttgattggaatagtttcagaaggaatggtatcagctactctttgtacctctggtagaatttggctgtgaatctttctggtcctggactttttttggttggtaggctattaattattgccttaatttcagaacctgttattggtgtattcagagatttgacttcttcctagtttagtcttgggagggtgtatgtgtccaggaatttatccatttcttctagattttctagtttatttgcatagaggtgtttatagtattctctgatggtagtttgtatttctgtgggatcagtagtgatatcccctttatcattgtttattgcatctattggattcttctctcttttcttctttattagtcttgctagcggtctatgaattttgttgatcttttcagaaaaccagctcctggattcattgatttttgaaggtttttttgtgtctctatctccttcagttcttctctgatcttaattatttcttgccttctgctagcttttgaatgtgtttgctcttgcttctctagttcttttaattgtgatgttagggtgtcaattttagatctttcctgctttctcttgtgggcatttagtgcaataaatttccctctacaccctgctttaaatgtgtcccagagattctggtatgttgtgtctttgttctcattggtttcaaagaacatctttatttctgccttcattttgttatgtacctagtagtcattcaggagcaggttgtacagtttgcatgtagttgagcagttttgtgtgagtttcctaatcctgagttctagtttgattgcactgtggtctgagagacagtttgttataatttctgttcttttacatttgctgaggagtgctttacttccaactgtgtggtcagttttggaacagtgcgatgtggtgctgagaagaatgtatattctgttgatttggggtggagagttctgtagatgtctattaggtctgcttggtgtagagctgagttcagttcctggatatccttgttaactttctgtctcgttgatctgtctaatgttgacagtggggtgttaaaagtctcccgttattattgtgtgggagtcttaagtctctttgtaggtctctaaggacttgctttatgaatctgggtgctcctgtattgggtgcatatatatttaggatagttagctcttcttgttgaattgattgctttaccattatgtaatgtccttctttgtctcttttgatctttattggtttaaagtctattttatcagagactaggattgcaacccctgcttttttttgctttccatttgctggtagatcttcctccttttctttattttgagtgtaggtgtgtctttgcatgtgagatgggtttcctgaatacagcacactgatgggacttgactctttatccaatttgccagtctgtgtcttttaattggctcatttagcacatgtatatttaaggttaatattgttatgtgtgaatttgatcctgccattatgatgttagctggttattttgtccgctaattaatacagtttcttcataacaatgatggtctttacaatttggcatatttttgcagtggttagtactggttgttcctttccatgtttagtgcttccttcaggagctcttgtaaggcaggcgtggtggtgacagaatctctcagcatttgcttgtctgtaaaggactttatttctccttcacttatgaagcttagtttggctggatatgaaattctgggttgaatattcttttctttaagaatattgaatattgacccccactctgttctggcttgtagggtttctgctgagaaatctgctgttagtctgatgggcttccctttgtgggtaacctgacctttctctctggctgcccttaacattttttccttcatttccacctcggtgaatctgatgattatgtgtcttggggttgctcttctcaaggaatatctttgtggtgttctctgtatttcctaaatttgaatgttggcctgccttgctaggttgggaaagttctcctggataatatcccaaagagtgttttctaacttggttccattctccccatcactttcaggtataccagtcaaacgtagacttgtcttttcacacagtcccatatttcttggagactttgttggtttattttcactcttttttctctagtcttgtcttcttgctttatttcattaatttgatcttcaatcactgatatcctttcctccgcttgatcaaatcggctattgaagcttgtgtatgcttcatgaacttctcg

SEQ ID NO: 10506 - DNA, 6066 bp, Homo sapiens
tttttatgtagcttttttttttcttttattattatattttaagttttagggtacatgtgcacattgtgcaggttaattacatatgtatatatgtgccatgctggtgtgctgcacccactaacttgtcatctagcattaggtatatctcccaatgctatccctccccccaccccccaccccacaacagtccccagagtgtgatgttccccttcctgtgtccatgtgatctcattgttcaattcccacctatgagtgagaatatgcggtgtttggtttttggttcttgcgatagtttactgagaatgatgatttccattttcatccatgtccctacaaaggacatgaactcatcactttttatggctgcataggattcgatggtgtacatgtgccacattttcttaatccagtctatcattgttggacatttgggttggttccaagtctttgctattgtgaatagtgccgcaataaacatatgtgtgcatgtgtctttatagcagcatgatttatagtcctttgggtatatacccagtaatgggatggcagggttaaatggtatttctagttctagatccctgaggaatcgccacactgacttgcacaatggttgaactagtttacagtcccaccaacagtgtaaaagtgttcctatttctccacaccctctccagcacctgttgtttcctgactttttaatgattgccattctaactggtgtgagatggtatctcattgtggttttgatttgcatttctctgatggccagtgatggtgagcattttttcatgtgtcttttggctgcataaatatcttcttttgagaagtgtctgttcatgtcctttgcccactttttgatggggttgtttgtttttttcttgtaaatttgtttgagttcattgtagattctggatattagccctttgtcagatgagtaggttgcaaaaattttctcccattttgtaggttgcctgttcactctgatggtagtttcttttgctgtacagaagctctttagtttaattagatcccatttgtcaattttgtcttttgttgccattgcttttggtgttttagacaggaagtccttgcccatgcctatgtcctgaatggtattgcctaggttttcttctagagtttttatggttttaggtctaacgtttaagtctttaatccatcttgaattgatttttgtataaggtgtaaggaagggatccagtttcagctttctacatatggctagctagttttcccagcaccatttattaaatagggaatcctttccccattgcttatttttctcaggtttgtcaaagatcagatagttgtagatatgcggcgttatttctgagggctctgttctgttccattgatctatatctctgttttggtaccagtaccatgctgttttggttactgtagccttgtagtatagtttgaagtcaggtagtgtgatgcctccagctttgttcttttggcttaggattgacttggcgatgcgagctcttttttggttccatatgaactttaaagtagttttttccaattctgtgaagaaaggcattggtagcttgatgggcatggcattgaatctgtaaattaccttgggcagtatggccattttcacgatattgattcttcctacccatgagcatggaatgttcttccatttgtttgtatcctcttttatttccttgagcagtggtttgtagttctccttgaagaggtccttcacatcccttgtaagttggattcctaggtattttattctctttgaagcaattgtgaatgggagttcactcatgatttggctctctgtttgtctgttgttggtgtataagaatgcttgtgatttttgtacattgattttgtatcctgagactttgctgaagttgcttatcagcttaaggagattttgggctgagtcaatggagttttctagatatacaatcatgtcgtctgcaaagagggacaatttgacttcctcttttcctaattgaataccctttatttccttctcctgcctaattgccctggccagaactaccatcactatgttgaataggagtggtgagagagggcatccctgtcttgtgccagttttcaaagggaatgcttccagtttttgcccattcagtatgatattggctgtgggtttgtcatagatagctcttattattttgagatatgtcccatcaatacctaatttattgagagtttctagcatgaatggttgttgaattttgtcaaaggccttttctgcatctattgagataatcatgtggtttttgtctttggctctgtttatatgctggattacatttattgatttgcgtatattgaaccagccttgcatcccagggatgaagcccacttgatcatggtggataagctttttgatgtgctgctggattcgttttgccagtattttattgaggatttttgcatcaatattcatcaaggatattggtctaaaattctcttttttggttgtgtctctgccaggctttggtatcagaatgatgctggcctcatcaaatgagttagggaggattccctctttttctattgattggaatagtttcagaaggaatggtaccagttcctccttgtacctctggtagaattcggctgtgaatccatctggtcctggactctttttggttggtaagctattgattattgccacaatttcagctcctgttattggtctattcagagattcaacttcttcctggtttagtcttgggagggtgtatgtgtcaaggaatttatccatttcttctagattttttagtttatttgcgtagaggtgtttgtagtattctctgatggtagtttgtatttctgtgggatcagtggtgatatcccctttatcattttttattgcgtctatttgattcttctctctttttttctttattagtcttgctagcagtctatctattttgttgatcctttcaaaaaaccagctcctggattcattaattttttgaagggttttttgtgtctctatttccttcagttctgctctgattttagttatttcttgccttctgctagcttttgaatgtgtttgctcttgcttttctagttcttttaattgtgatcttagggtgtcaattttggatctttcctgctttctcttgtgggcatttagtgctataaatttccctctacacactcctctgaatgcgtcccacagataatggtatgttgtgtctttgttctcgttggtttcaaagaacatctttatttctgccttcatttcgttatgtacccagtagtcattcaggagcaggttgttcagtttccatgtagttgagcggttttgagtgagattcttaatcctgagttctagtttgattgcactgtggtctgagagatagtttgttataatctctgttcttttacatttgctgaggagagctttacttccaagtatgtggtcaattttggaataggtgtggtgtggtgctgaaaaaaatgtatattctgttgatttgtggtggagagttctgtagatgtctattaggtccgcttggtgcagagctgagttcaattcctgggtatccttgttgactttctgtctcgttgatctgtctaatgttgacagtggggtgttaaagtctcccattattaatgtgtgggagtctaagtctctttgcaagtcactcaggacttgctttatgaatctgggtgctcctgtattgggtgcatatatatttaggatagttagctcttcttgttgaattgatccctttaccattatgtagtggccttctttgtctcttttgatctttgttggtttaaagtctgttttatcagagactaggattgcaacccctgcctttttttgttttccatttgcttagtagatcttcctccatccttttattttgagcctatgtgtgtctctgcacgtgagatgggtttcctgaatacagcacactgatgggtcttgactctttatccaatttgccagtctgtgtcttttattggagcatttagtccatttacatttaaagttaatatcgttatgtgttaatttgatcctgtcatgatgatgttagctggttattttgctcgttagttgatgcagtttcttcctagtcttgatggtctttacattttggcatgattttgcagtggctggtactggttgttcctttccatgtttagtgcttccttcaggagctcatttagggcaggcctggtggtgacaaaatctctcagcatttgcttgtctgtaaagtattttatttctccttcacttttgaagcttagtttggctggatatgaaattctgggttgaaaattcttttctttaagaatgttgaatattggcccccactctcttctggcttgtagggtttctgccgagagatccactgttagtctgatgggcttccctttgagggtaacccgacctttctctctggcttcccttaacattttttccttcattgcaactttggtgaatctgacaattatgtgtcttggagttgctcttctcgaggagtatctttgtggcgttctctgtatttcctgaatctgaacgttggcctgccttgctagattggggaagttctcctggataatatcctgcagagtgttttccaacttggttccattctccccgtcactttcaggtacaccagtcagacgtagatttggtcttttcacatagtcccatatttcttggaggctttgctcatttctttttattcttttttctctaaacttcccttctcgcttcatttcattcatttcatcttccattgctgataccctttcttccagttgatcgcatcggctcctgaggcttctgcattcttcacgtagttctcgagccttggttttcagctccatcagctcctttaagcacttctctgtattggttattctagttatacattcttctaaatttttttcaaagttttcaacttctttgcctttggtttgaatgtactcccgtagctcagagtaatttgatcgtctgaagccttcttctctcagctcgtcaaagtcgttctccatccagctttgttccgttgctggtgaggaactgcgttcctttggaggaggagaggcgctctgctttttagagtttccagtttttctgttctgttttttccccatctttgtggttttatctacttttggtctttgatgatggtgatgtacagatgggtttttggtgtggatgtcctttctgtttgttagttttccttctaacagacaggaccctcagctgcaggtctgttggaatactctgccgtgtgaggtgtcagtgtgcccctgctggggggtgcctcccagttaggctgctcaggggtcaggggtcagggacccacttgaggaggcagtctgcccgttctcagatctccagctgcgtactgggagaaccactgctctcttcaaagctgtcagacagggacatttaagtctgcagaggttactgctgtctttttgtttgtctgtgccctgcccccagaggtggagcctacagaggcaggcaagcctccttgagctgtggtgggctccacccagttcgagcttccccgctgctttgtttacctaagcaagcctgggcaatggcgggcgcccctcccccagcctcgctgccgccttgcagtttgatctcagactgctgtgctagcaatcagcaagactccgtgggcgtaggaccctccgagccaggtgtgggatataatctcgtggtgcgccgttttttaagcccgttggaaaagcacagtattcgggtgggagtgacccgattttccaggtgcccttcatcacccctttctttgactaggaaagggaactccctgaccccttgcgcttcccgagtgaggcaatgcctcaccctgctttggctcgcgcacggtgcacgcacccactgacctgcgcccactgtctggcactccctagtgagatgaacccggtacctcagatggaaatgcagaaatcacctgtcttctgcgtcgctcacgctgggagctgtagacccaagctgttcctattcggccatcttggctcctcctccctttttttttttgagac

SEQ ID NO: 10507 - DNA, 43886 bp, Homo sapiens
  SITE (40594): n equals a,t,g, or c
attttctggacttgtgtcctcctctctaaaaatcagttagggcaatcaataggatctcttctggctccaaacttttttgtttctatgtatttgagctaggtggtgtaatatgatttttttgttgttgttttatctttaaagtcacttgttttaaaatcacttttcttcttgctattttagagctttcacatattataaaatggggaatctggacaacagaatagctaatccagaccagctgcttacacaagatgtagaaaaattttgtaacagtgtagtcgatctgtattcaaatcttagtaaggtaagtttctctcctttttaaaagattatttgtttaattttttgaattttgaatctaagcaaatttatatagaattgattttgtggacataacagcagcatgtaaatatttaatgcttttataagaaaattagagttgttgtaatagttttaattattttaattttttctattatttttgtgaggtactttggcaaagaactgataatttagtgtcttataaggattttctaagaattttgcaggttgattccattaaaacaacagaaatttgaattctcatcttttgacctgtgtgcatccggccattgttagagattgactgtcaatttatgtttctaactccacacttataacactagactaggacttcctttctgcccatttctctgcttcagtatctttaattctaatagatcattagtaagtagtagtcaaaaaatttcacaagatgcaagtatatttcagttttctaattactgtttttcccattctcctcagaatattgccaaagctcctgactgtgataggccttagtcagttttccttcttctcactgatttctccagttcttatcttagtcatgttatctcaccacccttacagcttttgctgtagtcttcttattaaaccctcttctttgccattacctcttgcattgactatgatatgtagtaggcacctataaaatagtctgcccagcatcccctcccctcttcatctgagatgcttcagttcccactctaactcatgtgacttcccttggtgttggctaggagcttgtctcatactggaccaatgatagtatctttgcctctggtcacagttgacctagatatacagttttgagacaaaagaaaaccaaaactataaaaaggactgggtcacattgtaagaataggaatgttcttgcttcaaccagatggatggagggaaggcaattcttagagatatatatccacaagagctgctctcctcatgcccaggcccaatgcttttcacttccagcccaactttgttatttatttagctctccagaagcctttgctaactgatcccaaactcgggaactctgacaactacaaatagttcagtaattaagctttcttttctgttcccattaccacatttgaaagtttgttctctctctttctctctctctctgtctctgtgtgtgtatgtgtgtgtgtatgcatgcatgcatggtgggaatggggggtgtatctatacaactttccatgtaattttatagacattattatgtattctttaaatcttggcacttgagcaagtctcaggttttgtcaaatctggaatacagaagaatattaaattaagtacttgtagtggggctgtacaccagtgtgtaagttagatgttttaaacatctaattgacctccaacttaaattatgagtcattatttttgtcataagttttaacagttcttgaattttataagtatctctagcttcttgataacttataaggcaaaaaaaaaaaaaaaaaaaaaaaaaaaggaaggggaaaggtagatgttgaaacaagccagttaacaaaccaagccatctatcctagtaataatgtggattagaaagtgctggctgttggccgggcatagtggctcatccctgcaatcacaatactttgggaggccaaggtgggcagatcgcttgagcccaggagttcaagactatcctgggcaacatggtgaaaccccatctacaaaaaatacaaaaattacccaggcatggtaatgtgcgcctgtactcccagctactccagaggctgcagtgagccaagatctccagcctgggtgacagagccagaccctgtctcaaaaaaaaaagtggaggtgcaagcagtggctgttgacttaaagtgaatgaacacaatttgtgtttcttgaaaaacatttcaaactaatgcagctgatggtgcattagttgagttgtctctgtgtgtaaagagcagtacattaatgtgttattttggttctagagacttgagttttatatcacaaaattagattcaatggcttacttgattattttgccatggaagtgataaagtaatagagtcaaacaatattggagcaggaaaagctcctcactttacaggtgaagatatgtagaaacaaactggtagcagatttggggttacatctcaggtcattttattcagtgtctttacattatattgacacattactgagttactagtggttaattatcacagtagaggtatcttagttgatggaaagtgataaatgtttttcctacttgatggtcagtagacattgtgtaagctgttcccattttaagtttcttgagaggaaaactgttatctttcatgtattctttgatctacttactatcacagtacattgtacatagtgggacctctacatgttgataattatatattaaatgtttaatgacattttatagttaacatgttgtattagctatcattctagtgctttagttttaattctgtgtattctaatatttattttacagccatttttagacatagttttgtatatctttaagttaacgagtgcaattggagctcaggtgagtctgcttttatttcaacttttaaattgatataatataatatttgaaatacatattgtgaatagcttgatggcctgtaagaatttttgtagatctcaaagaatgtattttcacatgatttacctaacaaagtctggttataaaataatacttcattcgagattttagaagtactaatttttctttttaattttccttaaattaggtacttggaaaaattttgtggcattaaaaaccagacaaatgtattggccaggcgtggtggctcatgcctgtaatcccagcactttgggaggctgagatgggaggatcgcttgaatccaggagttcgagacaagcctggacaaaaagcgagacccgcttctttaaaaaataataataaaacagaagttcttaaaccatgaatatacttgtacttattgtttcaaagtaatgtctaaaaagagatatggagacatccattttaatatgaaattctaatgttaaaataacgatacatttagagtgggtgtaacagttccaagaatattttataatgtaaatggttggctatcccatgagccttattatccaagtctctgatatttgtgatggcaagaatcacttttaagttttctttgagttatcttattgaaatgtaactttagtcatttaatatgtaatgttattgttacatatttataacacagccatataatagtatggttgttttacatatgtgtatgtgtgtatatgcatttcagttgattaataaattatttccatactggtttttgttgctttccaaaacactggaaaagcagggttttggttttgctttgttttgtttttcgaatttttctgtttattttcctaattctttgctgtcttgtgatccaggttttatcattcttgtattttgttttactataaccaagtgaataggccaaatccttcttgtctccttgcagtcatatttttatggtacttaactacatttttgtgatacttaaatatgtctccatgtctacttgttatctgattctgcatttcttaaaggcagaaactgttttagttatctttttggtccacatttgtagtagttgttgatatgcattgaattgatcagatttacttttttttttttaatcttgaatacttactagcacatatattgtgctagatagtaggaataaaaagataagtaagacacaattcctgctgaagaggaattacaatgtggtaaaacaggtagatagtcaaacaattatgatgcagcatgataaagtttagtaatagaagtttcaagaaagtatttagtgccaagaagaactggaggtgatatctgagctactttggggaggtaagtaaacatccattagattatgtcaggcttgccaaacataagaacaacctcactgaatggaaactgttcaggaaacatttatatattttagtatggcagagtatagggtatataggggaatgagggaagtgcctatgatgaacttggaaaggtatgcttcaagcatacctttctttttctcttgggatggtcaatgggtgatgaggtcacgtacaaagttattaatacatagtacagcagctggaagcaagatgtacacgcagggaaagacagagctcgttcagggggagctgaacttgaggcatctgcacagtattaaggtaaagatgtgtagtacttatttcttgggttcataagagtgataggactagaggtatagatttgagatgagaagagaactaaggaaggagtttgagggaatattaacattaaaaaagaaggcaagaaaaagaggtctaagaattattgtggaatcttaagagattatcaagaagagttccaacaggagagtgttagataacatagaaaaactgtgaactgcaattaggagtttttaggtgagcaaaatgtaggagagctgagggataagctacagtggtaagaggaaaagcccatgagtagtaaaagtgtagaggctactgtgtactttttcagaaaaaaaacaaagggaaaaaattacccagtagggcaatttctttcagtcattgaggttaattataaaaattgtacatgtttgtatctaagtgaatttattattatatcccagaactttgtgtatctttctctcccaataataatagggcccagcgagcatgatggcctacttggttgtttctgggctattcctaactcgacttcgaagacccattggtaagatgacaataactgagcaaaagtatgaaggagaatatagatatgttaattctcggctcatcacaaacaggtaaagacaaatgcattaaagccttgctaaaaattaatttctatggatattgatgtcatttaaattgactccaaaaagtctagtgacactgttactgtaataatgtgcatattgtgttgaaaatatacattatgaaagagactagttttataaagtagtaatcatgaatattttgaactctttttcttactaaccatgtagtattcctgattcacctgttcataccttctgttgatgaattttctgttaattttacttcagacataatcagtttacaattcaaatttcaacttacaatacctgttccaagacaattttgtctcaatttttccacaaatatttttattttgactgttcataatgctcaatgattcactgtcactgcatgtgcctctacctattttctagagttttttaaatgtaagataggaagaaaaagtgtggactttggagccagccatactagcttcaaaatctacctcttccacttatcagttgcatgtatttgattttagcgaattattcatagtttcacttttgtttataataggtagataatatagggttgcaatgaggattaaatttgataatacatataaagcttccagctcagttttttatatggagcaactgctcaataaatgttctcatatattgatctgttaatgttaagtcattttgagggttctaatatgtatttaatattctactctataggcatttgcaaatgacagttccctcttcctttatttccttggattgctaaaatagtacaagttttaaatagggttttttgctctagggaggcagcggaatagagttaagaggtgatttgccaagtaaatgaaagatgccttttagtgaaagaagcagaaagcatgactcatggctccagtaataagaacactcactgcttcacgtgagaacccttaagacagggcagttccaggtatggcattatcagggctctggctctctggtgttctcttggctctgccctgctttgtatgctgccccattcctcgggctaattcttcttgtgaccacaagatggcgatagcagttacagatttcactagctcctctcccctgcagaaagctccagaaacaaaaaggggccatctcgcctggtgtgtctttatgagagcaaagaaacctttcccaagagtcccacaactgactttccctcatatcttattggctggaatggttacttgaccatgcctaaagcaatcacagcaaagtgattggcttagaccagttgggaccctaaatggggttgaggcattcctaaagcattagggtacatggaaaataatagataactttacaaaagttgggattattttaggaagaagaacaatgaagagaatagatgttggatgggcagccatcaatattccaggatgttttatcctttcagatttttcattaaggctaaaatgactcagttcaggaggagaatcctcacctcatcttcttccataggcttaggtgtggagaggagatagaaggaagtttttttaaaaagtaattagaggtatagaattgtaggcttcttatactcttgagtctctgtcattgtgtcaaggaaaccatgaaacgcgtgacaaatgtgtcatatcttatgggaagttaattttacttgaagtggttgaggtaggtggtaccttgtttttatgaaaaacgcaggtccatttcaaaatagaaatataaaacataaattgtttaggggaaaaaagagactttaaagaaatatttcaaccttgccttctagacttctctataaatatttttctctgccataagaggtactttgctgggaaagcttacatcattcctgtgtaatagaaagactataaatgttagggtcagataggagttatgatttcagctccctgacctgctggctctgcaacctttacaaatttacttaactacactgaacttctcttcatctataaaataccttttttttctagtcgtgatccctgtggcccttgtggacccatgcacatctgctcaggaaacgtggaattgttgtgaggatatgatggggttccagggtttcctcctgggagctggcactttgaagccggtgggacttagcctgcttttctgtctttaaaaggctgtatgtcaagtcatcactatccatctttttctagctgttgctttttcatctctttcttgtttgggcctgtactttaacttgaagtctgcaatgttggtcccagccctgcctttctgtacatcacagcaacttctttctctaatttcgaatttctgagaattcgtgcagtatgtcttttgcagccaggatacctatgccataggttgcagtccagcatatgattcagtcaggagtgtattcctgtgctccgatcagctgagctaggaacagaatctcaggtatagactgtggcttgagatgcaccagataagctcttagtcacaaaatgtccatttaaatacaaacattcagccatcatatactgtatttcaattattttccaagcataggtaacattaaaattaattgctaaattattttctttaatagtgaagaaattgccttttacaatgggaataaaagagaaaagcagacagtccactcagtcttccgaaaactggtaagataacacacttgaggttcatgtgtttatggaaagggttttttttgtttgtttgttttgcctatggccgacacacatacacacacacacaaacacacacgtatgtatacatatcttaaagattttttgaaaaatagctataaaggattttatactgcatttttaataaaaaatatgagattaaaaactatcatatcaatatattcaagtgcccatttataaaattgcatagatttattaaaataatattaagtgtaccatctgatctttgacaaacctgacaaaaacaagaaatgaggaaaggattccctgtttaataaatggtgctgggaaaactggctagccatatgtagaaagctgaaactggatcccttccttacaccttatataaaaattaattcaagatggattaaagacttaaatgtcagacctaaaaccataaaaaccctagaagaaaacctaggcaataccattcaggacataggcatgggcaaggacttcatgtctaaaacaccaaaagcaatggcaacaaaagccaaaattgacaaatgggatctaattaaactaaagagcttctgcacagcaaaagaaactaccatcagagtgaacaggcaacctacagaatgggagaaattttttgcaatctacccatctgacaaagggctaatatccagaatctacaaagaacttaaacaaatttacaagaaaaaaacaaccccatcaaaaagtgggcaaaggatatgaacagacacttctgaaaagaagacatttatgcagccaacagacacgtgaaaaaatgctcatcatcgctggccatcagagaaatgcaaatcaaaaccacagtgagacactatctcacagcagttagaatggcgatcattgaaaagtcaggaaacaacgtgctggagaggatgtggagaaataggaacacttttacactgttggtgggactgtaaactagttcaaccattgtggaagacagtgtggcaattcctcagggatctagaactagaaacaccatttgacccaaccatcccattactgggtatatacccaaaggattataatcatgctgctataaagacacatgcacacatacgtttattgtggcactattcacaatagcaaagacttggaaccaacccgaatgtccatcagtgatagactggacaaagaaaatgtggcacatatacaccatggaatactatgcagccataaaaattatgagttcatgtcctttgtggggacatggatgcagctggcaaccatcattctgagcaaactgttgcaaggacggaaaaccaaacactgcatgttctcactcataggtgggaattgaacaatgagaacacctggacccagggtggggaacaccacacaccggggcctgttgtggggtgggggcctgggggagggatagcattaggagatatacctaatgtaaatgacgacttaatgagtgcagcacaccaacatggcaaatgcatgcatatgtaacaaacctgcacgttgtgcacatgtaccctagaacttaaagtataatcaaaaacataaaaaaaaaattaagtgtatttttacagaggttgcttaggagccttatttagtgattcccacagaaagaatttgttcctgaagcattcatgaaaatacaataaagattattatgtaaagcaagagtcagcaaactttttccataaagggcaagatagtatgtatatattttaggcttttcataccacacagtgtcttgcaactattcagctccgctactcaagagtagctatatataatacatgaatgagtgggtgtggctatgttctaataaaactttacttaaaaaaacaagtagcaggctagatttggactatgggtcagagtttactggctttttgttttaaagaatataagcattgtttcttgtgaaagctttacttcagtttttatttaattgccacttggaaaatttgaattcaagtacttttattccattatttattcaaaagatattgaatgccgtctagttgcctgtgctcactccaggtgctaaggatgatggtggtggacatgatggataaaatcttgcctttaaggagcttacattttagtggaagtctgaagtttgtgaaattaaatgtatattttagatgagttaaagaggttaaagaaattgtcattttaaattatttcagaaattggatttttgcctcgtcggtatttaacatggcagaacttttagagtgctcactggtagaatgcatttaaggtaatttttcaggggcctgcagttcaccagtttgctctccacacggcttgcttattctcatcctttagattttcagcccaaatgttaacaccttattgaagctttgtcttctctgatcagcctatttgaaatggcctccaacagttacttcttgttttaatcatcatctttccttaaaagtatatatatatttgcagtcaaccctctgcatctgtgggttccaaatccatggattcaaccacacagattgaaaatattcagaaaaagaaattgtgtctgtacttatgtacacatatttttttcttgtcattattctctgaacaatacagacattagtgtaatagctatttacattgtattaagttttataagtaatttagagatgacttaaagtgtttgggatgagccagttgcggtggctcacccctgtaatcccagcactttgggaggctgaggcgggcagatcagttgaggtcaggagttcgagaccagcctgaccaacatggcaaaaccccatctctactaaaaatacaaaaattagccggttgttgtggcgggggcctataatcccagctactcgggaggctgaggcaggagaatcactggaacccaggaggcggaggttgcattgagccaagatggcaccactgcactccagccttggcgacagagtgagactctgtctcaaaaagtaaataaagtgtatgggatgtcgtactcaggtatatgcaaatactatgccatttttcatcagggacttgagcatccatggattttggtatccagaaggtcctggaaccaatcccatcccctttggataccgagggatgactgtattacagtctctaattatcttgtttactagttatgctctttcattagaatgtaaactccataaattcagggaccttctctgttctattcattgtatctccagcttgagcacagtgtctgacacatggtagtcattgaataaatgttccagagattgtctagttgcagaagataccaagttgttaacaagctaccctgtactcaggaagccacattttagtggagcagacaataaataaacaactagatgttctgtataatttcaggtagtaatgaattcggtggccaaaaatgaagcaggataaagggatagatatgaagggggctattgcccagctactttagctggaatggccaagatctttcttgaggaggtgacatttagtcagaaatccacatgaaagtgaaggagtcacaaaatatagataccttagaagaatgtattcctggcagtgagaagagcaagaggaaatccttaagaaggtacatgtttgagaaaccgttatttctggagcttggtgaggaggagcaaagtagaagcatatgaccttaaaaatagagctcagtgccagatcatgcaggaccttgaataatctggtagatggacagtttgagaacactacaactccagaataaaaaagcagttttagacttgtagttttaagacaatgcgtgctcatgttaaagctaaaactgaggctgtgtggcactgatttacattagcactcagttcagattgggtgtaatacaattcttagataaagcacagaccatgtgtctccactgaaagcaaagcattcagtgccaatccggacagctagtgtttcactcaaactagttaatctctgttctttttgctttcgttgttgtcctcttttgggatatgtgtatccaaaagcatggtgactacaatagcattgtgctattgcatgcaagagaaacagcattgttaaaattgtttatgtaatttccatgctgtttgcataaaaatggtttcatgaagtgtttgtttggcacccgctctgtgaagagcattgtcctcggtggtgtgatgtacaatataaacagaatataaacagaaatcacgggcactcagtaaatatttgttgaataaatgaactatacagtttgttttatccttatagtagattcagttttttatacagagaaaaagatggttttttgtttttgttttctgccaggtggaacacctacataatttcattttgtttcggttttcaatgggcttcattgatagtattattgccaaatgtaagtatattttgaaagagatgagatttgtggaaaaggtgaaatactgttactgttttaaatcttacctgtttggtttcagaccttgccactgttgttggttacctagttgtcagtcgccctttcttagatttgtctcatcctcgacatctcaagagtacacattcggaacttctagaggtaaactgatgataatacaatgaaaatgtaacagtaaaaataaagccaaatttttagtcatagaaactataagtaaaaactaatatttatttctatttaaggattactaccaaagtggaagaatgcttttgcgaatgtctcaagctctgggtcgaatagttttggctgggcgtgaaatgactagattggccgggtaagattagtaataatgagctgttgcagaaaataatttttaaaaatatattatccttaatgattgtatcagttgagattaagataaggggtcaacatttcctagcccaggaaggtggttttgatagaaaattaaggagatttttctgatggtgaacttttcatgtttcttgaggacagctggtttgcgcagtacagtagattagaggctgtcaagttgtttgctccatggacacgtatttgctaagttgggaaatgttgaatcatggcagtcttaattcacagaaaactatgtttatgaatagaattttctcatttaaattttcttgtcctctaccatacctttttttcttggatcttagataccggcaacctagcaaaacagatgaatagaaatgaagttgactttaatgggaattcaaatgagatgttatcttgtatctgtaggcgtgcttgtgaatgtagtcatattatctagtagtaaaattatctttagacagtagaatgaaattaaatattaagatttcagtatttcaatctccaatataaagggcatggtatggtgtaaaaaacaccataaattttaggtcacctgaagaagtttgatgactgaatatctttcctaggcctgtgatccatcttcatatttctctttttcctccttcttagctcctgtggcagttatggtcttcatgcaatatagaagttgttaactactatgagtagagtctctttcatgagaatactaacattcttcctacttgttaacttttcttatggctttacagttcatggtatataaggtgcttctgttcctttagggtgtttcctttcactctctctctctctctctcgctctctttctgtgtgggtgtgtgtgtctttctctttcactccctcccttcgtctccctgcccccctttctttctcttttttccactttgttgaggtatgattgacatataagaaactgttcatatttagtgtatacaatttgatgaatatgggaataagttatacacgtgtgaaaccatcaagaccataaacattcatcacctcccaaagtttgctttaggaggtttctgctttttattcagagaaaaatcctgttttcttcttcgatgcagaatactttctctttggcgatcatggtcatttttgttatctccaacctcttgtcgttagttttgatttttctctattgccacagtgatttctatctaataataagaactcatcatctttcccctcttcagagtaagaaagagggaatctttcagattcttccgtttgcaggaaggcagcatgcattcggcatacatttaataaatgccttccttggatagaaagaccagctttatacatggctttataggtcacttcagcaagagatcagagtccatacttcctgggtctaaggaatatactagtagtggtccttttgtagtatccaagagaaacctcctgaaaattctcagcaaataactgccttgacttggctattaatgaagtatctgttgagttggggatcctatggaaacctcttccttcatccctatattcctgctctcctactgaaacataataaagcacacgttatcattaatactttatgttgatgagactgttaggttacttcatttatactaaattataattttaggaacttcagtttgtataaaataaaagatgtgacaatagtctggagttttgattatggtttccttttctaaaattttagttttactgctcggattacagaattaatgcaagtactgaaggatttaaatcatggcaaatatgagcgcacaatggtctcacaacaggaaaagggtaaatatgagtgtcacagtttaaggtcacaattttaagtgtttgctgacataatatgatgctttaatacctattttccatttaaggtattgaaggagtacaagtcattcccttgatacctggtgctggagaaatcattattgcagataacattataaagtacgtacagaaaaaggtcttttagcaccataaatgtttgttaaacttcatagtagtctttctttttcagcttacaattgcttagtgtttaaaattatttctgcttttttaaaaaacagcttagaggtatcattgacctaaaaattgtgtatattaatatttaaagtatgcaacttgatgctttgatatctgtgtatgttgtgaaatgattacgttttggctaattaatttacctatcgcctctacatagttaaccatttttgtgtgtgtttagtgagaatttaatttagatgtgtcttagcaaatttcaggtatacaatatagtattttctactattgtcccagtacagtggatctacagaatttattcttctggcatcactgaaatgttgtgccatttgaccaatattacccccatttcctctctctctaaccccctggcaaccaccgtcctactctctacttctatgagtttgactattttagattccacatacaagtaagatcacatagtgtttctctttttgtgtcttgcttattttgcttagcataatgtcctccagatccatctatgttgaaaatggcccagtttccttcttttttaaaagtggggtaatattctattgtgtgtattttgtgtgtatgtgaatatatacacactgtacacactatattttctttatcctctcatcagttgaaagacatttaggcagtttccatatatggactattgtaaataatgctggagtgaacatgggaggaagattctctttgagatactgattttatttcctttggaaatgttcccagaagtgggattgctagatcatacggtagtcctaattttaattttttgaggaacatccatattgttttccataatagctgtactatttgtagtcccaccaacaatgtacaaggtttcctttctccacatctttgccaacacttaccgtttgtctctttgataatagtcatcctaacaggtgagaggtgatgtctcattgtggttttgatttgcattttcctgatgactgagatgttgagcaccttttcgtatgcctgttggccatctgaatttcttcttttaagaagtgtttaagctctttgcccattttttaatcaggttatttgtatttttggtattgagttgtattagttccttatatactttaaagtaattctctttttaaaaatttcctctataggtttgatcatgttcctttagcaacgccaaatggagatgttttgatccgagaccttaattttgaagtaagtttttaaatgatcatataaaagcttaaatcatctttaaaatgtgaactgaaaaagattacctgaatatttaaagtaactttaaggctcgacttagtctctgaatccacagaattgctttaaaaagtaagtctttgaaacgcttagaaatctatttttcttaattgacaggacttcaaaatttcaaatactactaccaaaaaactttttgcaaatgaagtttatgtcaagaaagtcatagaaaatatagtaaattggagtctccagtgtaaaatgagtatttaaacacacaaatataattttagtctctttacattaaaaagaaacttatggtgtggctggtattgttgtgactgtacaggatgatttgtacctataaaaacaaaatacagactgttttattactgatgaaaacgggaagagccgcacagtagcgctacaaatagacactcacctaaaacaagtaaaatcccatgccaagtgaaaactgatgttgattcaatatactctgctaatgaaatgggatatggcagaccaaattaaaaagaaaagacaaaagatgaatgtttttgtacgatttgtaagactcgcagatttaagggttactatttaggttttctctatgttgtggctttatgaatggttcagatccagaaatcttcataattagtaacaaattcctatcacataggctatgttccccattctagacaccattcctctagaacaacactttcccgtagaactttctgcaatgatggaaatgctctatactttcactgtccagtaaaataaccatgtgtagatattgagcatgtgaaatgtgactagtacagctgcaaaactgaatttaaaatttaatttaattaatatgatttaaaattaaatagccacatgtgagtagtggctatggtattggacagcacagctctagaattcctctccacatgctaatgtgcatggccatctgtagtttgtgtttcatgtggggatttttttcctactgctttctttgaaggaatattgtctgatagtttataaaataaagaatataattattggacttgtttttaatttgttacagtcttaagtaagtcttcagttttctgctcttagtaatttatattaagcacatgtctactttcttctcaatgaattataaaaatgaaaattgttagttatgcaaagtactttgaacttattcaacaatgagtattctatcgttatcatatttattccaaagccaggaaatacaagaagtacagaaaatgtaaatgtagttggtaaatattgactggctccacatatcacagaagtgttttctcacatagctccaggtacttcagtcacttgaatgttcctttggcaaagtaggtagccaggcttgatttccagtagcccctttattgccactgtccaaggataaaaaggacgtgagacttcgttgaagaatgcctcttgtccctttctcctacttaccctcacttctgtctttatgcagaaataaaatataccaataatataggggcacacatgactgaagcacaatgagaaagggggttgggatacttagaatagatggatcatgattatggtccataataatattttgtcttgatgttaccacactaaagctgtcactttctttttagttcaaagccttttcttttaaagcccttatgtttgtattgaatagacttctgtcgtttctataatttcacttttatagtcttaaaaatgtcctagaagaaaacctaggcattaccattcaggacataggcatgggcaaggacttcatgtctaaaacaccaaaagcaatggcaacaaaagccaaaattgacaaatgggatctaattaaactaaagagcttctgcacagcaaaagaaactaccatcagagtgaacaggcagcctacaaaatgggagaaaattttcgcaacctactcatctgacaaagggctaatatccagaatctacaatgaactcaaacaaatttacaagaaaaaaacaaccccatcaaaaagtgggcgaaggacatgaacagacacttctcaaaagaagacatttatgcagccaaaaaacacatgaaacaatgctcaccatcactggccatcagagaaatgcaaatcaaaaccacagtgagataacatctcacaccagttagaatggcaatcattaaaaagtcaggaaacaacaggtgctggagaggatgtggagaaataggaacacttttacactgttggtgggactgtaaactagttcaaccattgtggaagtcagtgtggggattcctcagggatctagaactagaaataccatttgacccagccatcccattactgggtatatacccaaaggactataaatcatgctgctataaagacacatgcacacgtatgtttattgcggcactattcacaatagcaaagacttggaaccaacccaaatgtccaacaatgatagactggataaagaaaatgtggcacatatacaccatggaatactatgcagccataaaaaaatgatgagttcatgtcctttgtagggacatggatgaaattggaaatcatcattctcagtaaactatcgcaaggacaaaaaaccaaacaccgcatattctcactcataggtgggaattgaacaatgagaacacatggacacaggaaggggaacatcacactctggggactgttgtggggtggggtcctgggggagggatagcattaggagatatacctaatgctaaatgacaagttaatgggtgcagcacaccagcatgtcacatgtatacatatgtaactaacctgcacattgtgcacatgtaccctaaaacttaaagtataataataataaaattaaaaaaagaacaataactaccctgtattaaaatacatcaaaatgtttaaattaatgagtttattatgatactcattatgttgaaaagtgacaaagggaaaaaaatgtctttaattctttctcttttttgggtttcatttggaaagtcttgagtccccacttatgtccttacttgttggagtgttttacttcataaccatgttccttacttcctggtgtttatcctgtgattcttgttttctcctcccctgggaactgtttctctgacttctttttggttcactgttatgaattctaatctctttctgacttaaagtattctaaagtagacctgggtttctcacattcattatgtctttttattgtttttcttaacatagcctttctataatcaacaaatgttcttcagttctttgcagcctctaattattttctactcatctggcttacttgaaaataaagatttctttctcttggaaagaggcataataaaacagacttggcccctcaaataaatctttcctactttatgattcatttgccttttgggttacatttgtaaccaaataataaaaacttctttggaataagagattttataccattttccattataaactccccagtacagacatatttatctgtctagatattattctgggaagtatgtagactggagagatcctaagaggtaacagcttgcaggttaccatgtggggattaaaatagtactttgtccaaggtgggcggattgcttgagctcaggagtttgaggccagcctgggcaacatggcaaaaccccgtctctgtgaaaaatacaaaaaaattagctaggtgtggtggtgcacacctttggtcctggttacgcaggcggctgaggtgggaggatcgcttgtgccagtgaggcagaggttgcagtgagcggagatcgcaccactatactccagtctgggctacagagtgagatcctgtctccaaaaacaagtactttgtaagttactaagatttttaccttttcagtaaggtatacttatagtgtttaaagaaactaattaatcttcataaacaccatacttttatataatttttcttttacttaaatttatgtgtagaattttttatttgttatgataaatttatagaaagtaggatttatcaaggagtattatttggggggtatatttttattggtaagaatatggtagttcaaagcattggttgatccggtaaagcattctgagagccccaataatacaatgctgttaagaacttaattttcagtaaatgttactcttggcttttagtcttaatttaaccccacaaaaatatgtacttaataaatttttaatacagaaaaattatcactggcttatcatggctgacgtcataattggaagttttgttcaacactaccaaatgccgtgaagtaaagaaaagtgaatgctgagtaggttagccaggcttgatttagagcataaaaggataactcaggatttcagtaagtctggttattatttatatacatcattacaaatctgtttttggggtttcctggcatactgcaacaaataatgtggaagggtattattggaggcaggaatattgatgccattgtaaaccacaaagagcagttaggaggggagaatttatatacggccaacattactcaaataaaacgtagcagggaaccatttaattaccagctcactgaactttaggaccttctaagggcatcgctgttacagtagagtatgattattttatatgataaccttgctttatgaggaacattcagtatattcaattttatgtgataaggaaattgtgttatttaaaaagaagtctatcaaaatgattctttatcagaaaaaagtttattcatctgaacgactctttaacaattatgtgtgtaaattgttattttcttttagatcaactatgtgttaggctgcttcattcttttttctttaagaagtttttaaaatgtaaaaatgaaatttggctttttaaccatttctaagtgtataatttagtggcattaagtacatttacagtgttatgcagccaccaccactatccatttccagaacttttccatcatcccaaatagaaactctgtactcattaaacagtaactctccttccttcctctcccttgcccctggtaacctctcatgctgtctgtctatgaatttgactgctctaggaatcacatataagtgaagtcatacagcatttgtccttttgtggctggcttatttcatttagcataatgttttcaaggttcatctgtattgtagcatgtgtcagagtttcattcattttaaaggttgaatgccatttcattgtgtgtgtgtgtgtgtgtgtgtgtgtcacattttgtttatccattcatcctcttgggtcgcttccttgcttccaccttttggctattgtgaacaatgctgatggctctccattttgtcacagtaaaagtcgaagttctttcaatgcctgccactaccctacccctacctgatacatctctgatctcatttcctactattcttctttcctgttcattcttcagtaaaatcagccttgtttctgtttttttttttttttttttttttttttgaataggatagctacattcctgcttcagtgcctttgtaccagcaaattttttttttttttttgagacggagccttgctctgtcgcccaggttggagtgcagtggcacgatcttggctcactgcaacctctgcctctcgggttcaagcaattctcatgcctcagcctcctgagtagctgggattacaggtgcccgccactgcatccagctaatttttgtatctttagtagagacagggttttaccatgttggccaggctgtaccagctttttatgggtggtaaaggtgggggctagaacagtcttcttttagttaaatcctaattcaccccttctttcaaagttttacttagttgtcatattcaataaagtctgctctgaccaccttaaaaatgcggctttcctcacccgctcccaagttccctttgtctgttttttcctccaaagtacttattttctaatatactatttaacttatatgttatgtatattctttattgtatgtctcttaccactagaatgtaaaccagtaagggtagaggtttttggttttttgttttcattttttgtctctttaattcattaatatggcctacttgcctagaacagagcctgacagagagcattcaataaatattcattgaattaaataataggaacagaaggctcaccagcttaacaaatttgttaaaggcaggttaccagctagggtaactcatatctttctgatattttctttcctattgtgttgcattggtgtttagtgttgtaagctagaattatagctaagattttctgattctttacagagttgatcagatacttacaagatcataagcctagaacttaaccactctttacattttctcatttatctttatgttgttgcagaataatttagtgacacttgtatatatttatagtgcacatatattttgataaaacacttataatttctaagaatggaatctacagaaacattgcttactgttacataagttgctgacttgtacactcattgcaatattatctagaagagcaaaacaaaatgcagatgacctaaatatttaaccaaaggggagtgtttaaataagttatagtatatccttactatggaagatgcttgaggcattaaaggaaaggaatgggggaatctgaatatactgacctggaagaatatctgtgatatattgttaaataataaaagcaagttgtagaacagtctatagagtacgttttcatttttttaaaagagactgtgtatacgcatgtatttattgttttcaagaattctcagttttctaaactttatctctctttatcttaagttgatgatatcaatcagtcagtaaatttatttatttatacatgtatatagatggggtcttgttctgtcagcctaggtgacatcatagctcactgcatccttaaactgctggactcaagcaatcctcccacctcagcctcccaagtagctggggctacaggtgtgcaccaccacacctgcttaattttttatttttattttttgtagagatgagggtcttgttttatttcccaggttagtctcaaactcccagtttcaagcgatcctcctgccttagcctcccaaaatgctgagattatgggtgtgagccacagtacccagcaataataattttttaagtgaaaaaaaagtaatggtaaaaattggaagtaaacaaagtaaaaggtcccttcacaatacctcttcactgctctacctaatgctacatttacagacaaatagaaggcttataattagccaggagctattaatatttgagtctaaggaaatgttgattaagtatatgttaatttgatttaattacttcacagactgatttttttttttttttcaggttcgatctggggctaatgttctaatttgtggtccaaatggctgcggaaagagttcacttttccgtgttcttggtgaagtaagtacaagttggcctcaaaattttgcagtcttattttgccatactgtctaccactttgtaaattttacaattgttcttctcccttctctctctttaatagttatggcctctttttggaggacgtctaactaaacctgaaagaggaaaattattttatgttcctcaggtaagacctagcttgagttatctttgatctaaagatctttttgtttatttattttttcatgttgcttctaattgacttttgctctactactgtcagagaccttacatgacccttggaacacttcgagatcaagtgatatatccagatggacgagaagatcagaaaaggaagggaatttctgacctagtaagggaatgtttatatcctagatccactgaaaatactccagattatttattttaatcaattaagtattttaaatgccaggtagtttatcttaagctgtaaagccttccaaagctgtaaattgtgattttctaagctgaggtaagatgttaatcccttggcttaaaaagagtttaatcttaacctttacaccattgtttgttttctcattgccatcatccttttactgtgtacaatagtgttattctctttaagctactagacatattttgtcaagtttggtgtagatactaggagctgaaaggttcagggctaccttgtgccacattcttttctgaaatgtatcttttaagtggtacagacaatagaattatagtgattccagtttaaaaaataaaccactattaagaatgttggcttatattaagtttaatttcatctttaatcattttgctgaaaggtactgaaggaatacttagacaatgtccagttgggtcatatccttgaacgtgaaggaggctgggacagtgttcaggattggatggacgtactcagtggtggagaaaagcaaagaatggcggtaagtatactgtgaagaagttgcacaagaatgcaactggttccagcattttgattaatcaggacacaaagtttcatcttatatttttttattcagcagctgtttcagtatggattagtttaaattatcataaaagtgcttgaaaatctttaacttgcatgtaaatttggaattctgaaaaattcataaataccctgccagtatctatgaaaggaaaagctgcagatccgactatataccaataatccatttttctaaaagttcagagaaactctgtagctcattattcctgggatataaggtaatcctggctgggttatgaaatttcttctcatgtctcttccctatagacatctcttttgtatcactcaggctattctttctgaaatagctgaaggtattagaaacgatccattcaaattttatctttattctgttcttgcccttttcctccactattatatgtatgtttttgtttcaaggttcagtatctactacttaaagttacttagaatttttaagttttcctaatataaacaagcatttgaaagaaactactttaattgttatgatgactaaacttgtctcaaaccaaaaatatgcgctaaacactacgtagtaagaatgagaccagcctgggcaacatagcaagaccctttctctacaaaaaaaaatttaaaaattatctgggcgtagtggcacacacctatagtcctagctactgggaggcggaaagattgcttgagcccaggagtttgaggctgcattgggctgtgatcacacaccgtggcactccaggctgggcgatagaaggagatcgtctctctaaaaataaataaataaataaaaatttaaaaagaacggtagtttgggtaccttgtcaagaggggcaacttcataaagagtcattttttaactatatatttcatagtttgaatagatccaagcaagagattctcctctccccctgcagagtatggagattagagaaaactgtagctaaggaaagaaagcaaaagaaattggcttatggcagaatttctgacccattatattcaggttatattccacctttttgttacctccgagtccctgattttgcaagttgtttttcccaaaatcatacccactctacatgaggttaatattaacctaatagtgtgacttgcctggctagtgctataacgtgagatgaatctagtgtgaagagtaaatcataaatgagagagataatagctatattcaaaatggaaattaggctgaaggagtgaaaatttgaaatgattaggcatttctagagtcaatttagaagatgactatagaaataactgcaaaaaagagctgcaaaataactttaaatttctgtactatgtcttcagagaaaatggaaggatgtggttcagaaatggacacgacggaaactcagagaatgaataatgaatgtacttaaaccaaggaacagtgtgtgtgtggtataaaagtacaggagggataattttgatttgaagattaggaattcaaaggcgtgcccagagcagtggggggctgaggcgggagaatcacttcaacccgggaggcataggctgcagtgagccaagatcatgccactacactctagccagggcaacagagcaagactctgtctcaaaagaaaaaaaaaaaaaaaaaaacacatgatccataatagaggcgtttgggaaatggggaaagctcacctgtgacaccactgcatatataactggagcatggccaagccattgtctagagaattgaatgtgatgtgtaaaagagagcctgttgttttgtttcagagggtggaaaggagaaggctaacgctacaaatactaacgttggtgaaattaggtaaagattatatatgtgtattcattttactgtcctttcagttttttggtaggattgaaaattaccaaagtagaaagttgaggggaaagtaggtattagaatttttaggaagaacagacctaaaaggcctagccacttagaacagtgagtcagccagggttgctccagctaatgtcacaatttgggatatcttgtgtttctgaccaaaagttatcttttccactccatttttcttgctcttcctatttagtaataacttttcttattttgaattatgaaaaagtatatatgatggaaaagtggaatatttatttaagtataaattgggccaaacccctttaccagagataccactgttataaaatttttagtgtttttttaatccatttttgtaaatctttttttttttttaccttaaattagcaactatccccctttctcaaattccctgagatctctagaatattaatccttccctttccttacaattgttcagtccttttctgtctctgcctcctttcctgtccagtacagacttcataatccagggtgtggcccataggagataagatatatttcttaaggaatgaacagttcatcccttccccttaacttcctttcccactttttgtgtcatcgtattacctaaatcccagcccagttatttgccttggcacttctctaaccgctcttctgagcacagctaaaaaacatcagatgggctcacagcatggcttagcaatcattttacttatttttatccttctctcatttttcatgacaatcattttaaaactaccaattttgggttttctaccccgttacttaacccactgcacttggcagaataactcgccttctacttttcaaagaaagataggctattatttcaattaaatgacagctaatttttattgagtgctgaaaagatgacagacagtatgtcaggcaccttacacaggtgatctcatttcatcctcacaacagtcctgtgaggtaagaactgggaatgcccccctagtttttttttttttttttgagacagagtctcattctgtcgcccaggccggagtgcagtggcacaatctcagcttaccgtaatctctgcctcccaggttcaagagattctcctgcctcagcctcccaagtagctgggattacaggcatgcaccaccacgcctggctaatttttgtatttttttttgtagagatggggtttcaccatgttggccaggctggtctcgagctcctgacctcaagtgatccacctgcttcgacctcccaatgtgctgggatttcatgcgtgagccgccgcgccccattttacagaggaaattgaacttttgtgcaattcagtagctggccaagcaaagacagctagtaaatgttaaagctggtggtgggggctttgtcaggcttaggcaagcagtatggctgcagtgtgcatatgcttattcactttacaacaagcttgtccaacctgtggctcacggacacatgcagcccaggacagctttgaatgcaacctaacacaaattcataaactttcttaaaatcttatgagatttttttgtgtgtgtaattttttttaagctcatcagatatcgttagtggtagtgtattttatgtgtggcccaagacaattcttattcttccagtgtggcccagggaaaccaaaaaattggacactcctgctttacaactttcttgtattgtggcattaagtagctgacagcatagtgggagcgagagagacacatgttgagaaaatgtccatgtcatgtagtaagtgtggtgatgaatgtacgcagagagtcctttgggagcagagaggagaggcattggtggaatgccctcagataaccattcctcttaattaactgtgtgctgctctgtcctgacctccctacttccgctgtcttggaggatatgtcatccttcttgagaaaggcaaatacttccatctatgtttatggagcctctgtcttctgactttatcacatccttttccttcagttatatcccctcccgcagcccccacctacatttaacctcttctagtccttctcttgtggaaagacatttttcaggtctctttgatctaaaaagcaaactctgccttagccaaagcttctctgtgatctgtacctttcattttctgcacagttgaacttcttcatagtctatacttgctgcctccccttcctcacttcatgcaaacaggtggaaagctgttttagtcattcatttattagatagttgaatgctacccatatataagtgtcaagtacatggtagtgattaaaacagtctctgcttttctgaattttttttttttttttgaggcagtctcactgtttcacctaggctggagtgcagtggcacaatcttggctcactgcaaccttcacctctcaggtacaagtgattcttttttttttttttttttttttttgagacaaagtctcactctgttgccgaagctggagtacactggcacgatctcagcttactataacctccacctcctgggttcaagcgattctcctgcctcagcctcctgagtagctgggactacaggcacgcatcaccatgcccagctaatttttgtatttttagtagagacagggtttcactatgttggccaggcttgtcttgaactcctaaccttgtgatctgcctgcctcagcctcccaaagtgctgggattacaggcgtgagctgctgcgcccggccaggtacaagcaattcttgttcctcagcctcccaggtagctgggactacaggtatgcaccaccatgactggctaatttttgtatttttagtagatacgaggtttcaccatgttggccaggctagtctcgaactcctagcctcaagtgatctgccctcctcagccccacaaagtgctgggattatatatgaagtgcttcagaggtgttacagaaaggacccacttggattgtggctagggatgagggtaggtttgcctgagatgacattataagcagaaatctgaaagctctaaggaacagaataaggcatttgagacatcagaaaagaatgatgtgtgtttaaggctctaaggtgtaaagcaccttgttcctagcagttgagaggaggcggtgttggctagaatgttggggttagagcgtgagtagaaataagattgtgcaggtcttgtagactgtggtaaggagtttgagttttaagtgaaatgggaagttgttgaagggttttaagccagagagtgaagttccctgattgacatttgtgaaagatgttctctggttacatggagagtggactggagaggagcagcagaagtggtaggaggctacttgtagtctatccagacaggagatgagtgtgctctgggctaagggcatgtttgtggagatgaggaaaagtgagtgaacttgaaacttcacatttctttcttgaatggactttttagttcattttaaaaatagctgtgggagagtgaaagggaagaggaaaagggaaggaccagaccagggaggactcctggctttctagctggagcaactgtttgatagtttcatttgctgaagtgttcaagattagggaagggaatggattttagagggaaaatctagaaattacatttgagttttagacttttaacgtttgagagtcctgtgagatacccaagtagaaactcaaagaggaatttttatttttaattttttaaatgttttaaatttaaaatgtttgttttttgagatagcgtcttgctgtttcagccaggctggagtgcagtggcctgatcatagctcactacagccttgagccttgacctactgggctcaagccctcctgtcttagcctcctgagtagttggaaccacagatgaacaccaccatgcttggctaatttttttttttttttttttttttaagagatgtggtttccctgtgttgcctgggctggtttcaaactcctgatctctagcaatggctcctgcgacaacctcacaaagtgctgggattataggcgtgacccactgtgcctggctgatatttttatatatctggaaatttgagaagtatgagtgagagatgcatattgcaagtttataaaatgtaaatagtatttgaaatcagaagattggatgagatcactgacagaatacaggaaaaagaggaggagacctagaaattagccctaaggagctcctgtatttaatggtcgagtgaaggagaaagtgctagaaaagaagctgagaaaggatcctcagaagtaggaggaaacttaggtgcatggtttcactatcactttctcaagaaggatggagtggtcttctaaagagaatgttgcagagaaggtaaattaaggatagaagagtgccccattggtcttaaacatggagatcttgtcagggggcagatgacaaaaattggaatatctgttagacaaaaggtcagaatatacaatccccagaaaatacatgggaacataaatgtaggaaaatgttcatcattcctgatagtcaaagaaatgtatgctataattttgatgttaattttcatttataaaattagcaaaggcttaaaaaaatgagcacaaccagaactgacaatggggatataaaacaggtacaataaaaattattggtgagaatattaattggtaccattacttaagcaacaaaatatttaaaatagagacctttttgcgtcggagtcatctagtctgaattctgagatttggttaaaatatgtactctgtaatcttatttgtttagtgagctttctttaatactagtttgaaacttcctctctcatcagtcttaaggtttgtgttttactctgagcaattagtatttcccatgaagtacgtttttccctttgttcaggatgacagcaaaaacagttatgtttatattgtttctatttctgggaagtagattttttgaattagaataatttttatacttttgatttacaagactacaaatgcatatttaacataagtttgtttcggcttactaattttaggtctgcctgtgttttacacaaaaaattttttttatgcttcagatggcaagattattttatcataaaccccagtttgccattttggatgaatgcacaagtgcagttagtgtcgacgtggaaggctacatttatagtcattgtcgaaaggtaagtacgcaggtgctcagtttgaggagccatggcctcctacctagtgtaaactatgtccaaatctgtccaaagagaagattccaggtcactaagtaacaaaatttctaccaaaagatttcttgttttaataaagatttaaaacatatgaataaaagaaaaagaattataaatacagttctgtatataattctctttatatatgggaaatagatttaaatatgttgttttatataagtgagatataaaagatatatataaatgagatacaaaagatatctcatttatatataaatgagttacaaaagtttttaacttttatgttaaaagatttatttatttattttttaatttattattattatactttaagttttagggtacatgtgcaaaatgtgcaggttagttacatatgtatacatgtgccatgctggtgcgctgcacccactaactcatcatctagcattaggtatatctcccaatgctatccctccccccttcccccaccccacaacagtccccagagtgtgatgttccccttcctgtgtccatgtgttctcattgttcaattcccacctatgagtgagaatatgcggtgtttagttttttgttcttgcgaaagtttactgagaatgatgatttccaatttcatccatgtccctacaaaggacatgaactcatcattttttatggctgcatagtattccatggtgtatatgtgccacattttcttaatccagtctatctttgttggacatttgggttggttccaagtctttgctattgtgaataatgccgcagtaaacatacgtgtgcatgtgtctttatagcagcatgatttatagtcctttgggtatacacccagtaatgggatggctgggtcaaatggtatttctagttctagatccctgaggaatcgccacactgacttccacaatggttgaactagtttacagtcccaccaacagtgtaaaagtgttcctgtttctccacatcttctccagcacctgttgtttcctgactttttaatgattgccattctaactggtgtgagatgttatctcactgtggttttgatttgcatttctctgatggccagtgatggtgagcattgtttcatgtgttttttggctgcataaatgtcttcttttgagaagtgtctgttcatgtcctttgcccactttttgatggggttgtttgtttttttcttgtaaatttgtttgagttcattgtagattctggatattagccctttgtcagatgagtaggttgcgaaaattttctcccattttgtaggctgcctgttcactctgatggtagtttcttttgctgtgcagaagctctttagtttaattagatcccatttgtcaattttggcttttgttgccattgcttttggtgttttagacatgaagtccttgcccatgcctatgtcctgaatggtaatgcctaggttttctcctagggtttttatggttttaggtctaacgtttaagtctttaatccatcttgaattgatttttgtataagatgtaaggaagggatccagttttagctttctacatatggctagccagttttcccagcaccatttattaaatagggaatgctttccccattgcttgtttttctcaggtttgtcaaagattagatagttgtagatatgcggcgttatttctgagggctctgttctgttccattgatctatatctctgttttggtaacagtaccatgctgttttggttactgtagccttgtagtatggtttgaagtcaggtagtgtgatgcctccagctttgttcttttggcttaggattgacttggcgatgcgtgctcttttttggttccatatgaactttaaagtagttttttccaattctgtgaagaaagtcattggtagcttgatggggatggcattgaatctgtaaattaccttgggcagtatggccattttcacgatattgattcttcctacccatgagcatggaatgttcttccatttgtttgtatcctcttttatttccttgagcagtggtttgtagttctccttgaagaggtccttcacatcccttgtaagttggattcctaggtattttattctctttgaagcaattgtgaatgggagttcactcgtgatttggctgtttgttgttggtgtataagaatgcttgtgatttttgtacattgatttttgtatcctgagactttgctgaagttgcttatcagcttaaggaaattttgggctgagacaatggggttttctagatatacaatcatgtcatctgcaaacagggacaatttgacttcctcttttcctaattgaataccctttatttccttgtcctgcctaattgtcctggccagaacttccaacactatgttgaataggagtggtgagagagggcatccctgtcttgtgccagttttcaaagggaatgcttccagtttttgcccattcagtatgatattggctgtgggtttgtcatagatagctcttattattttgagataggtcccatcaatacctaatttattgagagtttttaccatgaatggttgttgaattttgtcaaaggccttttctgcatctattgagataatcatgtggtttttgtctttggttctgtttatatgctggattacatttattgatttgcgtatattgaaccagcctttgcatcccagggatgaagcccagttgatcatggtggataagctttttgatgtggtgctggattcggtttgcgagtattttattgaggatttttgcatcaatgttcatcaaggatattggtctaaaattctctttttttggttgtgtctctgcctggctttggtatcaggatgatgctggcctcatgaaatgagttagggaggatcccctctttttctattgactggaatagtttccgaaggaatggtaccagttcctccttgtacctctggtagaattcggctgtgactccatctggtcctggactctttttggttggtaagctattgattattgccacaatttcagctcctgttattggtctattcagagattcaacttcttcctggtttagtcttgggagtgtgtatgtgtcgaggaatttatccatttcttctagattttctagtttatttgcgtagaggtgtttgtagtattctccgatggtagtttgtatttttgtgggatcggtggtgataatcccctttatcattttttattgtgtctatttgattcatctctctttttttctttattagtcttgctagcagtctatcaattttgttgatcctttcaaaaaaccagctcctggattcattaattttttgaagggctttttatgtctctatttccttcagttctgctctgattttagttatttcttgccttctgctagcttttgaatgtgttttctcttgcttttctagttcttttaattgtgatgttagggtgtcaattttggatctttcctgctttctcctgtgggcatttagtgctataaatttccctctacacactgctttgaatgcgtcccagagattctggtatgttgtgtctttgttctccttggtttcaaagaacatctttatttctgccttcatttcgttatgtacccattagtcattcaggagcaggttgttcagtttccatgtagttgagtggttttgagtgagtttcttaatcctgagttctagtttgattgcactgtggtctgagagatagtttgttataatttctgttcttttacatttgctgaggagagttttacttccaagtatgtggtcaattttggaataggtgtggtgtggtgctgaaaaaaatgtgtattctgttgatttggggtggagagttctgtagatgtctattaggtctgcttggtgcagagctgagttcaattcctgggtatctttgttgactttctgtcttgttgatctgactaatgttgacagtggggtgttaaagtctcccattattaatgtgtgggagtctaagtctctttgtaggtcgctcaggacttgctttatgaatctgggtgctcctgtattgggtgcatatatatttaggatagttagctcttcttgttgaattgatccctttaccattatgtaatggccttctttgtctcttttgatctttgttggtttaaagtctgttttatcagaggctaggatcacaacccctgccttttttttgttttccatttgcttggtagatcttcctccatccttttattttgagcctatgtgtgtctctgcacgtgagatgggtttcctgaatacagcacactgatgggtcttgactccttatccaatttgccagtctgtgtcttttaattggagcatttagtccatttacatttaaagttaataatgttatgtgtgaatttgatcctgtcattatgatgttagctggttattttgctcgttagttcatgcagtttcttcctagtctcgatggtctttacattttggcatgattttgcagcggctggtaccagttgttcctttccatgtttagtgcttccttcaggagctcttttagggcaggcccggtggtgacaaaatctctcagcatttgcttgtctgtaaagtattttatttctcctttacttatgaagcttagtttggctggatatgaaattctgggttgaaaattcttttctttaagaatgttgaatattgtcccccactctcttctggcttgtagggtttctgccgagagatccgctgttagtctaatcggcttccctttgtgggtaacccgacctttctctctggctgcccttaatattttttccttcatttcaactttggtgaatctgacaattatgtgtcttggagttgctcttctcgaggagtatctttgtggtgttctctgtatttcctgaatctgaacgttggcctgccttgctagactggggaagttctcctggataatatcctgcagagtgttttccaacttggttccattctccccgtcactttcaggtacaccaatcagatgtagatttggtcttttcacatagtcccatatttcttggaggctttgctcgtttctgtttgttcttttttctctaaacttcccttctcgcttcatttcattcacttcatcttccatcactgataccctttcttccagttgatcacatcggctcctgaggcttctgcattcttcacatagttcttgagccttggttttcagctccatcagctcctttaagcacttctctgtattggttattctagttatacattcttctaaacttttttcaaagttttcagcttctttgcctttggtttgaatttcctcccgtagctcggagtaatttgatcgtctgaagccttcttctctcagctcgtcaaagtcattctccgtccagctttgttccgttgctggtgaggaactgcgttcctttggaggaggagaggcgctctgctttttagagtttccagtttttctgctctgttttttccccatctttgtggttttatctacttttggtctttggtgaccgtgatgtacagatgggtttttggtgtggatgtcctttctgtttgttagttttccttctgacagacaggaccctcactactgatttcttctcttctttcctccctttttcctttttttccttcctaaatgatatagaaattttaggtagtcatgtaaaagatatctcattgatatataaatgagatataaaagatacctcatttatgtaaaacaacatatttaaatctctttataattctctttatatatgggaaatatatttaaatatgttgttttatataaatgagatataaaagataaaagatataaaagatacctcatttatataaaacaacatatttaaatctatttcactttacctcattacttagagttaataaactgaccttttcttaatttttccattaactttatctaaacattagagtttttttatgaataaaactcaacaataattatttggcaatttttaatttatccgttttattttctagcctgagcaatattttaccaaagctgcttttagtagctaagtctgaggctatctttattggttccattctttaagtaattattcaatagtatcagttttctttctttgagaaattgttaccaacatctatactatggttaaattttggaacaaatgtagtatatcctagctgttttatagtttctatataagtaaatgaggtagatgaggatttttaacattttgtatgtgttctttgggagttctcaataaataaaaaaggtcatattgagtatatatattatgaattcctactattccaagtgtgttcatgatcagcagcagcagtgtcacctaggggtttgttagaaatgcagaatttcaagccctgctaaatcagaatctgcattttaccaaaattctaagatgattcaaatgcgcattaaagtttgagaagcactggcgtgatgatgaaagaatttgctattctttgtagaaagattttaactactgattttatcttgttaatgatttattttctattcttgaatttgctttggtaatatataattatacatttgttcatgttggttttcaaatatataggtattagagatgtttatggtattctcatgtacataaaaccatgtagtctgcagttgattcaatgacatagcagctctttgctggtaattttgaccacgtgatttcctcttatgctctagctataggcttgaagtccccacataagactgtataaattctataaaacatcagttccatttaaaagaaaattcatatggggcctcattgataatttaaattactgtgataccacttaaacatgtataaacatgatgaggtgtgaattccttaagcttagagctcttttacagctacaaaactaatataaacttacacattaaatacattaaatacagacaaaacttaaatacagtttcaaatttacaacattaaagagacctatgataccgtttagatgaaactaaaccagtggtttgggatttaattaaggaaagatagaatctgaggttcaaatttcattattttgcattttgctttttattttgacttatatacttcatatattttttatatcctcatgtaaagaatgtgtgcattaagtagatgtctaatccaattattgtagtatcataaacagagaaataatatcttaaatgagctctgaaaaatcagaaaagtgtggtatggttgaaatatatgttttattaatactgataatatgcttattttattatgcaattcctaaccaatttaagaacctttttacagtgcagccaaacttattacacattagaagttttattttatatcactttggcaatcagaggtgtagatacaaaccgaggaacttgaatctcatggtaaaaatgatctagaatatacttataatgatcttttaaaaattatcatcaaaatgaaaataaaattaagaaaccatggtggaaatttcccagatgccctaagcatgcatttgccagccttgagtgatccacttggaggaacagtgacccagagtggggtttctcagtcctggcactattgaccttttcactgttaattcctagttgggcagggttgagggttgctgtgcactggaggatgtttagaaagcatccctggcctctgcccattagatggcagtagtgctttcagttgtgaaaataaaaatgcctccagtcattgccaaatgtccccctgagggacaaatatcactgacctccccaccttggttgagaaccactgatctagagcaactacagctattatctattaatgtttttttttttttgaaaatctgaagtacagatctataaatacgtattcacaatctgaaatccagaaagtgcttaaatttaaaacatttttcataattttgtagcaagctcactgggtaaaacttcgcctaagctaacaaaagatatttaaactctatatgtctcaatatcagtgtccatgtgtgttgctacagaaacatttatgtgtttaattataaaattctgcctcagaactctctgggggtgttaaataatacattttcaaaatctgaattccaagacacattccaaaacagtagtttacggtaggggattatgaccctgtatttgaaaagcaagttgactgtcaacaatgctatactgatttaatttttcctgattttgacctttggctatttttatccttctcatattcctctcatatatttttcacaataaaataggagacatgataggagatatgttttttgcccaaaagaaaataatacacttaatgccagtacctggtagtttttattatgtggttgatggccagtactttccattgctataaacattttgcatccagttgtaaattttttctcattgacattgctttttaactttagtcactgaagactgtcctcttaacagcttaaagtacatggactagtttaatttgtgactctgttactgattaaacctaaatcattttctttgtattaggttggcatcactctcttcactgtgtctcataggaaatctctttggaaacatcatgaggtttgtatttctttcattgaatggtacagtgaaattttattttctttaaaatatgaattcaggttaatatggttttagattttatggtttgtattcccttaaacatatgtcttaaggagaaaaggtggttttgttttataaaataggattttcttaaatattatagttgtcagttttgaaagcaatggtgtaacagtttttctccagttttataagtgactcttatctgttaatagtaactgactaaactttgcatagtcttatcacaaatatggtgaagtaaacttttcttatccagcagtgacagaggagaaaaagtcttaagaagaattagatggcaaaaaatttagggacatttttaatagaggtcaggactacaagggggaagattgaataacataagctatgtttatcaatgtactgtagtaagtaggattcattagatagtcactataatttacaaagatattcaaatgaggcttacattggtgcacatgtattacttattctggtgcttcagtagtgccattctcactatgtcagttcttttcaactcaatgtgaaatgctcaaaacctgaaagtaaacccagtttaattctctttattttcttttactcctccctccctccctcccttcctttcttccttcctttcttttcttctttcctttctgtctttcccccttccctctttcctttcttctcttctttccttcttttccttcctaaatgatatagaaattttaggtaaaagcaaggatttgagaaaaattggataatggtaaaggtgccttgttccacaaatacatacctgattaaggaccttnttttgccagatactgagctaagtgtcatgagggatgcaattaattacagtttttaccttcaagaactttaggatgtagatgatagtctacaagtgataaaatgaagagcataggatttgaagtcagagagcctgggttcaggcaccaaagtttctagcctcagttgcttcctttgtataatgaagttattgagccttaccttcctatctcttagattaccatgaaaattagacaggtagcctatatgaaagtacttaataaaattcagtgaaattctatataactgtgtgacttttaaagatagcttttattattttatggcatattataacttgtcaatttttcatgaactgagcaggaaattgaataactagaaatcaaaggcatttaaaatatagccaagcctttatgttttctcggaagttcataagtattatagccataggacattgagaggaattgagagcatttgggtttcacccttcctcttcttttggaggtatagacaagtagcaaaataatcatcacgccagtgatcatgtgaaggaggggaacacaactagaatgtgaggggccaggatagctaagaaatagtaatacagaaaatggaaactcagaaagctttctgaaaataagccactaaataaaaacagaaggctttgtaactgctgttgtgtcttcagaggttaggatatatcggcagtttttatagctctttttcccctctactaaattaaaaacaaataaaaagccttaagctggagatttcaagctgattaggaaatcaggctacaggaaacaatactgactgacctatggaacagtcttgcatttagcacagtttaacctactggtagctgagatccttggtcatggagttacggaagcattctgatttgtgggatgcttatagatttagctcccttaaaataatgaggaagtctgtattttacttttcataaaagacagtactatattcactcttagttactgactttttttcccccttctttcccatagtactacctgcatatggatggcagaggcaactatgaattcaaacagataacagaagatacagttgagtttggctcttagagaaatctggagaactatacctgcttcagtgaaataattacagaatatacttagaaaggcaaagtacattgtaaaataaagttgagcttagtttttttttaaaaaaaaaacaaagcaacaaattgactagatacagaataatggagaacaagttgttaaaacatttaatattatataggatattgctaattgtgtatatgttggtttaattaataatatgtactaagaatgtccttattcttgtggttaaaaacctgcctaaattaaattgggcttcaatcactgtaacctgattcatcctgggatgtaaaccattcgaagtcagctaattggacttttatggctctatcttttccttcagtgaagaaccctatttaaaactgggtcatcatttgtcctgttctagcaagatagtcttcagtttcattttcctgtgccctgtggtagttggaaacaaatcataatgtattatttaaatgtttaacatcattgcataacagcgtttattatacagtggtagatttctttagctgccacagtaatactcattccttgtgtgtgtcttggagtgcatttgactccaggaaaagccattttggttttccttaactaaatgataaatgtacccctctcagtctgcagtattgagttgtttaaagtatatgtgcagtcttgcttacaaggaggggttaccatgtatcacacctaatcttcccaatgtttgggatattaaaacacaaagtccttaacatgccaggctcaaggtcttataagagttctagatttttaagagaattagacaaatttgtgtgtgttagaagcccattcattagaagtgtggtggttatttggtattaaactccaaatgagccataggaaggcactacatgaaataatgcactgagtatgcaatgctatcactgtctttgactgtgattttatgtttaaaaagtatgttctaaaattattatatatacatgggtgaattatgtttccgaggcactgttttatctctgtgaatcttgaataacttttttatatttgggttatgatgtcaaacgatcctaagcgaagatgatttcagttcatcaaatcatcattaatgactttatgtattatttgcacagggagaattgaaactgagtataatcaataagctagatacgaaatcagtttctcaaactgagcttcagaaaggggcattttgtactcttgtttttgcataactggttttgtttttttgcagaattaactataacaatcactggctaccgaagtaaactgatgtactgaattccataatacataacattcaatttttaccacttctgtttagcgaacttgtatacttattttctgttcagattaaaaaaaaaaaaaaaaaaactcagatatcctatacaacctttgcttgttctttttattctggtatctaaatactgagaagttcatttataattcagccttgacttgaaaacatagatagtttaatcttgacttgaaaaacacaaaaataaattcagaaaatgcttttagcacagtgtctcttttttaaagttttgccaagtgtggtttttaattgaatgaatttctcttttagaaaagttcagtaaaatctgtgtacctgacaaatgctaccaaacagccaggagaccttaaaagatactattcgtcttggaaaagattttaaggcatgggaaagtttcagattttcagatttctgggttaccttaaacctactcgtagaagtattctcctagctgccttataattgcttttgttatgattcttgccatcaaaacaacaacaacaacaatttgggctttttttcttaattattttcttttttatgtaacaaatattacagtgcctcaccatttgaggcacagaggaagatccttctggagaatcacattaacataatagtggttcttcgaagacccacagtaaagaaatccattggttcaaaaacatgattgaccacggaacatctttttctacataattcctattaacaccttccagaaactgcagtgggaaatggtagtttaatccgaagaataaaccaaagaataagaactttcatccatgagcaccacgctgcatgccaagacatatcaccgtgttctcataataagtttttactttttatataatgagaaaataagtatgaaacagcaatggtagtttgttt

SEQ ID NO: 10508 - DNA, 15085 bp, Homo sapiens
tttttttttttattctttttttaatttattatactttaagttccagggtacatgtgcacaacgtgccagtgtgttaaatatgtatacatgtgccatgttggtgtgctgcacccattaactcatcatttacattaagtatatctcctaatgctatccttcccccctccccccaccccacaactggccctggtgtgtggtgttccccaacctgtgtccaagtgttctcattgttcatttcctacctacgaatgagaacacacggtgtttggttttctgtccttgcaatagtttgctcagaatgttggtttccaacttcatccatgtccctacaaaggacatgagctcatccattattatggctgcatagtattccatggtgtatatgtgccacattttcttaatccagtctatcattgatggacattttggttggttccaagtctttgctattgtgaatagtgccacaataaacatacgtgtgcatgtgtctttatagcagcatgatttataatcctttgggtatatacccagtaatgggatggctgtgtcaaatgggatttctagttctagacccttgaggaatcgccacactgtcttccacaatggttgaactagtttacagtcccaccaacagtgtaaaagtgttcctatttctccacatcctctccagcacctgttgtttcctgactttttaatgatcgccattctaactggtgtgagatggcatctcattgtcgttttgatttgcatttctctgatggccagtgatgatgaacattttttcgtgtgtctgttggctgcataaatgtcttcttttgagaagtgtctgttcatatccttcgcccacttgttgatggggttgtttgattttttcttgtaaatttgtttaagttcttagtagattgtggatattagccctttgtcagatgggtagattgcaaaaattttctcccattctgtaggttgcatgttcactctgatggtagtttctttcgctgtgcagaagctctttagattatttagatcccatttgtcaattttggcttttgttgccattgcttttggtgttttagacatgaagtccttgcccatgcctatgtcctgaatggtattgcctaggtttccctctagggtttttatggttttaggtctgacatttaagtctttaatccatcttgaattaatttttgtataagatgtaaggaagggatccagtttcagctttctacatatggctagccagttttccaagcaccatttattaaatagggagtactttccccatttcttgtttttgtcaggtttgtcaaagatcagattgttgtagatgcgtggtattatttttgagggctctgttctgttccattggtctatatctatgttttggtaccagtaccatgctgttttggttactgtagccttgtagtatagtttgaagtcaggtagtgtgatgcctccagctttgttcttttggcttaggattgtcttggcaatacaggctcttttatggttccaaatgaaccataaaagtagttttttccaattctatgaagaaagtcattggtagcttaatggggatggcattgaatctgtaaattaccttgggcagtatggccattttcacgatattgattcttcctatccatgagcatggaatgttcttccatttgtttgcatcctcttttatttcgttgagcagtgatttgtagttctccttgaagaggtccttcacatcccttgtaagttggattcctaggtattttattctctttgaagcaattgtgaatgggagttcactcatgatttggctctctgtttgtctgttattggtgtataggaatgcttgtgatttttgcacattgattttgtatcctgagactttgctgaagttgcttatcagcttaaggagattttgggcagagatgatggggttttctagatatacaattcatgtcatctgcaaacagggacaatttgacttcctcttttcctaattgaataccctttatttccttctcctgcctcattgccctggccagaacttccaacactatgttgaataggagtggtgagagaaggcatccatgtcttttgccagttttcaaagggaatgcttccagtttttgcccattcagtatgatattggctgtgggtttgtcataggtagctcttattattttgagatacgtcccatcaatacctaatttattgagagtttttagcatgaatggttttcgaattttgttgaaggccttttctgcatctattgagataatcatgtggtttttgtctttggtactgttgatatgatggattacgtttattgatttgcgtatgttgaaccagccttgcatcccagggatgaagcccacttgatcatggtggataagctctttgatgtgatcctggattcagtttgccagtattttattgaggatttttgcatcgatgttcatcagggatattggtctaaaattctctttttttgttgtgtctctgccaggctttggtatcaggatgatgctggcctcataaaatgagttagggaagattccctctttttctattgattgcaatagtttcaaaggaatggtaccagctcctccttgtacctctggtagaattcggctgtgaatccgtctggtgctggactttttttggttggtaggcttttaattattgcctcaatttcagagcctgttattggtctattcacggattcaacttcttcctggttaagtcttgggagggtgtatgtgtccaggaatttatccatttcttctagattttctagtttatttgcatagagttgtttatagtattctctgatggtagtttgtatctctgtgggatcggtggtgatatcccctttatcattttttattgcgtctatttgattcttctctcttttcttctttattagtcttgctagcggtctatcaattttgttgatcttttcaaaaaaccagctcctggattcattgattttttgaagggtttttgtgtctctatctccttcagttctgctctgatcttagttatttcttgccttctgctagcttttgaatgtgtttgcccttgcttgtctagttcttttaattgtgatgttagggtgtcaattttagatctttcctgctttcccttgtgggcatttagtgctataaatttccctctacacactgctttaaatgtgtcccagagagtctggtatgttgtgtctttgttctcattggtttcgaagaacatctttatttctgccttcattttgttatgtacccagtagtcattcaggagcaggtttttcagtttccatgtagttgtgctgttttgagtgagttcttaatcctgagttctagtttgattgcactgtggtctgagagacggtttgttgtgatttctgttcttttacatttgctgaggagtgctttacttccaactatgtggtcaattttggaatacgtgtgatgtggtgctgagaagaatgtatattctgttgatttggggtggagagttctgtagatgtctattaggtccacttggtgcagagctgagttcaattcctggatatccttgttaactttctgtctcgtggaactgtctaatgttgacagtggggtattaaagtctcccattattattgtgtgggaatctaagtttctttgtaggtctctaaggacttactttatgaatctggctgctcctgtattgggtgcatatgtatttaggatagttagctcttcttgttgaattgatccctttaccattatataatggccttctttgtctcttttgatctttgctggtttaaagtctgttttatcagagactaggattgcaacccctgcctttttttgttttccatttttttgttagatcttactccatccttttattttgagcctctgtgtgtctctgcacgtgagatgggtctcctgcatacagcacactggtgggtcttgactatccaatttgccagtctgtgtcttttaattggagcatttagcccatttacatttaaggttaatattgttatgtgtgaatttgatcctctcgatatgatgttacctggttatctgttcattagttgatgcagtttcttcctggcattgatggactttacaatttggcatgtttttgcagtggctggtaccggttgttcctttccatgtttagtgcttccttcaggagctcttgaaagacaggcctggtggtgacaaaatctctcagaatttgcttctctgtaaaggattttatgtctccttcacttatgaagcttagtttagctggatatgaaatcctgggttgaaaattcttttctttaagaatgttgaatattggcccccactctcttctggcttgtagatagagtttctgccgagagatccactgttagtctgatgggcttccctttgtgggtaacccaacctttctctctggctgcccttaacattttttccttcatttcaactttggtgaatctgacaattatgtgtcttggagttgctcttctcgaggagtatctttgtggcattctctgtatttcctgaatttgaatgttggcctgccttgctaggttggggaagttctcctggataatatcctgcagagtgttttccaacttggttccattctccctgtcactttcaggtacaccaatcagacgtagatttggtcttttcacatagtcccatatttcttggaggctttgttcatttctttttactcttttttctctaaacttctcttcttgcttcatttcattcatttgatcttcaatcactgataccctttcttccacttgatcgaatcagctactgaagcttgtgcgtgcatcacatagttcttgtgccatgattttcagctccatcaggtcatttaaggacttctctacactgttttttctagttagtcattcatccaatcttttttcaaggtttttagcttgtttgtgatgggttcgaacatcctcctttaacttggagaagcttgttattactgatcatctgaagccttcttctctcaactcgtcaattcattctctgtccagctttgttccattgctggtgaggagctgcattcctttggaggagaagagtcgctctgatttttaaaattttcagctattctgctctggtttccccccatctttgtggttttatctacctttggtgtttgatgatggtgatgtacagatgaggttttggtgtggatgtcctttctgtttgttagttttccttctaacagtcaggaccctcagctgcaggtctgttggagtttgctggaggtccactccagaccctgtttgcctgggtatcaccaggagaggctgtagaactgcagatactgcagaacagcaaatgttgctgcctgatcgtttctctgaaagcttcatctcagaggggcacccagctgtatgagttgtcagttggcccctactgggcggtgcctcccagttaggcttctcgggggtcagggacccacttgaggaggcagtctgtccattctcagatctcagactccatgctggcagaaccactactctcttcaaagctgtcagacagggatgtttaagtctgcagaagtttctgctgccttttgttgagctatgccctgcccccagaagtggaatctacagaggcaggcaggcctccttgagctgtggtgggctccacccaattcgagctttccagccgctttgtttacctactcaagcttcagcaatagcaggcgcccatcccccagcctcactgctgccttgccattcaatctcagactgctgtgctagcagtgagcaaagctccgtgggcgtgggaccctcccagccatgcatgggatataatctcctggtgtgccatttgctaagactgttggaaaagcacagtattagggtgggagtgacccgattttccaggtgccgtctgtcacggcttcccttggctaggaaagggaattatctgacccctcgcgcttcccaggtgaggcggtgccccaccctgtttcggctcccggtccgtggcctgcacccactgtcctgcacccactgtctgacaagccccagtgagatgaacctggtacctcagttggaaatgcagaaatcacctgtcttctgcatcactcatgctgggagctatagactggaggtgttcctatttggccatcttggaaactccccctaaacctcttttctttataaattacccagtctctcaggtagttcttcatagaaatgtgagatcagactaatatagtgtctttgctgtatttggggtgttaggactctccgttctgtttgactatttttccatacttaggtcaacaacacattgtcttgactactgaagtttgaaatcgggtagcaaaggttatctagctttgctattgtttttcaagattattttgcctttccacatgctttgtatttttacataaatgttagaactagcttgtcaatttagaattagcttatcaaggaagtttgctgatattttgactgggatttcattgaatataaagatcaatctgtggcgagattaattcttaagagtattgaatctatccactgacttaagaaaagcttttgatgaaaatataatttcttttaatatttgtcagtgagataaggttgaacataattaagattttcattaacttcaacaagtcatgtcactagtttataatgtgtgcttcattatagcagtgtctaagctttggtgaatattatattcctgaatcctagtctggctttcttaactccctagaagatgtgccagaaccacagtgctaaccttttcccaataaaattgtttttaggagctcttgaaacaacatcaaagtgacaccttgcaattagaagagctgagaaaaaccaaagaggtaagctttttcatcctttcctgtggacttggtatattacaaatacaccaataaaataacaagctgtcagtataatggaatcaatgataatttccccaaagccaataagaaatggaagacctaaagctgagtttactggattcaataagttaaaaagaatttttgaaattatctgtaaaataaagccagtgggtctttttaaagtctgatttgaacaaatagatcagcaatatactatgtgatcttcaatgttgaatgactttcatttctagcaaggttcaaaccacaaatgatctttcagttataaaacaccaagttcttccctttgagctctgaaaagtataaaactgtctcctttgaaactctgtcaccaagcccctccttaagctctgaatgtacctcacacatgataacttcctcagggactctattctggggcaaattatggcagtctgtgggagacaactgaagaggagccgttcaaatccacaaggtgatgtgtgattcttccatcactgaaaatttgacttggatccagaatggacacgtttgagaaaacattagtcattataaaggcattgtaaatgaattctatcttagagcccaggcagggcttcagcattatggaaaggcaaacagactgtggtgtcctacaagttcaagaaatgggctttggaggaagatatacccagtgtattataataactattttcatgagcttgtctacgaattctgtcatttgtgtcatgtctgggcctgtttctcttcattgatttttctcctcatttatggtcatatttccttgtttgcatgcctggtaagtttggcttggatgtcagtcattttggtgtttaccttgttgggtgctgaatatttttatattcctttagatattcttaagctttgccctgggatgcagttaagttgcctggaaacagtttgatcctttcaagccttgctttttaagcttcgttgggcagaactaaagcagtctttagtgtggaactaattttccccactattgaggtaataccctctgagtacttgacaccacaccctctgtatgagaaggattttctactctgcctggtgggaccatgaactattcccagccttgtgttggccctggggattgttccacctgctccttgctgatgtttccttcctctaaccttgtctctttctatttcttccctacatcactccaccccagaggcacttgcctccttgctgttcccttaacaggccaggatgttcctacctgggggtctttgatgttctctcttcctgaaaagctctttcccggatatccacatgactaacttcctttcctcctcctgttctttattcaaatgccaccttctcagaaggtgcccgatttaagggctccgctccctgcccaacacttgcttttctccaaatgggatgccactggaggtttttgaggagagagtatcatttgggaaaataactgtggcagcaatgtgaaggagaatctgaagaggcaaaatgatgggaggcagaacctattagaagggtcacctcccctttacacctcaacctgacttctgctccaatcccagccatggaaactgttcttgttaaaatcacaagtaaattccgagttgccaaatccaaggaatgcttcacctcactggacatgagcagtatcaggtgcgattgatcattctctccttgcaacattcacctgtcttagctttcatgggcttctggtgtttccttcacctcattggtcacaccttctcaatctcctttactagaactagaactctgcttaaaacccttcaatggcaccccactgttctcccacctactttctaagtcctggagtattttgaggcttgttcccaggccccacttatcttctttatctcccgtttctcctttggtgagctcatctgttcacacagatgtaaaagccatctctgtactgataacttggtttgatacctccagccttgcctctctcctgagctccaggcttgtacatccaactgcccatttgacatttcaacataggtgacatacagacacctcaaaattaacatgcccagttccacactctcaattttccaccagagatttagcccccaaattgtcaactccctcagctgttctaagcctagacctgaagtcatccttgatttcttctttcctttcactctcccaaattcaacccagcagcctcagccaatcctctataacataatccaaattcatccacgtccctccaactctgttgtcaccttaccctagtccattatttctcacctacacgactgtagtattctcctccttagttccgttgctttccctcttgcccttccaatccatccccatggagcataatgtaaacagtaagatacgtgcattcacttctctgcttaaaacccttcagtaggtccccattgttcttaggttaccttgtcctctcaggtgccaccagacttccctgtatttcctcaccatggccctctatccttactatctctattccagccatattggtgttcctttgggtcctcaaacagaatgagaattttgcattttttttattatactgtaagttttagggtacatgtgcataatgtacaggtttgttacatatgtatacatgtgccatgttggtgtgctgcacccagtaactcgtcatttaacattaggtatatctcctaatgctatccctcccccctccccccaccccacaacaggccccggtgtgtgatgttccccttcctgtgtccatgtgttctcattgttcaattcccacctctgagcaagaacatgtggtgtttggttttttgtccttgccatagtttgctcagaatgatggtttccagcttcatccatgtccctaccaaggacatgagctcatcattttttatggctgcatagtattccatggtatatatgtgccacattttcttaatccagtctatcattgttcgacatttgggttggttccaagtctttgctattgtgagtagtgccgcaataaacatacgtgtgcatgtgtctttatagcagcatgatttataatcctttgggtatatacccagtaatgggatggctgggccaaatgggatttctagttctagatccctgaggaatcgccacactgacttccacaatggttgaactagtttacagtcccaccaacagtgtaaaagtgttcctgtttctccacatcctctccagcacctgttgtttcctgactttttaatgatcgccattctaactggtgtgagatggtatctcattgtggtttgatttgcatttctctgatggccagtgatgatgaacattttttcatgtgtcttttggctgcataaatgtcttcttttgagaagtgtctgttcatatcctttgcccacttgttcatggggttgtttgtttttttcttgtaaatttgtttgagttcattgtagattctggaatattaaccctttgtcagatgagtaggttgcaaaaattttctctcattctgtaggttgcttgttcactctgatggtagtttcttttgctgtgcaaaagctctttagtttaattagatcccatttgccaatttaggcttttgttgccattgcttttggtgttttagacatgaagtccttgcccatgcctatgtcctgaatggtattgcctagattttcttctagggtttttatggttttaggtctaacatttaagtctttaatccatcttgaattaatttttgtataaggtgtaaggaagggatccagtttcagctttctacatatgactagccagttttccaagcaccatttattaaataaggaatcctttccccatttcttgtttttgtcagatttgtcaaagatcagatagtgtagatatatggcattatttctgagggctctgttctgttccattggtctatatctctgttttggtaccagtaccatgctgttttggttactgtagacttgtagtatagtttgaagtcaggtagcgagatgcctccagctttgttctttggcttaggattgacttggcaatgcgggctcttttttggttccagatgaactttaaagtagttttttccaattctgtgaagaaaatcattggtagcttgatggggatggcattgaatctataaattaccttgagcattatggccattttcacgatgttgattcttcctatccatgagcatggaatgttcttccatttgtttgtatcctcttttatttcgttgagcagtggtcaacgaagaggtccttcacatcccttgtgagttggattcctaggtattttattctctttgaagcaattgtgaatgggagttcactcatgatttggctctctgtttgtctgttattggtgtataggaatgcttgtgatttttgcacattgattttgtatcctgagactttgctgaagttgcttatcagcttaaggagattttgggcagagatgatggggttttctagatatacaatcatgtcatctgcaaacagggacaatttgacttcctcttttcctaattgaataccctttatttccttctcctgcctcattgccctggccagaacttccaacactatgttgaatgggagtggtgagagagggcatccctgtcttttgccagttttcaaagggaatgcttccagtttttgcccattcagtatgatattggctgtgggtttgtcatagatagctcttattattttgagattcgtcccaccaatacctaatttattgagagtttttagcatgaacggttttcgaattttgttgaaggccttttctgcatctattgagataatcatgtggtttttgtcattggttcggtttatatgctggattacatttattgatttgcgtatgttgaaccagccttgcatcccagggatgaagcccacttgatcatggtggataagctttttgatgtgctgctatatttggtttgccagtattttattgaggatttttgcatcgatgttcatcagggatattggtctaaaattctctttttttgttgtgtctctgccaggctttggtatcaggatgatgctggcctcataaaatgagttagggaggattccctctttttctattgattgcaatagtttcaaaggaatggtaccagctcctccttgtacctctggtagaattcggctgtgaatccatctggtcctggactttttttggttagtaagctattaattattgcctcaatttcagagcctgttattggtctattcagggattcaacttcttcctggtttagtcttgggagtgtgtatgtgtccaggaatttatccatttcttctagattttctagtttatttgcatagaggtgtttatagtactctctgatggtagtttgtagttctgtgggatcggtggtgatatcccctttatcgtttttttttgcgtctatttgattcttctctcttttcttctttattagtcttgctagcattctattaattttgttgatcttttcaaaaaaccagctcctggattcattgattttttgaagggttttttgtgtctctatctccttcagttctgctctgatcttagttatttcttgccttctgctagcttttgaatgtgtttgctcttgcttctctagttcttttaattgtgatgttagggtgtcaattttagatctttcctgctttctcttgtgggcatttagtgccataaatttcccctacacactgctttaaatgtgtcccagagattctggtatgttgtgtctttgttctcattggttttgaagaacatctttatttctgccttcatttcattatgtacccagtagtcattcaggagcaggttgttcagtttccatgtagttgtgtggttttgagtgagtttcttaatcttgagttctagtttgattgcactgtggtctgagagacggtttgttgtgatttctgttcttttacatttgctgaggagtgctttacttccaactatgtggtcaattttggaatatgtgcgatgtggtgctgagaagaatgtatattctgttcatttggggtggagagttctgtagatgtctattaggtctgcttggtgcagagctgagttcaattcctggatatccttgttaactttctgtctcgtggagctgtctaatgttgacagtggggtgttaaagtctcccattattattgtgtgggagtctaagtctttttgtaggtctctaaggacttactttatgaatctggctgctcctgtattgggtgcatatatatttaggatagttagctcttcttgttgaattaatccctttaccattatataatggccttctttgtctcttttgatctttgttaattgaaagtctgttttatcagagactagtattgcaacccctgcctttttttgttttccatttgcttggtagatcttcctccatccctttattttgagcctctgtgtgtctctgcatgtaaggtgggtttcctgaatacagcacactgatgggtcttgactatccaatttgccagtctgtgtcttttaattggagcatttagcccatttacatttaaggttaatattgttatgtgtgaatttgatcctgtcattctgatgttagctggttattttgctcgttagttgatgcagtttcttcctagcctcgatggtctttacaatttgacatgtttttgcagtggctggtaccggttgttcctttccatgtttagtgtttccttcaggagctcttttaaggcaggcctggtgtgaccaaatctctcagcatttgcttgtctgtaaagtattttatttctccttcaatcatgaagcttagtttgactggatatgaaattctgggttgaaaattcttttctttaagaatgttgaatattggccctcactctcttctggcttgtagagtttctgctgacagatctgctgttagtctgatgggcttccctttgtgggtaacccgagctttctctctggctgcccttaacattttttccttcatttcaattttggtgaatctgacagttatgtgtcttggagttgctcttctcgaggagtatctttatgctgttctctgtatttcctgaatctgattgttggcctgccttgctcggttggggaagttctcctggataatatcctgcagagtgttttccaacttggttccattctccctgtcactttcaggtacaccaatcagacgtagatttggtcttttcacatagtcccatatttcttggaggctttgttcatttcttcttattcttttttttctaaacttctcttcttgcttcatttcattcatttgatcttccatcactgataccctttcttccagttgatcgaatcggctactgaggcttgtgcatttgtcacatacttcttgtgccatggttttcagctccatcaggtcctttaaggacttctctgcattggttattctagttagccattcgtctaatcttttttcaaggtttttaacttcttggccatgagttcgaactttctcctttagctcggagtagtttgatcatctgaagccttcttctctcaactcgtcaaagtcattctccatccagctttgttctgttgctggcgaggagctgcattcctttggaggaggagaggcactctgatttttagaattttcagtttttctgctctgttttttccccatctttgtggttttatctacctttggtctttgatgacagtgacgtacagatggggttttggtgtggatatcctttctgtttgttagttttccttctaacagtcaggaccctcagctgcaggtctgttggagtttgctggaggtccactctagaccctgtttgcctgggtatcagcagcggaggctgcagaacagcagatattggtgaacagcaaatgttgctgtctgattgttcctctgaaagttttgtctcagaggagtacccagccgtgtgatgtgtcagtctgcccctactggggggtgcctcccagttaggctactcaggggtcagggacccacttgaggaggcagtctgtccattctcagatctcaagctgcgtgctgggagaaccattactctcttcaagctgtcagacagggacatttaagtctgcagaggtttctgctgccttttgtttggttatgcctgcccccagaggtggagtctacagaggcaggcaggcctccttgagctgcggtgggctccacccagttcgagcttcctgg

SEQ ID NO: 10509 - DNA, 856 bp, Homo sapiens
  SITE (120): n equals a,t,g, or c
  SITE (121): n equals a,t,g, or c
tattttattttattttattttattttatttttttattttttattttttattatacttttaagttttagggtacatgtgcacattgtgcacgttagttacatatgtatacatgtgacatgnnctggcgctgcacccactaactcgtcatctagcattaggtgtatctcccgatgctatccctcccccctcccaccaccccacaacagtccccagagtgtgatattccccttcctgtgtccatgtgacctcattgttcaattcccacgtatgagtgagaatatgtggtgtttggttttttgttcttgcaatagtttactgagaatgatgatttccaatttcatccatgtccctacaaaggacatgaactcatcattttttatggctgcatagtattccatggtgtatatgtgccacattttcttaatccagtctatcattgttggacatttgggttggttccaagtctttgctattgtgaataatgccgcaataaacatacgtgtgcatgtgtctttatagcagcatgatttatagtcctttgggtatatacccagtaatgggatggctgggtcaaatggtatttccagttctagatccctgaggaatcgccacactgacttccacaatggttgaactagtttacagtcccaccaacagtgtaaaactgttcctatttctccacatcctctccagcacctgttgtttcctgactttttaatgattgccattctaactggtgtgagatggtagctcactgtggttttgatttgcatttctctgatggccagtgatgatgagcattttttcatgtgttttttggctgcataaatgtcttcttttgagaagtgtctgttca

SEQ ID NO: 10510 - DNA, 878 bp, Homo sapiens; identical to SEQ ID NO: 5232
  SITE (741): n equals a,t,g, or c

SEQ ID NO: 10511 - DNA, 37874 bp, Homo sapiens
ttttatttttaaaatttattattatacttcaagttttagggtacatgtgcacaatgtgcaggttagttacatatgtatacatgtgccatgctggtgcactgcacccactaactcgtcatctagcattaggtatatctcccaatgctatccctccccctacaccacgccacaccagtccccagagtgtgatgttccccttcctgtgtccatgtgatctcattgttcaattcccacctatgagtgagaatatgtggtgtttggttttttgttcttgcgatagtttactgagaatgatgatttccaatttcatccatgtccctacaaaggacatgaactcatccttttttatggctgcatagtattccatgctgtatatgtgccacattttcttaatccagtctatcattgttggacatttgggttggttccaagtctttgctattgtgattagtgccgcaataaacatatgtgtgcatgtgtctttatagcagcatgatttatagtcctttgggtatatacgcagtaatgggatggctgggtcaaatggtatttgtagttctagatccctgaggaatcgccacactgacttccacaatggttgaacagtttatagtcccaccaacagtgtaaaagtgtttctatttctccacatcctctccagcacctgttgtttcctgactttttaatgactgccatttaattggtgtgagatgatatctcattgtagttttgatttgcatttctctgatggccagtgatggtgagcattttttcatgtgttttttggctgcataaatgtcttcttttgagaagtgtctgttcatgtccttcgcccactttttgatggggttgtttgttttttttcttgtaaatttgtttgagttcattgtagattctggatattagccctttgtcagatgagtaggttgtgaagattttctcccattttgtgggttgcctgttcactctgatggtagtttcttttgctgtgcagaagctctttagtttaattagatcccatttgtcaattttggcttttgttgccattgcttttggtgttttagacatgaagtccttgctcatgcctatgtcctgaatggtgttgcctaggttttcttctagggtttttatggttttaggtctaacatgtaagtctttaatccatcttgaattgatttttgtataagatgtaatgaagggatccagtttcagctttctatatgtggctagccagttttcccagcaccatttattaaatagggaatcctttccccattgcttgtttttctcaggtttgtcaaagatcagatagttgtagatatacggcgttatttctgagggctctgttctgttccattgatctatatctctgttttggtatcagtaccatgctgttttggttactgtagccttgtagtatagtttgaagtcaggtagcatgatgcttccagctgtgttcttttggcttaggattgacttggcaatgcgggctcttttttggttccacatgaactttaaagtagttttttccaattctgtgaagaaagtcattggtagcttgatggatatggcattaaatctataaattaccttgggcagtatggccactttcatgatattgattcttcctacccatgagcatggaatgttcttccatttgtttgtatcctcttttatttccttgagcagtggtttgtagttctccttgaagaggtccttcacatcccttgtaagttggattcctaggtattttattctctttgaagcaattgtgaatgggagttcactcacgatttggctctctgtttgtgtgttactggtgtataagaatgcttgtgatttttgtacattgattttgtatcctgagactttgctgaagttgcttatcagcttaaggagattttgggctgagacaatggggttttctagatatacaatcatgtcgtctgcaaacagggacaatttgacttcctcttttcctaattgaataccctttatttccttctcctgcctaattgccctggccagaacttccaacagtatgttgaataggagtggtgagagagggcatccctgtcttgtgccagttttcaaagggaatgcttccagtttttgcccattcagtatgatattggctgtgggtttgtcatagatagctcttattattttgagatacgtcccatcaatacctcatttattgacagttttttgcatgaagggctgttgaattttgtcaaaggccttttctgcatcaattgagataatcatggtttttgtctttggttctgtttatatgctggattacatttattgatttgcatatattgaaccagccttgcatccctgggatgaagcccacttgatcatggtggataagctttttgatgtgctgctggattcagtttgccagtattttattgaggatttttgcatcaatgttcatcaaggatattggtccaaaattctcttttttggttgtgtctctgcctgactttggtatcaggatgatgctggcctcataaaatgagttagggaggattccctctttttctattgattggaatagtttcagaaggaatggtaccaattcctccttgtacctctggtggaattcggctgtgaatccatctggtcctggactcttttttgttggtaaggtattgattattgccacaatttcagagcctgttattggtctattcagagattcaacttcttcctggtttagtcttgggagactgtatgtgtcgaggaatttatccatttcttctagattttctagtttatttgtgtagaggtgtttgtagtaatctctgatggtagtttctatttctgtgggatcagtggtgatatcccctttatcattttttactggaaggtggttcttttcactgggatctcataaagctagcaaattactttctgtgggatgactgagcccatggaaacgcaggcattcttgtcatgtctaataatgggatgtagttcctcccagtccactgtctcctctccttgttttctgctgttatagactgcatcagccaacattatgcattctgaattctccaggagggactgaagcagtcatctcaatgttcacacgttcctccaaactttaggggccacatgtcagtttgtttcagaatcttctcatcccagggttatgtggagatttggctgcacatctctgcagctcagcaagcctgaggtgagaattgagacactgctttctttgccttgcaaaatgcaccactcacttaacatatgggagcacttgtgaaaagaagacaagtcagaagcccttctcttcccttggataacatctcattgcgtggacgactctttctctctcaaaatactccataattctgcatttgagaggccagaggtggtaggttggtagccggtttggctgcttattaggaagccctaggaaaggtgcctagtgagtgctctttagaatcccttctgttaactattctcaatatttagggtttagctgaaatgtttgaaacaaagaaaagtcctatttcacatcttgtacttttaaagcactcatttacatctaaagaaatgtgactgtagaagttaggttatattccctaaggccacaaaatttacttattaaaagtcaaaatctgatttgtctgtaggttattctcaccccaaacctccttttcagttcattgtactatttacctccaaatatgattgttcaattataagtggttactgtagggcatgtgtaagttgagataaacagcaacagaactcttcagtatttatttagatacagcataaaattgggttttgatattgtaggcatattaaggctagccagcttaattggctcctgcatttgtgctaacaactattagtctttaccccccagtaagtgaagaaaatacttgatatagctaaagtagtacctagctcattctgagacttcagtaaatattggttaaatgagagactgcaggaattcaaagtgagctgatgctgccactcccaacaaacagtgacttctgctgagttttttctgatacttttactgtgaaggtctcacttttgttcatgcatctgtcatcaacccttatattcaaggaaatgtctccagaatttttattggatgactgcattttccttacatgcaagtaaaagaaataccaggctttgaaagcgggctgattgagtgagagttgaacatttaatcagcaagaacgcacttaaaagtgccaagttgtagcaaaatctagggaattttaactttacatatgaaatccttttctgctccactatagcctcaactttctttcagtttttaaatttagaacattctggtaaatggccactgcagaagagtttaatatggtacaataataattcttatttttctcttactgctcaaaggaaaaaaaatctggataaatcccagggacctttaaggagttttagaaactgtcctcttcattaggttaatccactaaagatcaattagttaaaatgctatttgaaatatttagttcttttcttagagataaagtattcatttgtaaattgaatctattgaagatatttccatataaaataaagagtgaaaaacaaaaaaaaaaattgaatcacagctgctttatgtggactgatagataccttagtgcatttgcagcacaaatccaacatttaaaatatttaaaaatacatctctgtatgtggaattttagaaagtattaagctatagtgagagaaagctgatcagcctgaaggagttggggaggggcttgactgtaaagagacatcaggaaacattttcaggagttagaaatgctgtctatctcgactgtgatagtggttacaggaatatttcctagttgcccaaatttacccaatggtatacttacacaatgggtgaatcttttgtatgtacattaaagctggcgggtggggagaagaggaaaaaaaatcttattgaatttgggctattttacttgtaatatcttttatcctgataaaacagatagtactgtggtagacaaagtgttttatcatctacatagaataataaaatctcaaatttcaaatgttattcattcactgttagtcaattggcattaaagtgttgctttctgtgtttcaggaacagtgcaatttgtgaggtacagaaagccaaataaaacagtctttgcctaaaggaagtgtaattcattatccattgctatgtaacaaattaccgcaaagtttaatggcttaaaacaccacacatttctcatctcagttatcatctgtgagtcaggtgtccaggtgttgcttagttggtatctctgtctctactttggggtatctcacaagactgcaatcaagaagtcactcaggcctgggatctcatctgaaagctagactggtaaaggatccgctcccacgctcacttacatagtcgttggcagaattcagtacttcaagtgctgttggactgagggcctcagtttcttactggctgttgaccagaagctgccctcagttccttgacaggtgaccctctccatgtgactccttcatcaaagagtgcaggctgaaaaggcaatagatggtcagttaggaaagggaagtcacaattttttataacccagtcacagaagtacatcccttcaatgacgctatgtactgttgcttagaaggaagctacccaagaaaagggaattaacaaggacatcaatatcaggaggaggagaccactggcggtcattctaaaggctacttaccactagaagcctagttgattcaacttactatccaggattaatacatcaagaagtcatccagcaagtgctttaatcttttctgctacacagaatagtgtataagagtggtggctttataatcagacttctcttgcttaagttgtcgctaacccttattagccatatatctgggaatttattaaaccttctaagcatcagtttctcaccataaaatggtgtatacctcataaagtgtgaaaattaaacacaataatgaatatatagttctgagtatggcacctggcaaatagtaagcatgcaaataatgataattattttttattatatatctacttactttattcctcacttgaaatccagctctctgaattttcctgttgttgaaattagtttaccaacttggaacttattaatcaccatatccactttaaaatcctcaccctgcctttaatttacatctgaagacagtgtatttgttgccttcattttctccctacttgtgcacactccagtcttccactgtttctacagatgttccttatgtaacatgatttcaagtgtcgttcacttccttctgaccacatttgttgcattataacataatgaatctgtaagtcatcacatacaactaaataaattccaggtgtagcttgttccatgcaaaaggaatcaagattattactagtgatgtaaataacctatatgtattgaacaattttaagtagtttttaactagtacaatgatattcatgaatctttttcttgaaaatgatagtagtttacaaatgatctaaggagcagcaaatattattaaacactttgcgtacttccatccagatttatcaaaattgttatgaagctgaaagcatagtgcaagaatacagtttggtgcctcatggttctttttatgtactttgtttaatataaggtgatttagcaataatatgattaggatgcttactgtaaaaactccttatctctattattgcttaggcacatagtttttttatagttgtaagacatgaaatatttatctatatgctataatgaactatttactggatataccatatatatgatgcttattcactggtgataaacccatgattgtttttaaatatagattttcatgattagattaataatggaattcacactctttgatagttcaccattatatgcaaaggttttttacaaaaatgatagaagttccaaatattttttcccaagttcacaattcttacaagctcacataaaaataggaagtgtggtttttctcaggggtggcattttctcattattctccttagaaaacataataaagtgaagttcatttactcatttatttttggctttaatattaaacacaaaatatatttttattggaaaggtcaacattgtttatttctgcttgttaaagtatacatgttcctggtaaaacatttaggaacaacaaaaacacaaagaagaaaataaatattaccataactcatagacaattgctgacccatttaatgcatattttagacaattatcataagatcactttttttctgttggaatattagtattttattaaatgattttttaaaagtccttgtatacatatatacatacatgtagtgaagatttaggcttaaagcattttttatttctgtctttgttgtcactgttaggatgctttatttctgttgcaaccacattgtgtcctcttattattccatttctaataaaaaatatagaataacaatattaaaacataaatttttccttgtatgttgtttgtgaatttttgagtgaagttgttttcaataactcagaattttgagttgaaaatacgtgaggatttctgtgatcaaatatttgttatctttttgtaaagagtgctgatttgattagttctaaaaatcatcagtgtaatctgtaaatgatgtaatccgccatcagcacttgcacttttcttcagattattatagaaattcaaatcaataacattttgttgttttctattaaataacatttggcacattacgtatgttcatatggttaccaatattccttaaaaatagcaaggttttaacatgttcatgatatccttaggtagagtctaataacagagaacatttgtgtgaggataactattttaaaatatactctcttttttgaaatagattgtgaaataatctttggtaaaatctctatctttgttaaaaattcccagaatgagaaatgtgaatgtaaaatacttagaaaacttcctttcctagggatgtaaatttcactattataatctttatttataagtcactcgttaaaatggtcttgcttctaggataagaatgcagttcttcatagaataatatctaatttgaagttttgctaatagttttggaagtgaatgtatttttttaaagttttaaatacattcattttagcatattgctttgactatatggactaatttatcaattaaaatatttctattttcatttgatagtaatttttttcaaaaacttatattgtttataaactcagcaagtcttcagaaacatgtttgagtttgttgtatgcatccagattaggtcctagatcaggatgcttttgaattaacttgaaataagaataatatctatggtctatttttatttgaaagttttaccttcccatgatgggctcattttgttaaggatttctttaaaaatttgtggcatatatttgaaatgaagctgcctaaaagataatttatatagttcttaaaagatcatcaaatctcaggtctgcatttaatatttcaaccagtaatgttattgtgctttaaaaactctggtaagataaaagtagacttttacaaaatgaaattgtttcatttattcactcattcattcattcaataaacattaaagaacccttgttcatgttccagacactgggtatataatcacctgtggactagaaggaaaaatgacagacacagaaaccattttaaagaagataatacattattgttaattatagttaattaaagaaaattaatgaaaattcctttgatataaatacttaggtcttacctatattagtaatgtccacctatttttaattaatagagattagcaactctgaaatttataaattgttaaagtttttcagtaagcttttaaggttgtgtgagatatagttttagaaaatatttgaaaaaaaaagtcacattaaaatgatcaggattgtcttttgtttctgttttataatcaagggcctaacatctaatatgtaaatattcttctagtaagcaattaatgtggttattataatcttattattcatagaatatcccccccgccccataaatatcaacttcctaatccccagaacttgtctaagttacatggcaatagggacttagctaatgtggtcaacgatcttgagaagggaagacaatcttggattacccagttgggcccaatgtaattatacagtcctagtaagaggcaagccagaggatcaaagacagaaggaaatggacaacagtggcagaggccggggtgatgtgccttgaaaatagagggagggctccagccaagggcaccttctgggatctggaaaaggccaggaaacaaaaatttctcccagaaggagtgtaccactacctataccttaattttagtcctgtaagactcctttcagacttctgacctccagaactgtagaaaataattttgtggtattttaagtaatttaaatgtatgataattagttacagaaacaataggaaattaatacaaacctacacaattataacattgtaaaatggcctctgttgtgacaatttaacaaaatgccaggttttttccccagaaaaatccctgcagagatgattagctattagagcagagtgtgaaaccttttaacaaaggtaggctagctggtaactgcccattattaccaactaagtctttgaaggtagcaaagcaatacaaaagcaggtactcgtgtaacctaggccagaaccaccacatttattgatttttcatagcttccttttaactgaatccccagataccactagaattttatgaaatgacttaagaataagacatttgaacatgaaaatttaggtgtttcttcaactgtcacacattcaaagagcccctcctggtaatctgtgtgatcatgttcttgcatcagtcgcagacaagcaaaaagctgaactcagtactgcacctcctgttttctgggagtatttaattttaagagagacccatacttccttttataaggtgaagggaaaagctgtaatagcttctttgccattagttttgaaactctagagttcattaaaactccctttggctttcttcactgccatctttctttcttcttatgaattattcaagacaaatttcacttgaggtaaatagtttgatttgaaggtttttgtatctggatttagatgcaacaagaagtgttaaatgctcagaattttaagtgtagagaatggcacagactcagctattaagatggaagacatttgctgttaatgttccagggctgctgttgcgacttcagcttggtactattattcattctgaagtaggcaggcattatgatgcctgcagtataaatcagattttacagagagcttgatccgcaagcactttgaacattccatccacttctcagttaacagaacattttttggttttacaaggtaaagtttcttttttttttatccttgccaatacattattaatctctttttttcatatattgtataccaaaccacaaaacagttttagactatacatgtctcttgaataaagcgaaattgtaagttttgaaagtttcttctttcaataaatattgtgaaagataagaggacctagaaaatatttcatttttataaaactcaacgtaagaccctttcttctttcacagtagtaatatcttttctagatattgtgtcataattttaatcttttaaacacttagctcatggagtcacacacctggaaaaatgatacatggaacatatgtctgaaaactaccttattttggaacttaagaattggttcaatgaatgtaccacatttaaaaaccaatccaggccagtgcagtggctcccacctgtaatcccatcactttggaaggccaaagcgggtcgatcacctgaggtcaggagtttgagaccagcttgaccaatatggtgaaaccccatctctactaaaaatacaaaaattagccaggtgtgttggcatgcgcccgtagtcccagctactcgggaggctgagacaggagaattgcttgaatccaggaggcagaggtggcagtgagccaagatctcaccactgcacttcagcctgggcaatagagtgagactctgtctcaaaaaaaaaaaaaaaaaaagaactatgcaaagaaatcttattatagttttgtctgctactaaaattcactttcctaatgtcagtttctattaaagttgcctagataaaattatgtttatgaaattatgcccaggtagtactgctttcaggcaaagcatttcattcccgtttcctgctctaacacaatatcacaagcagcaggagtttcattactaaagaataataaaaaacatttattaattgctatatgatagaacatgtgctaagtactttacatgcatcacctaagttaatgctcacaatgagtcttagaaatagtttctgttagtgcccccattttatagctagacagttacatggagagcacagtcttgtaatccctctgtaggacatcagaatccatgtccttaaagactaccaataagtgcaaactcaaaatgtacaggaacatagatttatgaagttgcctagtataatgcaatatgaaatggtggatactgtaacaaattgtcaacaatttacatgcatttatatttaaactacaaatccagcaaccaataatttatttgtgggctatattcaggtttcagccctctggtttttaactcaccacaaagccacactgctttcaaaaccgttcatttacatgcataattattcctttatttatttcaatcttattcagattttatcaggcaatggaaacatgcagagaacagaattacattgtaattacattgtaatcacaatgtcttataaccctttccatggtaaaggattacccattagcccagtcatgtagtttacctgttgttagaagggaagaaggaattctcttctaagtctgaaggagacacaggttgagaatcttttatccaaaatgcttgggggccgggtgtggtggctcatgccgtgggtggatcacttgaggccaggagttccagaccagcctggccaacatggcgaaaccctgtctctactaaaaatagaaaaatttgccaggcatggcggcacatgcctgtaaccacagctacttaggaggctgaggcaggagagtcactcgaacccagaggcagaggttgcagtgagtcaagatcgtgccactgcacttcagcatgggtgacagagtgagactctgtctcaaaaagaaaaaaaaaatgcttgggaccagaagtgtgtcattttttggattttggaatatttgtatatacacaatgaaatatgttagggatggaacccaattctaaacataaaatttatttatgtttcgtatacacgttatacacagagtctgagggtaatcttatacagtgttattaataattatgtgtgacctgtcacttgaggtcaggtgtggaattttccaagtgtggtgtaatgtcaacactcaaaaattttcggattttggagcatttggagtgcagattttcagacttgggatgctcagcctgtgctggaattgcaagaatgttcagactcaaaagtcaaagaaaaagttgagttctgaagagggcacattaattgaaggggccaacaaaatgtattaaaatttagcctgtagtgctcagtgtcttattgccatgaatatgagagtgatggtggctaaggaagggaactggagccatatttctaaatcgggctttatattttgtaggtgattgtgccagccatagtgtaaggcagacatgagtcatttttcaagggacttgggatgaagtgcatgtaaattttggacatgaaaatttaagggcgaaagagatgtttaaatcctctaaggaaagctatgggaaagctgtgtaggcaccattagtttatttggatcatgaagtccaggtaagagattttcatgttcatgtgtcaagtaacaaagataagtaggaaaagtgttgtcatgtgttttattatttaataaggaaatacattttgttatgaatgaatacatttttttcttggcgtgtttaattggtattccttctcaaaatgtccaatgactcatcaacttagttatggcaggcatcttaatttgttaagttgcttaagttttctggttgttcatttccatgaagctgtgtgtgggatttataagctttttcccccaatggatatgctaataaaatacaaagtttgaaaatcactgagactgattaatcatattcctgtcagctctaaaattcagcagctcaacagtcagttatgtcaagggtgtccattatctgatcattctttctactgaaatgtgctttcttttcttcttcttttttttaatcttttcttctattctgttactttctattaaaaaatgaacttcattgaatcttaactcaatgtttcagtgtggggaaggtttactcaccattatggaacatttgaaaatatgtaagaggccaggcgcgatggctcacacctgtaatcccagcactttgggaggccgaggcgggcggatcacgaggtcaggagatcgagaccatcttggcttaacacggtgaaaccccgtctctactaaaaatacaaaaaattagccgggcgcggtggcgggcgcctgtaatcccagctactcgggaggctgaggcaggagaatggcatgaacccgggaggcggagcttgcagtgagcccagatagcgccactgcagtccagcctgggcgaaagagctagactctgtctcaaaaaaaaaaaaaaaaaaaaaaaaaaaaaaagaccttactattagcatttagtaaccagttagggatattgttaaacatcatgcagtacatcagagaatattcttatgtaaaagatcaatagcactgtttttgagacatattgaaatgggttatgactctatagcctgacagacattgcagtaaaactttttttttttttctgataaggactttaatttctggatttatttggtcatgctctctgcctcaagcacctttctagttaccctgtcaaaaatcttgtttgctcttgaaggcttagttcagatctcatctcctttgtgaaatcacttgtaaccctttcactttactataaactcagaggtctccctactttttgatggcccttgtataatctcttgaacacaagcttgaataatctccaaatgcaatggcaaattgagaaaaatggtactggcttttccattctgctttccgtgtgagttgtgtaaaagggccaagacatatcacttttgttttgttttatttaaattattgttcctacagagaaatagatgataaatactgaaataatagtgagtcatccttatacacaaaaacatcaccatagcaaatatgctacctaagataaacatgctgcatagctcaacctaactttacttatttgtagttaattcactataagaactcattgagagtacagcatgaaacttgttttttaatatcctttcttgctgattgtgtctcaaatccataacttagattttaatatatagactacctgatgataataatggtgttctagaaataaaggcagctttcggagcttctcttaaaaaaattaaagaccgtctacatgatcaactacctaccagttaactgaaacaagactgggtatcactggcccactgtcctagttcaaactcaatgaaggaatcaacactattctagatcatattcttaacactatgatcttagtgttaagaaatagaaaatccttgactcctgccatatgtcagtagtgaaaatagacccttccaagaccatttccaatccttacctctagaaattacatgctgtttctgattttcagcacatctcaaagagattcatatttcccttgagttacagttgttgtagtttgtaaaaatgttcctatttctccatatcctctccagcacctgttgtttcctgactttttaatgatcgccattctaactggtgtgagatggtatctcattgtagttttgatttgcatttctctgatggccagtgatgatgaacattttttcatgtgtcttttggctgcataaatgtcttcatttgagaagtgtctgttgatatcttttgcccactttttgatggggttgtttgttttcttcttataaatttgtttaagttcctggtagattctggatattagccctttatcagatggatagattgcaaaaattttctcccattctgtgggttgcctattcattctgatagtttctttttgctgtgcagaagctctttagtttaactagatcccatttgtcaatttttgcttttgttgcaattgcttttgatgttttagttatgaagtctttgcccattcctacgtcctgaatggtattgcctaggttttcttctagggtttttatggttttacgtattacatttaatctttaatccatctcaagttaatttttggataaggtgtaaggaaagggtccagtttcagttttctacatatggctagccagtttttccaacataatttgttaaatagggaatacttaccccattgcttgttttcgtcagttttgccaaagattagatggttgtagatgagtggtgttatttctgagggctctgttctgttccattggtctatatctctggtttttttttttttttttttttttttttttaaccagtaccatgctgttttggttactgtagccttgtagtatagtttgaagtcaggtagcgtgatgcctccagctttgttctttttgcttaggatcatcttggctatatgggctcttttttggttccatatgaaatttaaagtagtttttttctaattctgtgaagaaagtcagtgatagcttgatgggaatatcattgaatctatgaattacttttggcagtatggcattttcacaatattgattcttcctatccatgagcatggaatgttttttcatttgtgtcatctcttatttccttgagcagtggtttgtagttctccttgaagaggtcctttatatccactgtaagttgtattcctaggtattttattctctttgtagcaattgtgaatgggagttcactcattatttggctctctgtctattattggtgtataggaatgcttgtgatttttgcacattgattttgtatcctgagactttgctgaagttgcttatcagcttaaggagttttgggtctgagacaatagggtttctaaatatacaaacatgtcatctccaaacagataatttgacttcctctcttcctatttgaatacgtttatttctttctcttgcctgattgccctggccagaacttacaatattatgttaaataggagtcgtgagagagggcatccttgtcttctgctggttttcaaagggaatgcttccagcttttgcccattgagtatgatattggctgtgggtttgtcataaatagctcttattattttgagatatgttccatcaatacctagtttattgagtgtttttagcatgaaggagtgttgaattttgttgaaggccttttctgcatctattgagataatcatgtggtttttgtcattggttctgtttatgtgatggattacatttattgatttgcgatgttgaaccagccttgcatcccagggatgaagcctacttgattgtggtggataagctttttgatgtgctgctggatttggtttgccagtattttattgaggaatttttccatcgatgttcatcagggatgttggcctgaaattttctttttttgttgtgtccctgccaggctttggtatcaggatgatgctagcctcataaaaagagttagggaggagtctctctttttcttttgcttggaaatttttaaaagtaatggtaccagctcctcttggtacctctggtagaattcagctgtgaatctgtctggtccagaagttttttttggctggtcagctattaattactgcttcaatttcagaacttgttattggacctaatagacatttatagaactctccaccccaaatcaacagaccatacattcttctcagcacaacataacacttattctataattgaccacataattggaaataaaacattcttcatcaaatgcaaaagagtgaagatcataacaaacagactgtcagaccacagggtaagcaaattagaactcaggattaagaaactcactgaaaaccacacaactacatggaaactgaacaacctgctcctgaatgactactgggtaaataatgaaattaaggcagaaataaagatgtttcttgaaaccaatgataataaagacacaacataccagtatctctggaacacagctaaagcagtgtttagagggaaatttatagcactaaatgcccacagtagaaagcaggagagatctaaaatccacaccataacaattgaaagaactagagaagcaagagtaaacaaattcaaaagctagcagaagacaagaaataattaagatcagagcattactgaaagatccagagacatgaaaaacccttcaaaaatcaatgaatccaggaggtgtttttttgaaaagattaacaaaatagatagaccactagccagactaataaagaagaaaagagagaagaatcatatagacacaataaaaaatgataaaggggatatcaccactgatcccacagaaatacaaactactatcagagaatactgtaaacacctctatgcaaataaagtagaaaatctagaagaaattgataaattcctggacacatataccctctcaagagttacagttttaaagatgactttgattttcaagttttaacaagagaatagaattgtttcttcaaatacactaatatatttttgtaggatattacataaaactgtagataaggatgtgtctaaataaattcatgcttaatttttaatcagtttaataatctagatattttcattcttttttttttttttttttttgagacagagtcttgctctgtcacccaggctcagtggcacgatctcggctcactgcaagctctgcctcccgggttcacgccattcgcctgcctcagcctcccaatattttcattcttaatggataattaccataatctagaaaaacaatgcaagacaattgcagacttttgttaaatatgaaaaagcaaggtaattctgtaccatttcatacctaaagtaaaaaaaaaaaaaaagaataacaaaaagttaactgtaccacctatttttattctaaatatggagcatagtattttatttaagtaaggaactgttatatgtatgcttacatttcctaagacatcttcagagcattacttttttcatgttcttaaatggctatacaagtagtgtaaatgttcaatagccagaattctgtatgtaatatatctaagtgttatatatgtatgcatatctaagtgcttattctctttccagagagattatgaattttcaggatttaggaagtccagttatattgcctcttgtgaccttgggttgtacacccactttgaaaatcagtttggcaatatgaagccatatgggagtagtgatgaaaaataaatggagaaaaaaccctatcttctgcttggtttactacctaacatttgggaatataatattaggtaaatatattcaaatatattgtggatcagaaagtgctgggtaagtggaaaataagaggtggcacttctgggcattttcttttgatataaccattttgaataaaccatttacacaaacatacgcatacaacctcttacctaggaacatcaaaactgaatatttaaattatgtagtcaggaaacatttcgactaccatgggccctaggagtctaaggcatgttgaaatgaataaaataccaatactttctggaagcattaaggaacctcatgcattcagtatttgctggaatttgtccttttggcattgaaaagagataatgggtgattacactgtcaaaacttctaattctcaaatataatcttcaaaggagtgcctgtgcagacataggcagaataattttaatggaccttgaagcatctggaaacatagaaagaaaccttgcatagcaacacaggaacattgctgatatttttgtttgttctctctctctctccctctctctctctctctctatatatatatatatatacacacacacactcacacacacacacacacacaaacacacacacacacacaagaatatattctgtgtggtcttgaatgagctattcaaagtctccatctgtcatttccatatctatggaatggaagtaattatgatgatacagcatgggtttagtttgagtgtgaaatcaggcactgcataaatggcacgcaaaagagtgcctggcaaatgataagtactcaatacttgtgttgggaagaccacaccactacatagcttcctgcctttcctcatcatggggaatagttccatatttaagagaatatgaaagcagtgaacagtatcttattttgaaaaaacttttcattatgacagatttcaaacatgcaaaagtagagacaatgagtgaatgaaggaatccccatgtgtctatcattcttattcaattatcaacaattatcagtatctacagtgttaagataaataatttgcaaaggtagtgaaaataccttggctcaaaactgaacatgttcagaaccccatatactttacatatctcttgaggtaatagatttccctatgtctctgtaacaaataaatatatttacctatattctgttgttagatagatgggtttgaggaaaacaaattcactaaatgcagaatcaacttttacaagaaaaagaaattataaatgaaaagcttttaaaattggttcagtttgcaaaactgatactaagaaaatatgtcaatacatttttcatcagaataataatattagctaaaatcatagattgcttctatgaaacaggcttagcatcatctcaattttcatagcaaccctattaattaaggaacactctaattatcattatatagatgaagaaattgaggttttgtaaatgtaaacaaattgtccaaggcaagtggcaagactagaatataaatccagggctgtctctagagattattcgtaaccactataacatatctcaaaacattttagtcattagcctaataaaccaagaataagaacgctatgaaaccttattttacttaaaaaaaagtttttttaaacttatttattttaattatatctgtaatgatacattttataaaatttataaatgtttaaaatgtcatccacatgggattaaaagaaaatcataaatctcatcagggacaaaatggaaggaattttttcagaccatttttctgttgaacacaatagaagtttagcttaaatatgcactttaattaccccatattttgattccttgatttcaacaaaaagttctgaggttacttagaaaaaaacctagcatactctaatgagattttcagtaaatagaaaaactctgtcatatatgccatacaaagacaaataaggttcaaagtaataaaatatgtcatccagcaaaatctatgctacagatttaatgatgatgacaataatttagccaaggccagctgctgtactaatagaccccaaatccttgtaatggcacaaaacaacagaagcttctttcttatttcatatagcagcatggggtggatgaataagtgtccatggacgctctctatgtagtcattcaagaacccaggtgggttggggctcttccatcttcaacagctgggttcctgaatgattgcatggaggagacaaccatggacgcttgttcatcagttcatcactagtagtcatcagtcaagaaatctaagaataagaatgccatggaggcagggttatcagataaaatgtagaacaacaatgctatatgtagaacatactagcactaaaatattattctgtatttacctgaaatttaaatttaactagattttccatattctgtttgctaaatatggcagcactacatgtaactatgtaagaaaaaaaaagaaactgtgcattaaccttttaaataaatatttttaatagtatcacccttaaatgcttagcacaatgctataattaactttagtcatcctgatatggaaaaagtagtgggataattatctcttaattatgtgacgaggaaagaaaatgtaattttgacctccccaagtgggtaaatgactaagattagaagccatgtccactcattactagatcctgcataatcttgcataaactaatatcaaatattttaacgtttgaaagtatgctaaatgtttatcagagcaggtgattttatttcattgagttctcatttactcatgtatatgttaatttatctattatgtattcaaaattactcaaatattgtattgagtgctctaggataaatattaataagtgaaaattaacactaatatatctctgattctttgcaatgtgtataattaattacctgaactggacactattgagagaaaagggatgcttttaataatcactccagaacaacaggggacagcttctggaaaacagggacaaataattattctgttggtccacctgattttaagttttccaataatagaatttcagaggagagctatcatagagctcatttaatataattgcactttatagacgaagaaatctgaggcccagtgaaaagaaataataatttctgtatattaatgtttctcacttaagtttatgacattttttaatgaagaatgattgatatgagactttttccatcgtatactcctcttgtactggaccaaagattgttgtcttctaaaacaatacgtacttcaactaagatcctaaagaccataattaaatcttaacacattaccaggtatctctatttattcttttagagcacaaatccactttttctaaacctattaagaactaagtatgtgttgcatgaagttttaaagtaatatttcatcttacaatccagaaaactcttttatattctaatggctctatgatgttgtagaacaaatgacatgtcattatttgaccgagaatggaactaaacccaaaaatggcccagccacagaatcttaaaatcttctattaatatggtctctggtaaatataatgagctgaaacacaacttctatggtatttttagagataaacattattttctcttgaaattctcacagtattcttttagtgcttacatgtcagatgtaggtttttaattgttaaacatgaaaaatactctgataatttaactactcctaaatttaagtgtatatatgctttcttttttgttcacagtaatgtaggagaagcagtgttaaatgatgctaggaatctgtactctagaaccggattgcctaggttcaaattctgatacaaaaactctatggcttttgaaacaaggcttacatttctaaccagcctattcatcactgttctcatctgtaaaatgggattcattatggtaataactacataatccagaacagataagtaaatgatttaattaatataaaacaattatcagagtgtatctgtcatgtattagacataataagcgtaagctttcatcagtatgttatttctttaaaaaaatccctcttttctctgccttataatttttggataattttttccaaatataaactggtaaattataaaccagttaaaatatcaggacattattgtttacaatatgtcgtttttaaaaactaattaagatcacattgcagtgaagaatgaccccatttaatatatattgacattatatttttgagcattttgtagattaaataaaacaaaaaaagatttaatacgaaacattttctatgtttgataaagttgcatgtatattatcactgttattttcttacctgttaaggaaaatattaccccaaatttaagttggaattttaaaaatgcatactattaagagtgaataagagtttatattctgcttgaattcctggtttatgacatacatacaaaatgagaaaggaaataaactctaggatgaatcttattttagtaagttaatggccttttcactgaaagtaggaaatatttcttctttcaaaagcacccaagatcaataaataatcttgatttaggaaatatgacaatgcaaacttttttcaaaatctgcttaaaaatgtaataaacaccatatcaatgggaatgtggtaataatcagaacaaattttctcaaaaatatatctttttttaagaatgagcaaatcaaatattttggactttattttttcccatggtattatcattaagaatatctaccccaatgtctgctttctccactttcatgcctaaactacagaacatcactggacaaaataataacatcttgctgatggggtccactacccatgacacttcagattagctctcagttggtgttttacagtattttatttccttgttttcattttctagtgactccattttacagttctttcagtgacttttctaaaatttaacagttctgagtgtcatcatactgcttctattccctctccctttaaccagatgatctcaaatccatcaatatggggaacattgaattctttttacttttttttttcctggttttgttctttagaagaacaagaagttcccttcaacagttttcaaccaaacatctgtcttcaagttacatcttcatcatctcaccatcctgaggattaaatgtgataatctatgtaaagcacttaacaaaatatcaggcacttaataataactattatctatcttttcccctagtgaatagtgggcaaagtttcaaccattgattatttgtttaaatacttttatttcagtaaaattgcttgcctttgaatatattttgccagtgctgaaaatcgtcatatgtcttctaatatccaaaaattactgaataaaatagtggttaggagcaaaggggcaggggccagacttcctaggcttaaatgtcacctttgccacttacaagctgtatgacaattgtcaaagacttaaacttgcctctgtatcctcatttggtaagttatttaaaaaaattatctctagtacagtaaagaagaagaagtatgataatatacacaaaatgcgtagaactgcctgccacatgctaagtactaacaatactagctgttattaattttcactgtgtctaaaattcattatttcagcaaatatctattgaaaccctattgaaaactaattgtgatgtgtgattttaaaggacaatgataattatattacttattgtctagacagcaaaaaaaaatacaaagatacaaatcaaagtacaaattatattaaaagctatgaggaagtgtcaggttatcagaggggatgttatcaaatttggaaaatcaggcaagctgagattcttagagtttgtaggtgctcattacaattttattttattttttctgatagtagtaataacatattttctgactatgataaaagccaaagtgttatctatgttctttacgtgaaagttcacttagattctctttctcatatggattatagattgtcccttattcaggaaagcaggacattttttggtctgaagagatttccctctgggtttcatttgtatcaaaagtgaattgtgaatcccaaaggcattcacattgtaagatgatactactagttgggatactgaggttccatttttattcctttaatagcttcctaattatagattccttttcctttaatttcagcctctatattaatgataaaactaatctgcaatctctctcaaataacttttatgctaaaagcaattaggtagatattttcttggctccttagagaggaaatagatttagatatgcagaaagagctttgtcattaaggacccaggtaactacgatcctctaacagttaatgacacaaggaactgggctcaagtagagacatatagtttaaagtgaaaacattttgacctgaaattccaaggtgcacctggtaattggtgaccttaacaagtggttatgacagcaaagtcctacagtttgtggaagatagaaagcaaattcactaaaaggaaaggtaagaggaggaagcaaagagaaagaatgcaacagagaagaagaaaaaagaataaaagttttccctaattaaatgcttactatcatccctttctcactgctattttataatattaattttatatattactaattaaaaactatataattatatacataattaatttttttctggttcttcaaaatatttgactaaataatttagaggtctcaaataaaaatggtaattttaagaccactgtgatcaagttctggaaatttttaaagatctaggaactttttaaagctttaatattttttgattatttttatattttatacaacatttttactaattccaaagaattataaatgactattatgtatttttatttggaaacattttggttatttgggaaaaagtaggtgttagtccagctatacattgtatgtttactgatggagaaaaaaaaaatccctcttgttattagacactgttattttactgatacccaaattctatatatttagatatggtttgggatgagctgtgtaacttatttggacatgtgaacatctttcactatatgttttgcatatgaaaaaaattatctcactttgccttttatttaatgattctttgaaatatattctttgtataaaccttataaagttgtcaaaattaattttcaattagaacatccataaaagtgccaagttattataactactgccttatgattcactcaaagtaaaggataaatccataacattttctattaattgaatagataatcttcattttacaaatgatttccatatagaattagtgttacgataggcagttcttagtgaaatcaatatcagcttatttcctattttgagtcatgaaccaaatcattgtcgtcatcattaaatctgtagcatagattttgctggatgatataatttattactttgaaccttatttgtctttgtatggcatataagacagggtttttctatttactgaaaatctcattagagtatgctaggtttttttctaagtaacctcagaactttttgttgaaatcaaggaatcaaaatatggggtaattaaagtgcatatttaagctaaacttctattgtgttcagcagaaaaatggtctgaaaaaattccttccattttgtccctgatgagatttatgatttttttaatcccatgttgatgacattttaaacatttataaattttcatgaaaaccattttcatatctgttaatataaattactctatcaataattattttttgtagcaaagaaaattaacaatactttgccatttttgttcactttggcctcctcctgatgtcattcttcattttatccacatttcattaatgtgcattttataaactatgctaaaaatagcctcttttgaccacatgtgactgtgactcagaaagtttacttgcatctgtgcttcaaatgactaaacatttttggtttctataatggcaggtgaagggaattaaagaagaggtaaagtaaatattttaactggtgtataatatggttagatcatcctgtttttgtgccttccactatgatttgattacttctaagataaatgatttcgagcatatttgacgtgcaaatatatttaagattcaactatcaacatttgcttagtaattaaaaatttagtttttcaaaaaatgctgagtgccattttgtagctgcagatgaaatttcctaatatcgggaaatgaattgtttttatttgtttgtgtgtctgtttgcattttcccatggcttgctggtgcttatactttatttttcctcaattataaaaatattgttctaaaagagaccttagagttctacacagcaacccacttacacagctcaggaaacatgggccaagagagatgaatgttctgcttcttcagtggttcttacccctgaatgtttgtggtaatcatcggaagcacttgagacccaaggtcagacttctaccactggcagctctaaaatccaagttcggggtgggtcctgaattgtaatttttaaagtcataggtcactggaatggtctgtcaaggctgaaaatacctactcatgcatttagtcttatagaaaggacataagggttattgtgatttcttactagtagaattgaaattagcattaaggcacttaatactcccttcactctaatattctgcctctgtttttttttttttttaatggaagttattctacttgcagacactcgtttttttttttttgtttttttgttttgttttgttttgttttgtttttttgatggaggctcattctgtcacccaggttggagtgcaacggtgcaatctcggctcggctcactgcaacctccacctcccaggttcaagcgattctcctgcctcagcctccctagtagctgggattacaggcgcctgccacgacgcttggctaatttttgtatctttagtagagatggggttttgccatgttggccatgctggtctggaactcctgaccttatgatcgacccgcctcggcctcccaaagtgctggtattacaggcgtgagccaccgcgcccggccgacactcttgttcatccagaaatctggtcaccagtttccttgccagtatctaccagcccattctgcaattctgacggaattattaaactcctctgtgccctaggggcactattgccttatgcacagataacatctaggagacactggtttttttttctggtatatgtaacaaaaaagtaacaaaagcaaattgctgaattgccgttacaatagtacttaattaatatgtatgtataactgtatatgtgtatatttatgtacttagtgtttctgtatttgtattgtttttataggaaatgcactgattctctaatattaacacaaatcctcttcattcaataggtgttaaaaatctctaacacacttgtcagtgctctcagatatgagtatcttttcattgtcaagtcgcagattcatgtctgatttcagaactttgtaaggccagtgaaagtgagtgacgaaggatcatttaaagacaaggtacaaatagcttgtagatatgtttgtatcatataaatttactgtttatgtggcattttgagatctcttacccaattgacaccctttggcaatgaaagtgaatccttcatttatccactggttttatttattcactatttttcattcattcaacatttattgagcattcactctgtaccagatgcaattctaaaagctgggaatacaaaagtagacaaaagtatacctcattctggtcctcatcacacctaatagctactggtcaagacagacattaaatatcatccaaataatcataaaatttactgtggtgagtgcaataatccagggatctaaactagtctgtgcaggagtggaggtggataaaggcccaggggcaggtaaggctctcctgagaaggtggcatttaggaagtagtaagtaggcaaagaggctgaataatagttcccatatgaagagagaagaataaatgaaaaggtgttggcactttcaaggaactgaaagaaaaagagggaaactggaaagtgacatttttacaagtatttgaaacctttttttttcatgtgtaaatgtgggattacttttacctttgcagaaataatatattggattgtaagagttgttttcctgaaggtcatcaaaaattagaatggccattttcctaatttgtcttattatggcagtctcagtattaacaacaggtccagccctctttcagaaaacaaaatattaatagtgacctttttactcctaaatgcattctagtttggatagtaaatcttatggttagcctatctagaataaaagaatatactttacccaattcttaaagttgcaaaggaaggaattctggtaaatgcatacataggaaagtgtagccttcttactttttgttttgtataatgtcttggtatagggaaaataagctaccaaataaccaaccaacattttaacttctcttattttcttccttttttccttccttttcttgttacttttcaaagtgcaagtaaccaatattatggaatgtctaccttatgcatggtgcagtgccaggcaatgggtatgtagtagttaaataggcaggaattagaacaaaaaaaaaaaaagaggaaacaagatgaatttgagggggtgctttgagagggcatgagagcagctataatatgtgctctggttaggagaagaaaaacatagtatttttaagatactgttggagactagtgaccttttcttaacgtttaaaaatataacaagagagtcagttttttctgattcttcatgtcctaagacacaagaatctcttgggcaaggtaggatcctccttggaggacagaaattagaaagtctgaatcagaatcctcagtatttggcagagggaaagaagatactggggaaaagagcatggcttattttcttttcatggtgacactacttttctattgggttgcaactaaatttgggaggttgacacagtatcataaaagcaaagaaagatatccagccctatagtctttttttttttcttttatgatgtaccttcctaggtcaactgagttttgcatattcctcattgctgggactgtagtcacctctctttttattctcactacaatgggaaataactgtcttcagatatcaacagtgtggattccttttaggctagatttcccacacttaaatatcctagtgttatatcagggacgaggagacaagacaaagagacatgccattttcatatttatatttttcccctctccaattctttattttccctccaattccagaaaactcctagcacttctcaaatgggaacatattaaaatcctagcaagtattttaaaaattctattgatagtctcaaggcttcagctttcggaaattaaaataattttgcttctctatttggttcttctttctttttcagtaaaagcacctacttgaagacatagagatcttttcccctactaagttgcccaacaggagatgatcagtttaaagaaaatgtggaaatacaaattcaatctgtaatgcatcacctggttttttccaacacacaagtaattgacctctttatattctgatttaagttcctaagtatttgtgtttgacaagatctgtagtgtctgacatagggcatcctcaaacagcacggtgccaaaaaatatggggtcagaatggttgggttttaattgtgactctgatagttactgattacggaaccttgggcacagtatttaactagtctatatatctgcttcctcatctgtaaattggaagttattataaagccttccatatagacttcttatggaaataaaatgaaataattcatacgaataccctggcacatattaggtactcagtgaatgttagctagtattacaaatgtctatgacaatttaattagcatgatgtctagaaccgccattatttgattagaattagtttagcaggaggatgaaaaaactgagaaggaccctaaaatgagtagccatgctgttttatttactcctttctttatttaagacatgaacaacactctaggtacagttttatattttaatggctatgttgtcttctcttcgtccttacatgaaataccctcaccctctcccccagaaaaaaagaaaagaatcattccattgttagaatgcagtttagagattataaactccaaactctgtacgtcattaaaatttatattcactgggaccttgaacttagtcttcaacttttacatgcaataccattagtttatttaagttcagttgattcactgtttgtctccctccacaaaccaacctcttgcatcagatgttctccttaacttgcttagaggcctgccatttctttggatttttttttccattttatcacctgaaacctcatttccatcttaagtaggcctcccatgcattgtctaagtatctccctaataattcccaacattttcttgtcccaactgcagcctagttctctctttaatagaattgttttacatccctctcttgttgcagatatgatttctctccaactccgtatgtaaaaaagataaggtgaaaagaggatattgtgagcaactcagtttcccttgccacttcccagattggtagtccaaccccttctctgtgtctattccctccagccatgctactattaatttattcttgtggtctccttgtatattcacagaggactttgcgttgtggctcatagtcttcttgttcaccataatttatgacatcatgagggctccttaagttttcttgagccttttggtattaacgtctgtcaatcccattctgctttagcaaactcactgtctgccatcacttctgggttttcttcctttgtttcctttgttctgcctggaactcactgcctttccaacattttcattgtctttatcccattctgcatctgtaccattatccctaaaacttgtcttcatctaataatttacttggctagtactatcctgagaagtctattagaactgctactacaaatttatggtcttaacttttttttttttattattatacattaagttttagggtacatgtgcacattgtgcaggttagttacatatgtatacatgtgccatgctggtgcactacacccactaactcgtcatctagcattaggtatatctcccaatgctgtccctcccccctccccccaccccacaacagtccccagagtgtgatattccccttcctgtgtccatgtgatctcattgttcaattcccacctatgagtgagaatatgcggtatttgttttttgttcttgcgatagtttactgagaatgatgatttccaatttcatccatgtccctacaaaggacattaactcatcattttttatggctgcatagtattccatgttgtatatgtgccacattttcttaatccagtctatcattgttggacatttgggttggttccaagtctttgctattgtgaataatgccgcaataaacatacgtgtgcatgtgtctttatagcagcatgatttatagtcctttgggtatatacccagtaatgggatggctgggtcaaatggtatttgtagttctagatccctgaggaatcgccacactgacttccacaatggttgaactagtttacagtcccagcaacagtgtaaaagtgttcctatttctccacatcctctccagcacctgttgtttcctgactttttaatgattgccattctaactggtgtgagatggtatttcatagtggttttgatttgcatttctctgatggccactgatgatgagcattttttcatgtgttttttggctgcataaatgtcttcttttgagaagtgtctgttcatgtccttcacccactttttgatggcgttgtttgtttttttcttgtacatttgtttgagttcattgtagattctggatattagccctatgtcagatgagttggttgcaaaaattttctcccatgttgtaggttgcctgttcactctgatggtagtttcttttgctgtgcagaagctctttagtttaattagatcccatttgtcaattttgtcttttgttgccattgcttttggtgttttagacatgaagtccttgcccatgcctatgtcctgaatggtaatgcctaggttttcttctagggtttttatggttttaggtctaacgtttaaatctttaatccatcttgaattgatttttgtataaggtgtaagggagggatccactttcagcttcctacatatggctagccagttttcccagcaccatttattaaatagggaatcctttccccattgcttgtttttctcaggtttgtcaaagatcagatagttgtagttatgcggcgttatttctgagggctctgttctgttccattgatctatatctctgttttggtaccagtaccatgctgttttggttactgtagccttgtagtatagtttgaagtcaggtagtgtgatgcctccagctttgttcttttggcttaggattgacttggcaatgcgggctcttttttggttccatatgaactttaaagtagttttttccaattctgtgaagaaaatcattggtagcttgatggggatggcattgaatctgtaaattaccttgggcagtatggccattttcacgatattgattcttcctacccatcagcatggaatgttcttccatttgtttgtatcctcttttatttccttgagcagtggtttgtagttctccttgaagaggtccttcacatcccttgtaagttggattcctaggtattttattctctttgaagcaattgtgaatgggagttcactcatgatttggctctctgtttgtctgttgttggtgtataagaatgcttgtgatttttgtacattgattttgtatcctgagactttgctgaagttgcttatcagcttaaggagattttgggctgagacaatggggttttctagatatacaatcatgtcatctgccaacagggacaatttgacttcctcttttcctaattgaataccctttatttccttctcctgcctaattgccctggccagaacttccaacactatgttgaataggagtggtgagagagggcatccctgtcttgtgccagttttcaaagggaatgcttccaggttttgcccattcagtatgatattggctgtgggtttgtcatagatagctcttattattttgaaatacgtcccatcaatacctaatttattgagagtttttagcatgatgggttgttgaattttgtcaaaggctttttctgcatctattgagataatcatgtggtttttgtctttggctctgtttatatgctggattacatttcttgatttgcgtatattgaaccagccttgcatcccagggatgaagcccacttgatcatggtggataagctttttgatgtgctgctggattcggtttgccagtattttattgaggatttttgcatcaattttcatcaaggttattggtctaaaattctcttttttggttgtgtctctgcctgactttggtatcaggatgatgctggcctcataaaatgagttagggaggattccctctttttctattgattggaatagtttcagaaggaatggtaccagttcctccttgtacctctggtagaattcggctgtgaatctatctggtcctggactctttttggttggtaaactattgattattgccacaatttcagctcctgttattggtctattcagagattcaacttcttcctggtttagtcttgggagagtgtatgtgtcgaggaatttatccatttcttctagattttctagtttatttgcgtagaggtgtttgtagtattctctgatggtagtttgtatttctgtgggatcggtggtgatatcccctttatcattttttattatgtctatttgattcttctctctttttttctttattagtcttgctagcggtctatcaattttgttgatcctttcaaaaaaccagctcctggattcattgattttttgaagggttttttgtgtctctatttccttcagttctgctctgattttagttatttcttgccttctgctagcttttgaatgtgtttgctcttgcttttctagttcttttaattgtgatgttagggtgtcagttttggatctttcctgctttctcttgtgggcatttagtgctataaatttccctctacacactgctttgaatgcgtcccagagattctggtatgttgtgtctttgttctcattggtttcaaagaacatctttatttctgccttcatttcgttatgtacccagtagtcattcaggagcaggttgttcagtttccatgtagttgagcggctttgagtgggattcttaatcctgagttctagtttgattgcactgtggtctgagagatagtttgttataatttctgttcttttacatttgctgaggagagctttacttccaagtatgtggtcaattttggaataggtgtggtgtggtgctgaaaaaaatgtatattctgttgatttggggtggacagttctgtagatgtctattaggtctgcttggtgcagagctgagttcaattcctgggtatccttgttgactttctgtctcgttgatctgtctaatgttgacagtggggtgttaaagtctcccgttattaatgtgtgggagtctaagtctctttgtaggtcactcaggacttgctttatgaatctgggtgctcctgcattgggtgcatatatatttaggatagttagctcttcttgttgaattgatccctttaccattatgtaatggccttctttgtctcttttgatctttgttggtttaaagtctgttttatcagagactaggattgcaacccctgcctttttttgttttccatttgcttggtagatcttcctccatccttttattttgagcctatgtgtgtctctgcacatgagatggttttcctgaatacagcacactgatggatcttgactctttatccaatttgccagtctgtgtcttttaattggagaatttagtccatttatatttaaatttaatattgttatgtgtgaatttgatcctgtcattatgattatagctggtgattttgctcgttagttgatgcagtttcttcctagtctcgatggtctttacattttggcatggttttgcagtggctggtaccggttgttcctttccatgtttagtgcttccttcaggagctcttttagggcaggcctggtggtgacaaaatcggtcagcatttgcttgtctgtaaagtattttatttctccttcacttatgaagcttagtttggctggatatgaaattctgggttgaaaattcttttctttaagaatgttgaatattggcccccactctcttctggcttgtagggtttctgccgagagatctgctgttagtctgatgggcttccctttgagggtaacctgacctttctctctggctgcccttaacattttttccttcatttcaactttggtgaatctgacaattatgtgtcttggagttgctcttcttgaggagtatctttgtggcgttctctctatttcctgaatctgaacattggcctgccttgctagattggggaagttctcctggataatatcatgcagagtgttttccaacttggttccattctccccatcactttcaggtacaccaatcagacgtagatttggtcttttcacatagtcccatatttcttggaggctttgctcatttgtttttattcttttttctctaaacttcccttctcgcttcatttcattcatttcatcttccattgctgataccctttcttccagttgatcgcattggctcctgaggcttctgcattcttcacgtagttctcgagccttggtttgcagctccatcagctcctttaagcacttctctgtattggttattctagttatacattcttctaaatttttttcaaagttttcaacttctttgccttcggtttgaatgtccttccatagctcagagtaattcgatcgtctgaagccttcttctctcagctcgtcaaagtcattctccatccagctttgttctgttgctggtgaggaactgcgttcctttggaggaggagagacgctctgtgttttagagtttccagtttttctgttctgttttttccccatctttgtggttttatctacttttggtctttgatgatggtgatgtacaggtgggtttttggtgtggatgtcctttctgtttgttagttttccttgtaacagacaggaccctcagctgcaggtctgttggaataccctgctgtgtgaggtgtcagtgtgcccctgctggggggtgcctcccagttaggctgctcgggggtcaggggtcagggacccacttgaggaggcagtctgcaggttctcagatctccagctgtgtgctgggagaaccactcctctcttcaaagctgtcagacagggacatttaagtctgcagaggttactgctgtctttttgtttgtctgtgccctgcccccagaggtggagcctacagaggcaggcagacctccttgagctgtggtgggctccacccagttcgagcttcctagctgctttgtttacctaagcaagcctgggcaatggcggacgcccctcccccagcctcgctgctaccttgcagtttgatctcagactgctgtgctagcaatcagcgagattccgtgggcataggaccctccgagccaggtgtgggatatagtctcgtggtgcgccgttttttaagccggtctgaaaagcgcaatattcgggtgggagtgacccgattttccaggtgcgtccgtcacccctttctttgactcggaaagggaactccctgaccccttgcgcttcccaggtgaggcaatgcctcgccctgcttcggctcgcgcacggtgcgctcacccactggcctgcgcccactgtctggcactccctagtgagatgcacccagtacctcagatggaaatgcagaaatcacccgtcttctgcgtcgctcacgctgggagctgtagactggagctgttcctattcggccatcttggctcctcctggtcttaacttttatgaactcttatacagccacttgtccaattttccaaaacagcaattctaaacttttctctccagctaattattaaacttaatatcctatcctgatgctattggaagattgtcactccagagac

SEQ ID NO: 10512 - DNA, 4822 bp, Homo sapiens
attttttttttatactttaagttctagggtacatgtgcacaatgtgcaggcttgttacataggtatacatgtgccatgttggtgtgctgtacccattaacttgtattttacattaggtatatctcctaatgctatccctcccccttccctccaccccacgacaggccctggtgtgtgatgttccccaccctgtgtccaagtgttctcactgtccaattcccacctatgagtgagaacatatggtgtttggttttctgtccttgctatagtttgctcagaatgatggtttccagcttcatccatgtccctgcaaaggacatgaactcatccttttttatggctgcatagtattccatggtgtatatgtgccaccacattttcttaatccagactatcattgatggacatttgggttggctccaagtctttgctattgtgaatagtgccgcaatgtgggcatgtgtctttatagcagcatgatttataatctttgggtatatacccattaatgggatggctgggtcaaatggtatatctagttgtagatccttgaggaatcgccacactgtcttccacaatggttgaactagtttacagtcccaccaacagtgtaaaagtgttcctatttctccacatcctctccagcacctgttgtttcctgactttttaatgattgccattctaactggtttgagatggtatctcattgtggttttgatttgcatttctctgatgaccagtgatgatgagcattttttcatgtgtctgttggctgcataaatgtcttcttttgagaagtgtctgttcctatcttttgccccctttttgatggggttgtttgatttttttcttgtaaatttgtttaagttctttgtagattctggatattagccctttgtcagacgggtagattgtaaaaatgttctcccattctgtaggttgcctgttcactctgatggtagtttcttttgctatgcagaagctctttagtttaattagatctcctttgtcaattttggcttttgttgccattgcttttggtgttttagtcatgaagtccttgcccatgcctatgtcctgaatggtattgcctaggttttcttctagggtttttatggttttaggtctaatatttaagtctttaatccatcttgaattaatttttgtataagatgtaaggaagggatccagtttcagctttctacatatggctagccagttttcccagcaccatttattaaatagggaatcctttccctatttcttgtttttgtcaggtttgtcaaagatcagatggttgtagatgtgtggtattatttctgagggccctgttctgtaccattggtctgtatctctgttttggtaccagtaccatgctgttttgaatactgtagccttgtagtatagtttgaagtcaggtagcgtgatgtctccagctttgttcttttggcttaggattgtcttggcaatgtgggctcttttttggttccatataaactttaaagtagttttttccaattctgtgaagaaagtcattggtagattgatggggatagcattgaatctatgaattactttgggcagtatggccattttcacgatattgattcttcctatctatgagcatggaatgttcttccatttgtttgtgtcctcttttatttcattgaatagtggtttgtagtcaaaccttgaagaggtccttcacaccccttataagttggattcctaggtattttattctctttgaagcaattgcgaatgggagttcactcatgatttggctctctgtttgtctgttattggtgtataggaatgcttgtgatttttgcacattgattttgtatcctgagactttgctgaagttacttatcagcttaaggagattttgggctgagacgatggggttttctaaatatataatcatgtcatctgcaaacagggacaatttgacttcctcttttcctaattgaataccctttatttcttcctcctccctgattgccatggccagaacttccaacacttcattgaataggagtggtgagagagggcatccctgtcttatgccagttttccaagggaatgcttccagttttttcccattcagtatgatattggctgtgggtttgtcataaacagctcttattattttgatgtacgtcccgtcaatacctagtttattgagagtttttaggatgaagggctgttgaattttgttgaagaccttttctgcatctattgagataatcatgtggtttttatctttggttctgtttatatgatggattacatgtattgatttgcatatgttgaaccagccttgcatcccagggatgaagcccacttgatcatggtggataagctttttgatgtgctgctggattcagtttgccagtattttattgaggatttttgcattgatgttcatcagggatattggtctaaaattctctttttttgttgtgtctctgccaggctttggtatcaggatgatgctggcctcataaaatgagttagggaggattccctctttttatattggttggaatactttcagaaggaatggtaccagctcctctttgtacctctggtagaattcggctgtgaatctgtctggtcttggatttttttttttgattggtaggctattaattattgcctcaatttcagagcctgttgttggtctattcagggattcaacttcttcctggtttagtcttgggagggtgtatgtgtccaggaatttatccatttcttctagattttctagtttatttgcgtagaggtgtttgtagtattctctgatggtagtttgtatttctgtgggatcggtggtgataccccctttataattttttattgtgtctatttgattctttcttttctctttattagtcttgctagttgtctatcaattttgttgatcttttcaaaaaaccaactcctggattcattgatattttgaagggttttttgtgtctctatctccttcagttctgctctgatcttagttatttcttgccgtctgctagcttttgaatgtgtttgctcttgcttctctagttcttttaattatgatgttagggtgtcaattttagatctttcctgcttcctcttgttggtatttagtgatataattttccctctacagattgctttaaaagtgtcccagagattctggtatgttttgtctttgttcttattggtttcaaagaacatctttatttctgccttcattttgttatgtacccaatagtcattcaggagcacattgtttagtttccatgtagttgagcagttttgagtgagtttcttaatcctcaattccagtttgattgcactgtggtctgagagacagtttgttataatttctgttcttttacattttctgaggagtgctttacttccaactatgtggtcattttggtataagtgcgatgtggtgctgagaagaatgtatattctgttgatttggggtggagagttctgtaatgtctattaggtctgcttggtgcagagctgagttcaattcctggatatccttgttaactttctgtctcattgatctgtctaatgttgacagtgagatgttaaagtctcccattatttttgtgtgggagtgtacatctctttgtaggtctctaaggacttactttatgaatctgggtgctcctctgttgggtgcatatatatttaggatagttagcgcttcttgtcgaattgatccctttacaattatataatggccttgtttgtctcttttggtcttagttggtttaaagtctgtttgatcagagactaggattgcaacccctgctttttttgttttccatttgcttggtagatcttcctccatccctttattttgagcctgtgtgtgtctctgcacctgagatgagtctcctgaatacagcacactgatggatcttaactctttatccaatttgccagtctgtgtcttttaactggagcatttagcccatttacatttaaggttaatattgttatgtgtgaatttgatcccatcattatgatgttagctggttattttgctcactagttgatgcagtttcttcctagcattgatggtctttacaatttgtcatgtttttgcagtggctggtaccggttgtgcctttccatgtttagtgcttccttcaggagctcttttagggcaggcctggtggtgacaaaatctctcagcatttgcttgtctgtaaaggattttatttctccttcacttatgaaacttagtttggctggatatgaacttctgggttgaaaattgtttcccttaagaatgttgaatattggcccccactctcttctggcttgtagagtttctgccaagagatctgctgttagtctgatgggcttgcctttgtgggtaacccaacctttctttctggttgcccttaatattttttccttcatttcaactttggtgaatctgacaattatgtgtcttggagttgctcttctcgaggaatatctttgtggtgttctttgtatttcctgaatttgaatattggcctgtctttctagattggggaagttctcctggataatatcctgaagcatgttttccaacttggttccattcccctcatcactttaaggtataccagtcagatgtagatttggtcttttcatatagtcccatatttcttggaggctttgttcttttctttttactctttttttctctaaacttctcttctcacttcatttcattcatttaatcttcaatcactgataccctttcttccacttgaacgaatcggctacagaagcttgtacatgcgtcccgtaattctcg

SEQ ID NO: 10513 - DNA, 5381 bp, Homo sapiens
tatgtatattattatttttttctttttttttttattgtactttaagttttagggtacatgtgcacattgtgcaggttagttacatatgtatacatgtgccatgctggtgcgctgcacccactaactcatcatctagccttaggtatatctcccaatgctatccctccccgctccccccaccccaccacagtccccagagtgtgatattccccttcctgtgtccatgtgatctcattgttcaattcccacctatgagtgagaatatgcggtgtttggttttttgttcttgcgatagtttactgagaatgatgatttccaatttcatccatgtccctacaaaggacatgaactcatcattttttatggctgcatagtattccatggtgtatatgtgccacattttcttaatccagtctatcattgttggacatttgggttggttccaagtctttgctattgtgaataatgctgcaataaacatacgtgtgcatgtgtctttatagcagcatgatttatagtcatttgggtatatacccagtaatgggatggctgggtcaaatggtatttctagttctagatccctgaggaatcaccacactgacttccacaatggttgaactagtttacagtcccaccaacagtgtaaaagtgttcctatttctccacatcctctccagcacctgttgttttctgtctttttaatgattgccattctaactggtgtgagatgatatctcatagtggttttgatttgcatttctctgatggccagtgatgatgagcattttttcatgtgttttttggctgcataaatgtcttcttttgagaagtgtctgttcatgtccttcgcccactttttgatggggttgtttgtttttttcttgtaaatttgcttgagttcattgtagattctggatattagccctttgtcagatgagtaggttgcgaaaattttctcccattctgtaggttgcctgttcactctgatggtagtttcttttgctgtgcagaagctctttagtttaattagatcccatttgtcaattttggcttttgttgccattgcttttggtgttttggacatgaagtccttgcccacgcctatgtcctgaatggtaatgcctaggttttcttctagggtttttatggttttaggtctaacgtttaaatctttaatccatcttgaattgatttttgtataaggtgtaaggaagggatccagtttcagctttctacatatggctagccagttttcccagcaccatttattaaatagggaatcctttccccattgcttgtttttctcaggtttgtcaaagatcagatagttgtaggtatgcggcgttatttctgagggctctgttctgttccattgatctatatctctgttttggtaccagtaccatgctgttttggttactgtagccttgtagtatagtttgaagtcaggtagtgtgatgcctccagctttcttcttttggcttaggattgacttggtgatgcgggctcttttttggttccatatgaactttaaagtagttttttccaattctgtgaagaaagtcattggtagcttgatggggatggcattgaatctgtaaattatcttgggcagtatggccattttcacgatattgattcttcctacccatgagcatggaatgttcttccatttgtttgtatcctcttttatttccttgagcagtggtttgtagttctccttgaagaggtccttcacatcccttgtaagttggattcctaggtattttattctctttgaagcaattgtgaatgggagttcactcatgatttggctctctgtttgtctgttgttggtgtataagaatgcttgtgatttttgtacattgattttgtatcctgagactttgctgaagttgcttatcagcttaaggagattttgggctgagatgatggggttttctagataaacaatcatgtcatctgcaaacagggacaatttgacttccgcttttcctaattgaataccctttatttccttctcctgcctgattgccctggccagaacttccaacactatgttgaataggagtggtgagagagggcatccctgtcttgtgccagttttcaaagggaatgcttccagtttttgcccattcagtatgatgttggctgtgggtttgtcatagatagctcttattattttgaaatacgtcccatcaatacctaatttattgagagtttttagcatgaagggttgttgaattttgtcaaaggctttttctgcatctattgagataatcatgtggtttttgtctttggctctgtttatatgctggattacatttattgatttgcgtatattgaaccagccttgcatcccagggatgaagcccacttgatcatggtggataagctttttgatgtgctgctggattcggtttgccagtattttattgaggatttttgcatcaatgttcatcaaggatattggtctaaaattctcttttttggttgtgtctctgcccggctttggtatcagaatgatgctggcctcataaaatgagttagggaggataccctctttttctatcgattggaatagtttcagaaggaatggtaccagttcctccttgtacctctggtagaattcggctgtgaatccatctggtcctggactctttttggttggtaaactattgattattgccccaatttcagctcctgttattggtctattcagagattcaacttcttcctggtttagtcttgggagagtgtatgtgtcgaggaatgtatccatttcttctagattttctagtttatttgcgtagaggtgtttgtagtattctctgatggtagtttgtatttctgtgggatcagtggtgatatcccctttatcattttttattgtgtctatttgattcttctctctttttttctttattagtcttgctagcggtctatcaattttgttgatcctttcaaaaaaccagctcctggattcattgattttttgaagggttttttgtgtctctatttccttcagttctgctctgattttagttatttcttgccttctgctagcttttgaatgtgtttgctcttgcttttctagttcttctaattgtgatgttagggtgtcaattttggatctttcctgctttctcttgtgggcatttagtgctataaatttccctctacacactgctttgaatgcatcccagagattctggtatgttgtgtctttgttctcgttggtttcaaagaacatctttatttctgccttcatttcgttatgtacccagtagtcattcaggagcaggttgttcagtttccatgtagttgagcggctttgagtgagattcttaatcctgagttctagtttgattgcatggtggtctgagagacagtttgttataatttctgttcttttacatttgctgaggagagctttacttccaagtatgtggtcaattttggaataggtgtggtgtggtgctgaaaaaaatgtatattctgttgatttggggtggagagttctgtagatgtctattaggtctgcttggtacagagctgagttcaattcctgggtatccttgttgactttctgtctcgttgatctgtctaatgttgacagtggggtgttaaagtctcccattattaatgtgtgggagtctaagtctctttgtaggtcactcaggacttgctttatgaatctgggtgctcctgtattgggtgcatatatatttaggatagttagctcctcttgttgaattgatccctttaccattatgtaatggccttctttgtctcttttgatctttgttggtttaaagtctgttttatcagagactaggattgcaacccctgcctttttttgttttccatttgtttggtagatcttcctccatccttttattttgagcctatgtgtatctctgcacgtgagatgggtttcctgaatacagcacactgatgggtcttgactctttatccaacttgccagtctgtgtcttttaattggagcatttagtccatttacatttaaagttaatattgttatgtgtgaatttgatcctgtcattatgatgttagctggtgattttgctcgttagttgatgcagtttcttcctagtctcgatggtctttacattttggcatgattttgcagcggctggtaccggttgttcctttccatgtttagcgcttccttcaggagctcttttagggcaggcctggtggtgacaaaatctctcagcatttgcttgtctgtaaagtattttatttctccttcacttatgaagcttagtttggctggatatgaaattctgggttgaaaattcttttctttaagaatgttgaatattggcccccactctcttctggcttgtagggtttctgctgagagatccgctgttagtctgatgggcttccctttgagggtaaaccgacctttctctctggctgcccttaacattttttccttcatttcaactttggtgaatctgacaattatgtgtcttggagttgctcttctcgaggagtatctttgtggcgttctctgtatttcctgaatctgaacgttagcctgccttgctagattggggaagttctcctggataatatcctgtagagtgttttccaacttggttccattctccgcatcactttcaggtacaccaatcagacgtagatttggtcttttcacatagtcccatatttcttggaggctttgctcatttctttttattcttttttctctaaccttcccttctcgcttcatttcattcatttcatcttccattgctgataccctttcttccagttgatcgcatcggctcctgaggcttctgcattcttcacgtagttctcgaaccttggttttcagctccatcagctcctttaagcacttctctgtattggttattctagttatacattcttctaaatttttttcaaagttttcaacttctttgcctttggtttgaatgtcctcccgtagctcagagtaatttgatcgtctgaaggcttcttctctcagctcgtcaaagtcattctccaaccagctttgttccgttgctggtgaggaactgcgttcctttggaggaggagaggcgctctgcgttttagagtttccagtttttctgttctgttttttccccatctttgtggttttatctacttttggtctttgatgatggtgatgtacagatgggttttcggtgtggatgtcctttctgtttgttagttttccttctaacagacaggaccctcagctgcaggtctgttggaataccctgccgtgtgaggtgtcagtgtgcccctgctggggggtgcctcccagttaggctgcttgggggtcaggggtcagggacccacttgaggaggcagtctgccct

SEQ ID NO: 10514 - DNA, 26439 bp, Homo sapiens; identical to SEQ ID NO: 5807

SEQ ID NO: 10515 - DNA, 6025 bp, Homo sapiens
tttgagtcttttttttttattattatactttaagttttagggtacatgtgcacaatgtgcaggttagttacatatgtatacatgtgccttgctggtgcgctgcacccactaactcgtcatctagcattaggtatatctcccaatgccatccctccccctccccccaccccacaacagtccccagagtgtgatgttccccttcctgtgtccatgtgttctcactgttcaattcccacctatgagtgagaatatgcggtgtttggttttttgttcttgtgatagtttactgagaatgatgatttccaatttcatccatgtccctacaaaagacatgaactcatcttttatggctgcatagtattccatggtgtaaatgtgccacattttcttaatccagtctatcattgttggacatttggcttggttccaagtctttgctattgtgaatagtgccacaataaacatacatgtgcatgtgtctttatagcagcatgatttatagtcctttgggtatatacccagtaatgggatggctgggtcaaatgatatttctagttctagatccctgaggaattgccacactgacttccacaagggttgaactagtttacagtcccaccaacagtgtaaaagtgttcctatttctccacatcctctccagcacctgttgtttcctgactttttaatgattgccattctaactggtgtgagatggtatctcattgtggttttgatttgcatttctctgatggccagtgatggtgagcattttttcatgtgttttttggctgcataaatgtcttctttcgagaagtgtctgttcatgtccttcacccactttttgatagggttgtttgttttttttcttgtaaatttgtttgagttcattgtagattctggatattagccctttgtcagatgagtaggttgcaaaaattttctcccattttggaggttgcctgttcactctgatagtagtttcttttgctgtgcagaagctctttagtttaattagatcccatttgtcaattttggcttttgttgccattgcttttggtgttttagacatgaagtccttgcccatgcctatgtcctgaatggtaatgcctaggttttcttctaggggttttatggttttaggtctaacgtttaagtctttaatccatcttgaattgatttttgtataaggtgtaaggaagggatccagtttcagctttctacatatggctagccagttttcccagcaccatttattaaatagggaatcctttccccattgcttgtttttctcaggtttgtcaaagatcagatagttgtagatgtgcggcgttatttctgagggctctgttctgttccattggtctatatctctgttttggtaccagtaccatgctggtttggttactgtagccttgtagtatagtttgaagtcaggtagcatgatgcctccagctttgttcttttggcttaggattgacttggcaatgcgggctcttttttggttccatatgaactttaaagtagttttttccaattctgtgaagaaagtcattggtagcttgatggggatggcattgaatctgtaaattgccttgggcagtatggccattttcacgatactgattcttcctacccatgagcatggaatgttcttccatttgtttgtatcctcttttatttcattaagcagtggtttgcagttctccttgaagaggtccttcacatcccttgtaagttggattcctaggtattttattctctttgtagcaattgtgaacgggagttcactcatgatttggctctctgtctgttgctggtgtataagaatgcttgtgatttttgtacattgattttgtatcctgagactttgctgaagttgcttatcagcttaaggagattttgggctgagacaatggggttttctagatatacaatcatgtcgtctgcaaacagggacaatttgacttcctcttttcctaattgaataccctttatttccttctcctgcctaactgccctggccagaacttccaacactatgtcgaataggagtggtgagagagggcatccctgtcttgtgccagttttcaaagggaatgcttccagtttttacccagtcagtatgatattggctgtgggtttgtcatagatagctgttattattttgagatacatcccatcaatacctaatttattgaaagtttttagcatgaagtgttgttgaattttgtcaaaggctttttctgcatctattgagataatcatgtggtttttgtctttggttctgtttatatgctggattacatttactgatttgcgtatattgaaccagccttgcatcccagggatgaagcccacttgatcatggtggataagctttttgatgtgctgctggattcagtttgccagtattttattgaggatttttgcatcaatgttcatcaaggatattggtctaaaattctctttttttgttgtgtctctgcctggctttggtatcaggatgatgctggcctcataaaatgagttagggaggattccctctttttctattgattggaatagtttcagaaggaatggtaccagttcctccttgtacctctggtagaattcggctgtgaatccatctggtcctggactctttttggttggtaagctattgattattgccacaatttcagatcctgttattggtctattcagaaattcaacttcttcctggtttagtcttgggagggtgtatgtgtcgaggaatttatccatttcttctagattttctagtttatttgcatagaggtgtttgtagtattctctgatggtagtttgtatttctgtgggattggtggtgatatcccctttatcattttttattgtgtctatttgattcttctctctttttttctttattagtcttgctagcggtctatcaattttgttgatcctttcaaaaacaaccagctcctggattcattaattttttgaagggttttttgtgtctctatttccttcagttctgctctgattttagttatttcttgccttctgctagcttttgaatgtgtttgctcttgcttttctagttcttttaattgtgatgttagggtgtcaattttggatctttcctgctttctcttgtgggcatttagtgctataaatttccctctacacactgctttgaatgcgtcccagagattctggtatgttgtgtctttgttcttgttggtttcaaagagcgtctttatttctgccttcatttcgttatgtacccagtagtcattcaggagcaggttgttcagtttccatgtagttgagcggttttgagtgagattcttaatcctgagttctagtttgattgcactgtggtctgagagatagtttgctataatttctgttcttttacatttggtgaggagtgctttacttccaagtatgtggtcaattttggaatagccgtggtgtggtgctgaaaaaaatgtatattctgttgatttggggtgcagagttctgtagatgtgtattaggtctgcttggtgcagagctgagttcaattcctgggtatccttgttgactttctgtctcattggtctgtctaatgttgacagtggggtgtgaaagtctcccattattaatgtgtgggagtttaagtctctttgtaggtcactcaggacttgctttatgaatctgggtgctcctgtattgggtgcatatatatttaggatagttagctcttcttgttgaattgatccctttaccattatgtaatggccttctttgtctcttctgatctttgttggtttaaagtctgttttatcagagactaggattgcaacccctgtctttttttgttttccatttgcttggtagatcttcctccatccttttattttgagcctatgtgtgtctctacatgtgagatgggtttccttaatacagcacactgatgggtcttgactctgtatccaatttgccagtctgtgtctttcaattggagcatttagtccatttacatttaaagttaatattgttatgtgtgaatttgatcctgtcattatgatgttagctggttattttgctcgtttgttaatgcagtttcttcctagtctcgacggtctttacattttggcatgattttgcagcggctggtactgattgttcctttccaagttaagcacttccttcaggaactcttttagggcaggcctggtggtgacaaaatctctcagcatttgcttgtctgtaaaggattttatttctccttcacttatgaagcttagtttggctggatatgaaattctgggttgaaaattcttttctttaagaatgttgaatattggcccccactctcttctggtttgtagagtttctgccaagagatccgctgttagtctgatgggcttccatttgagggtaacccgacctttctctctggctgcccttaacattttttccttcatttcaactttggtgaatctgacaattatgtgtcttggagttgctcttctcaaggagtatctttgtggcgttctctgtatttcctgaatctgaatgttggcctgccttgctagattggggaagttctcctggataatatcctgcagagtgttttccaacttggttccattctccccgtcactttcaggtacaccaatcagacatagatttggtcttttcacatagtcccatatttcttggaggctttgctcgtttctttttattcttttttctctaaacttcccttctcgcttcatttcattcatttcatcttccatcgctgataccctttcttccagttgatcgcatcagctcctgaggcttctgcattcttcatgtagttctcgagccttggttttcagctccatcagctcctttaagcacttctctgtattggttattctagttatacattcttctacatttttttcaaagttttcaacttctttgcctttggtttgaatgtcctcccatagctcagagtaatttgatcgtctgaagccttctctcagctcgtcagagtcattctccatccagctttgttccgttgctggtgaggaacagcgttcctttggaggaggagaggcactctgctttttagagtttccagtttttctgctctgttttttccccatctttgtggttttatctacttttggtctttgatgatggtgatgtacagatgggtttttggtgtggatgtcctttctgtttgttagttttccttctaacagacaggaccctcagctgcaggtctgttggagtaaccggctgtgtgaggtgtcagtgtgcccctgctggggggtgcctcccagttaggctgctcgggcgtcaggggtcagggacccacttgaggaggcagtctgcccgttctcagatctccagctgcgtgctgggagaaccactgctctcttcaaagctgtcagacagggacatttaagtctgcagaggttactgctgtctttttgtttgtctgtgccctgcccccagaggtggagcctacagaggcaggcaggcctccttgagctgtggtgggctccacccagtttgagcttcccggctgctttgtttacctaagcaagcctgggcaatggcgggtgcccctcccccagcctcgccgccgccttgcagtttgatctcagactgctgtgctagcaatcagcgagactccgtgggtgtaggaccctccgagccaggtgcaggatataatctcctggtgcgccattttttaagcccgtcagaaaagcgcagtattcaggtgggagtgacccgattttccaggtgccatctgtcacccctttctttgactaggaaagggaactccctgaccccttgcacttcccgagtgaggcaatgcctcgccctgcttcagctcgcgcacggtgcacacacccactgacctgcgcccactgtctggcactccctagtgagatgaacccggtacctcagatggaaatgcagcaatcatgcgtcttctgcgtcgctcacgctgggagctgtagaccagagctgttcctattcagccatcttcgcc

SEQ ID NO: 10516 - DNA, 5676 bp, Homo sapiens
aatgtgattttacatttttttttttattattatactttaagttctagggtacatgtgcacaggtgcaggtttgttacatatgtatacatgtgccatgttggtgtgctgcacccattaactcgtcatttacattaggtatatctcctaatgctatccctcccccctccccccaccccaaaacaggccccagtgtgtgatgttccccttcctgtgtccaagtgttctcattgttcaattcccacctatgagtgagaacatgcgacgtttggttttttgtccttgcgatggtttgctgagaatgatggtttccagcttcatccatgtccctagaaaggacatgaactcatcattgtttatggctgcatagtattccatggtgtgtatgtgccacattttcttaatccagtctatcattgttggacatttgggttggttccaggtctttgctattgtgaatagtgctgcaataaacatacgtgtgcatgtgtctttatagcagcatgatttataatcctttgagtatatacccagtaatgggatggctgggtcaaatggtatttctggttctagatccctgaggaatcgccacactgtcttccacaatggttgaaccagtttacagtcccaccaacagtgtaaaagttcctatttctccgcatcctctctagtacctgttgtttcctgactttttaatgatcgccattctaactggtgtgagatggtatctcattgtggttttgatttgcatttctctgatggccagtgatgatgagcattttttcatgtgtctgttggctgcataaatgtcttcttttgagaagtgtctgttcatatccttcacccacttgttgatggggttgttttttttcttgtgaaattgtttgagttctttgtagattctggatattagccctttgtcagatgagtagattgcagaaattttctcccattctgtaggttgcctgttcactctgatggtagtttcttttgctgtgcagaagctctttagtttaattagatcccatttgtcaattttggcttttgttgccattgcttttggtggtttagacatgaagtccttgcccatgcctatgtcctgaatggtaatgcctaggttttcttctagggtttttatggttttaggtctaacgtttaagtctttaatccatcttgaattaatttttgtataaggtgtaaggaagggatccagtttcagctttctacatatggctaaccagttttcccagcaccatttgttaaatagggaatcctttccccatttctcgtttttgtcaggtttgtcaaaggtcagatggttgtagatgtgtggtattatttctgagggctctgttctgttccattggtctatatctctgttttggcaccagtaccatgctgttttggttactgtagcctggtagtatagtttgaagtcaggtagcgtgatgcttccagctttgttcttttggcttaggattgacttggcaatgcaggctcttttttggttccatatgaactttaaagtagtttttcccaattctgtgaagaaagtcattggtagcttgatggggatggcattgaatctataaattaccttgggcagtatggcccgttttcacgatattgattcttcctacccatgagcatggaatgttcttccatttgtttgtatcctcttttatttcattgagcagtggtttgtagttctccttggagaggtccttcacatcccttgtaagttggattcctaggtattttattctctttgaagcaattgtgaatgggatttcactcatgatttggctctctgtttgtctgttattggtgtataagaatgcttgtgatttttgcacattgatttttgtatcctgagactttgctgaagttgcttatcaccttgagattctgggctgagacgatggggttttctagatatacaatcatgttatctgcaaacagggacaatttgacttcttcttttcctaactgaataccctttatttctttctcctgcctaattgccctggccagaacttccaacactgtgttgaataggagtggtgagagagggagggcatccctgtcttgtgccagttttcaaagggaatgcttccagtttttgcccattcagtatgatattggctgtgggtttgtcataaatagctcttattgttttgagatacatcccatcaatacctaatttattgagagtttttagcatgaagggctattgaattttgtcaaaggccttttctgcatctattgaaatgatcatttagtttttgtcattggttctgtttatatgctggattacatttattgatttgtgtatgttgaaccagccttgcatcccagggatgaagcccacttgatcaaggtggataagctttttgatgtgctgctggattcagtttgccagtattttattgaggatttttgcatcaatgttcatcagggatattggtctaaaattctctttttttgttgtgtctctgctaggctttggtatcaggatgatgttggcctcataaaatgagttagggaggattccctctttttctattgattggaatagtttcagaaggaatggtaccagctcctccttgtacctctggtagaattcggctgtgaatccgtctggtcctggactttttttggttggtaagctattaattattgcctcaatttcagagcctgttattggtctattcagagattcaacttcttcctggtttagtcttgggagagtgtatgtgtcaaggaatttatccatttcttctagattttctagtttatttgcgtaggggtgttcatagtattctctgatggtagtttgtatttctgtgggatctgtggtgatatcccctttatcaatttttattgtgtatatttgattcttctctcttttcttctttcttactcttgctagcggtctatcaattttgttgatcttttcaaaaaaccagctcctggattcattgatttttttgaagggttttttctgtctctatcttcttcagttctgctctgatcttagttatttcttgccttctgctagcttttgaatgtgtttgctcttgcttctctagttcttttaattgtgatgttagggtgtcaattttagatctttcctgctttctcttgtgggcatttagtgctataaatttccctctacacactgctttaaatgtgtcccagagattctggtatattgtgcctttattctcattggtttcaaagaacatctttatttctgccttcatttcattatgtacccagtagtcattcaggagcaggttgttcagtttccatgtagttgagcggttttgagtgagtttcttaatcctgagttctagtttgattgcactgtggtctgagagacagtttgttataatttctgttcttttacatttgctgaggagtgctttacttccaactatgtggccaattttggagtaagtgcagtgtggtgctgagaagaatgtatattctgttgatttggggtggagagttctgtagatgtctattaggtccacttggtgcagagctgagttcaatttctggatatccttgttaaccttctgtctcattgatctgtctaatgttgacagtggggtgttaaagtctcccattattattgtgtgggagtctaagtctctttgtaggtctctaaggacctgctttatgaatctgggtgctcctatattgggtgcatgtatatttaagatagttagctcttcttgttgaattgatccctttaccattatgtaatggccttctttgtctcttttgatctttgttggtttaaagtctgttttatcagagactaggattgcaacccctgcctctttttgttttccatttgcttggtagatcttcctccatccctttattttgagcctatgtgtgtctctgcacatgagatgggtttcctgaatatagcacactgacgggtcttgactcttcatccagtttgccagtctgtgtcttttaattggagcattcagcccatttacatttaaggttaatattgttatgtgtgaatttgatcctgtcattatgatgttagctggttattttgctcgttagttgatgcagtttcttcctagcatcgatggtctttacaatttggcatgtttttgcagtggctggtaccagttgttcctttctatgtttaatgcttccttcaggagttcttgtagggcaggcctggtggtgacagaatctctcagcatttgcttgtctgtaaagtattttatttctccttcacttatgaagcttagtttggctggatatgaaattctgggttgaacattcttttctttaagaatgctgaatattggcccccactctcttctggcttgtagagtttctgccaagagatcagctgttagtctgatgggcttccctttgtgggtaacccgacctttctctctggctgcccttaacatttttgccttcatttcaactttggtgaatctgacaattatgtgtcttggagttgctcttctcgaggagtatctttgtggcattctctgtatttcctgaatttgaatgttggcctgccttgctaggttggggaagttctcctggataatatcctgcagagtgttttccaacttggttccattctccctgtcactttcaggtacaccaatcagacgtagatttggtcttttcacatagtcccatatttcttggaggctttgttcatttctttttattcttttttctctaaacttctcttctcacttcatttcattcatttgatcttccatcactgataccctttcttctagttgatcgaatcagctactgaagcttgtgcattcgtcacgtagttcttgtgccatggttttcagctccatcaggtcctttaaggacttatctgcattggtgattctagttagccattcgtctaatcttttttcaaggtttttaacttctttgtgttgggtttgaacttcctcctttagctcggagaaattcgatcatctgtagccttcttctctcaacttgtcaaagtcattctccatccagctttgttccattgctggtgaggagctgcattcctttggaggaggagagatgctctgattttttgaattttcagtttttctgctctgttttttcccctctttgtggttttatctacctttggttttgatgatggtgatgtacagatggggttttggtgtggatgtcctctctgtttgttagttttccttctaacagtcaggaccctcagctgcaggtctgttagagttttctggaggtccactccagaccctttttgcctgggtatcagcagtggaggctgcagaacagcaaatattggtgaacagcaaatgttgctgcctgatcgttcctctggaagtttcatctcagagggatacccggccgtgtgaggtgtcaatctgcccctactggggggtgcctcccagttaggctacttgggggtcagggaaccacttgaggaggcagtctgtccgttctcagatctcaagctccgtgctgggagaaccactgctgtcttccaagctgtcagacagggacatttaagtctgcagaggtttctgctgccttttgtttggctatgccctgcccccagaggtggagtctacagaggcaggcaggcctccttgagctgcggtgagctccacccagttcgagctt

SEQ ID NO: 10517 - DNA, 6191 bp, Homo sapiens
tttttctttacattaatttttctttttttattttttattttttttattattattatactttaagttttaggatacatgtgcacaatgtgcaggttagttacatatgtatacatgtgccatgctggtgtgctgcacccattaactcgtcatttagcattaggtatatctcctaatgctatccctcccccctccccccaccccacaacagtccccagagtgtgatgttccccttcctgtgtccatgtgttctcattgttcagttcccatctatgagtgagaacatgcggtgtttggttttttgtccttctgatagtttactgagaatgatgatttccaatttcatccatgtccctacaaaggacgtgaactcatcattttttatggctgcatagtattccatggtgtatatgtgccacattttcttaatccagtctatcattgttggacatttgggttggttccaagtcttttctattgtgaatagtgccacaataaaaatatgtgtgcatgtgtctttatagcagcatgatttatagtcctttgggtatatacccagtaatgggatggctgggtcaaatggtatttctagttctagatccctgaggaatcgccacactgacttccacaagggttgaactagtttacagtcccaccaacagtgcaaaagtgttcctatttctccacatcctctccagcacctgttgttacctgactttttaatgattgccattctaactggtgtgagatggtatctcattgtggttttgatttgcatttctctgatggccagtgatgatgagcattttttcttgtgtcttttggctgcataaatgtcttcttttcagaggcatctgttcatatcctttgcccactttttgatggggttgttttttttttcttgtaaatttgtttgagttcattgtagattctggatattagccctttgtcagatgagtaggttgcaaaaattttctcccattttgtaggtttcctgttcactctgatggtagtttcttttgctgtgcagaagctcttgagtttaattagatcccatttgtcaattttggcttttgttgccattgcttttggtgttttagaattgaagtccttgcccatgcctatgtcctgaatggtaatgcctaggttttcttctagggtttttatggttttaggtctaacgtttaagtctttaatccatcttgaattaatttttgtataaggtgtaaggaagggatccagtttcagctttctacatatggctagccagttttcccagcaccatttattaaatagggaatcctttccccattgcttgtttttgtcaggtttgtcaaagatcagatagttgtagatatgcggcattatttctgagggctctgttctgttccattgagctatatctctgttttggtaccagtaccatgctgttttggttacggtagccttgtagtataatttgaagtcaggtagcatgatgcctccagctttgtttttttggcttaggattgacttggcagtccttttggttccatatgaactttaaagtagttttttccaattctgtgaagaaagtcattggtagcttgatggggatggcgttgaatctataaattaccttgggcagtatgccatgttcaccatattgattcttcctacccatgagcatggaatgttcttccatttgtttgtatcctcttttatttcattgagcagtggtttgtagttctccttgaagaggtccttcatgtcccttgtaagttggattcctaagtattttattctctttgaagcaattgtgaatgggagttcactcatgatttggctctctgtttgtctgttattggtgtataagaatgcttgtgatttttgtacattgattttgtatcctgagactttgctgaagttgcttatcagcttaaggagattttgggctgagacaatggggttttctagatatacaatcatgtcgtctgcaaacagggacaatttgacttcctcttttcctaattgaataccctttatttctttctcctgcctaattgccctggccagcacttccaacactatgttgaataggagtggtgagagagggcatccctgtcttgtgccagttttcaaagggaatgcttccagtttttgcccattcagtatgatatttgctgtgggtttgtcatagatagctcttattactttgagatacgtcccatcaatacctaattttttgagagtttttagcatgaagtgttgttgaattttgtcaaaggccttttctgcatctattgagataatcatgtggtttttgtctttggttctgtttatatgctggattatatttattgatttgcatatattgaaccagccttgcatcccagggatgaagcccacttgatcatggtggataagctttttgatgtgctgctggattcggtttgccagtattttattgaggatttttgcatcaatgttcttcaaggatattggtctaaaattctcttttttggttgtgtctctgccagtctttggtatcaggatgatgctggcctcataaaatgagttagggaggattccctctttttctattgattggaatagtttcagaaggaatggtaccagttcctccttgtacctctggtagaattcggctgtgaatccatcgggtcctggactctttttggttggtaaactattgattattaccacaatttcagattctgttattggtctattcagagattcaacttcttcctggtttagtcttgggagagtgtatgtgtcaaggaatttatccatttcttctagattttctagtttatttgcgtagaggtgtttgtagtattctctgatggtagtttgtatttctgtgggattggtggtgctatcccctttatcatttgttattgcatctatttgattcttctctctttttttctttattcgtcttgctagcggtctatcaattttgttgatcctttcaaaaaaccagctcctggattcattaattttttgaagggtttttttggtctctatttccttcagttctgctctgattttagttatttcttgccttctgctggcttttgaatgtgtttgctgttgcttttctagtttttttaattgtgatgttagggtgtcaattttggatctttcctgctttctcttgtgggcatttagtcctataaatttccctctacacgctgctttgaatgtgtcccagagattctggtatttgtgtctttgttcttgttggttttgaagaccatctttatttctgccttcttttcattatgtccccagtagtcattcaggagcaggttgttcagtttccatgtagttgagcggttttgagtgagtttcttaatcctgagttctagtttgattgcactgtggtctgagagacagtttattataatttctgttcttttacatttgctgaggagagctttacttccaactatgtggtcaattttggaataggtgtggtgtggtgcagaaaagaatgtatattccgttgatttggggtggagagttctgtagatgtctattaggtccacttggtgcagagctgagttcaattcctgggtatccttgttaacattctgtctcgttgatctgtctaatgttgacagtggggtgttaaagtctcccattattattgtgtgggagtctaagtctctttgtaggtcactcagcacttgctttatgaatctgggtgctcctgtattgggtgcatatatatttaggatagttagctcttcttgttgaattgatccctttaccattatgtaatggccttctttgtctcttttgatctttgttggtttaaagtctgttttatccgagactaggattgcaacccctgcctttttttgttttccatttgcttggtagatcttcctccatccttttattttgagcctatgtgtgtctctgcaggtgagatgggtttcctgaatacagcacactgatgggtcttgactctttatccaatttgccagtctgtcttttaattggagcatttagtccatttacatttaaagttaatattgttatgtgtgaatttgatcctgtcattatgatgttagctggttattttgctcattagttgatgcagtttcttcctagtctcgatggtctttacattttggcatgattttgcagcggctggtaccggttgttcgtttccatgtttagtgcttccttcaggagctcttgtagggcaggcctggtggtgacaaaatctctcagcatttgcttgtctgtacagtattttatttctccttcacttatgaagcttagtttggctggatatgaaattctgggttgaaaattcttttttttaagaatgttgaatattggcccccctctcttctggcttgtagagtttctgccgagagatcagctgttagtctgatgggcttccctttgtgggtaagccgacctttctctctggctgcccttaacattttttccttcatttcaactttggtgaatctgacaattatgtgtcttggagttgctcttctcaaggagtatctttgtggtgttctctgtacttcctgaatctgaatgttggcctgccttgctagattagggaagttctcctggataataccctgcagagtgttttccaacttggttccattctccccgtcactttcaggtacaccaatcagacatagatttggtcttttcacatagtcccatatttcttggaggctttgttcatttctttttattcttttttctctaaacttcccttctcacttcatttcattcatttcatcttccatcactgaaaccctttcttccagttgatcacattggctcctgagacttctgcattcttcacgtagttctcgagccttggctttcagctccatcagctcctttaagcacttcgctgtattggttattctagttatacattcgtctaaatttttttcaaagttttcaacttctttgcctttggtttgaatttcctcctgtagctcagagtagtttgatcgtctgaagccttcttctctcaactcgtcaaagtcattctccgtccagctttgttctgttgctggtgaggaactacgttcctctggaggaggagaggcactctgctttttagagtttccagtttttctgctctgttttttccccatctttgtggttttatctacttttggtctttgatgatggtgatgtacagatgggtttttggtgtggatgtcctttctgtttgttagttttccttctaacagacaggaccctcagctgcaggtctgttggagtttgctagaggtccactccagaccctgtttgcctgggtatcagcagcggtgtctgcagaacagcggattttcgtgaaccgcgaatgctgctgtctgatcgttcctctggaagttttgtctcagaggagtacccggccgtgtgaggtatcagtctgcccctactggggggtgcctcccagttaggctgctcgggggtcagggatcagggacccacttgaggaggcagtctgcccgttctcagatctccagctgcgtgctaggagaaccactgctctcttcaaagctgtcagacagggacatttaagtctgcagaggttactgctgtctttttgtttgtctgtgccctgcccccagagatggagcctacagaggcaggcaggcttccttgagctgtggtgggctccacccagttcgaccttcccggctgctttgtttacctaagcaagcctgggcaatggcgggcgcccctcccccagccttgctgccaccttgcagtttgatctcaggctgctgtgccagcaatcagcgagactccgtgggcgtaggaccctccgagccaggtgcgggatataatctcctgatgcgccatttcctaagcctgtcagaaaagcacagtattagggtgggagtgacccgattttccaggtgccgtctgtcatccctttctttgactaggaaagggaattccctgaccccttgcgcatcctgagtgaggcagtgcctcgccctgcttcagctcgcgcacaatgcggtgcacccactgtcctgcacccactgtctggcactccctagtaagaggaacccggtacctcagatggaaatgcggaaatcacccgtcttctgcgtcactcacgccgggagctgtagaccggagctgttcctattcggccatcttggctcctcccccccatt

SEQ ID NO: 10518 - DNA, 7939 bp, Homo sapiens
ttttttttttttttttttttttttttttgcttctgagagttgttttttattttttattttttttattatactctaagttttagggtacatgtgcacattgtgcaggttagttacatatgtatacatgtgccatgctggtgcgctgcacccactaatgtgtcatctagcattaggtatatctcccaatgctatccctcccccctcccccgaccccaccacagtccccagagtgtgatattccccttcctgtgtccatgtgatctcattgttcaattcccacctatgagtgagaatatgcggtgtttggttttttgttcttgcgatagtttactgagaatgatggtttccaatttcatccatgtccctacaaaggatatgaactcatcattttttatggctgcatagtattccatggtgtatatgtgccacattttcttaatccagtctatcattgttggacatttgggttggttccaagtctttgctattgtgaatagtgccgcaataaacatacgtgtgcatgtgtctttatagcagcatgatttatactcatttggttatatacccagtaatgggatggctgggtcaaatggtatttctagttctagatccctgaggaatcgccacactgacttccacaatggttgaactagtttacagtcccaccaacagtgtaaaagtgttcctatttctccgcatcctctccagcacctgttgtttcctgactttttaatgattgccattctaactggtgtgagatgatatctcatagtggttttgatttgcatttctctgatggccagtgatgatgagcatttcttcatgtgttttttggctgcataaatgtcttcttttgagaagtgtctgttcatgtccttcgcccactttttgatggggttgtttgtttttttcttgtaaatttgtttgagttcattgtagattctggatattagccctttgtcagatgagtaggttgcgaaaattttctcccatgttgtaggttgcctgttcactctgatggtagtttcttttgctgtgcagaagctctttagtttaattagatcccatttgtcaattttgtcttttgttgccattgcttttggtgttttggacatgaagtccttgcccacgcctatgtcctgaatggtaatgcctaggttttcttctagggtttttatggttttaggtttaacgtttaaatctttaatccatcttgaattgatttttgtataaggtgtaaggaagggatccagtttcagctttctacatatggctagccagttttcccagcaccatttattaaatagggaatcctttccccattgcttgtttttctcaggtttgtcaaagatcagatagttgtagatatgcggcattatttctgagggctctgttctgttccattgatctatatctctgttttggtaccagtaccatgctgttttggttactggagccttgtagtatagtttgaagtcaggtagtgtgatgcctccagctttgttcttttggcttaggattgacttggcaatgcgggctcttttttggttccatatgaactttaaagtagttttttccaattctgtgaagaaagtcattggtagcttgatggggatggcattgaatctgtaaattaccttgggcagtatggccattttcacgatattgattcttcctacccatgagcagttcttccatttgtttgtgtcctcttttatttccttgagcagtggtttgtagttctccttgaagaggtccttcacatcccttgtaagttggattcctaggtattttattctctttgaagcaattgtgaatgggagttcacccatgatttggctctctgtttgtctgttgttggtgtataagaatgcttgtgatttttgtacattgattttgtatcctgagactttgctgaagttgcttatcagcttaaggagattttgggctgagacgatggggttttctagataaacaatcatgtcgtctgcaaacagggacaatttgacttcctcttttcctaattgaataccctttatttccttctcctgcctgattgccctggccagaacttccaacactatgttgaataggagcggtgagagagggcatccctgtcttgtgccagttttcaaagggaatgcttccagtttttgcccattcagtatgatattggctgtgggtttgtcatagatagctcttattattttgaaatacgtcccatcaatacctaatttattgagagtttttagcatgaagcgttgttgaattttgtcaaaggctttttctgcatctattgagataatcatgtggtttttgtctttggctctgtttatatgctggattacatttattgatttgcgtatattgaaccagccttgcatcccagggatgaagcccacttgatcatggtggataagctttttgatgtgctgctggattcggtttgccagtattttattgaggatttttgcatcaatgttcatcaaggatattggtctaaaattctcttttttggttgtgtctctgcccggctttggtatcagaatgatgctggcctcataaaatgagttagggaggattccctctttttctattgattggaatagtttcagaaggaatggtaccagttcctccttgtacctctggtagaattcggctgtgaatccatctggtcctggactctttttggttggtaaactattgattattgccacaatttcagagcctgttattggtctattcagagattcaacttcttcctggtttagtcttgggagagtgtatgtgtcgaggaatgtatccatttcttctagattttctagtttatttgcgtagaggtgtttgtagtattctctgatggtagtttgtatttctgtgggatcggtggtgatatcccctttatcattttttattgtgtctatttgattcatctctctttttttctttattagtcttgctagcggtctatcaattttgttgatcctttcaaaaaaccagctcctggattcattgattttttgaagggttttttgtgtctctatttccttcagttctgctctgattttagttatttcttgccttctgctagcttttgaatgtgtttgctcttgcttttctagttcttttaattgtgatgttagggtgtcaattttggatctttcctgctttctcttgtaggcatttagtgctataaatttccctctacacactgctttgaatgcgtcccagagattctggtatgtggtgtctttgttctcgttggtttcaaagaacatctttatttctgccttcatttcgttatgtacccagtagtcattcaggagcaggttgttcagtttccatgtagttgagcggctttgagtgagattcttaatcctgagttctagtttgattgcactgtggtctgagagatagtttgttataatttctgttcttttacatttgctgaggagagctttacttccaactatgtggtcaattttggaataggtgtggtgtggtgctgaaaaaaatgtatattctgttgatttggggtggagagttctgtagatgtctattaggtctgcttggtgcagagctgagttcaattcctgggtatccttgttgactttctgtctcgttgatctgtctaatgttgacagtggggtgttaaagtctcccattattaatgtgtgggagtctaagtctctttgtaggtcactgaggacttgctttatgaatctgggtgctcctgtattgggtgcataaatatttaggatagttagctcctcttgttgaattgatccctttaccattatgtaatggccttctttgtctcttttgatctttgttggtttaaagtctgttttatcagagactaggattgcaacccctgcctttttttgttttccattggcttggtagatcttcctccatccttttattttgagcctatgtgtgtctctgcacgtgagatgggtttcctgaatacagcacactgatgggtcttgactctttatccaacttgccagtctgtgtcttttaattgcagaatttagtccatttatatttaaagttaatattgttatgtgtgaatttgatcctgtcattatgatgttagctggtgattttgctcattagttgatgcagtttcttcctagtctcgatggtctttacattttggcatgattttgcagcggctggtaccggttgttcctttccatgtttagctcttccttcaggagctcttttagggcaggcctggtggtgacaaaatctctcagcatttgcttgtctataaagtattttatttctccttcacttatgaagcttagtttggctggatatgaaattttgggttgaaaattcttttctttaagaatgttgaatattggcccccactctcttctggcttgtagggtttctgccgagagatccgctgttagtctgatgggctttcctttgagggtaacctgacctttctctctggctgcccttaacattttttccttcatttcaactttggtgaatctgacaattatgtgtcttggagttgctcttctcgaggagtatctttgtggcgttctctgtatttcctgaatctgaacgttggcctgccttgctagattggggaagttctcctggataatatcctgcagagtgttttccaacttggttccattctccacatcactttcaggtacaccaatcagacgtagatttggtcttttcacatagtcccatatttcttggaggctttgctcatttctttttattcttttttctctaaacttcccttctcgcttcatttcattcatttcatcttccattgctgataccctttcttccagttgatcgcatcggctcctgaggcttctgcattcttcatgtagttctcgagccttggttttcagctccatcagctcctttaagcacttctctgtattggttattctagttatacattcttctaaatttttttcaaagttttcaacttctttgcctttggtttgaatgtcctcccgtagctcagagtaatttgatcgtctgaagccttcttctctcagctcgtcaaaatcattctccatccagctttgttctgttgctggtgaggaactgcgttcctttggaggaggagaggcgctctgcgttttagagtttccagtttttctgttctgttttttccccatctttgtggttttatctacttttggtctttgatgatggtgatgtacagatgggttttcggtgtagatgtcctttctggttgttagttttccttctaacagacaggaccctcagctgcaggtctgttggaatactctgccatgtgaggtgtcagtgtgcccctgctggggggtgcctcccagttaggctgctcgggggtcaggggtcagggacccacttgaagaggcagtctgcccgttctcagatctccagctgcgtgctgggagaaccactgctctcttcaaagctgtcagacagggacacttaagtctgcagaggttactgctgtctttttgtttgtctgtgccctgcccccagaggtggagcctacagaggcaggcaggcctccttgagctgtggtgggctccacccagttcgagcttcctggctgctttgtttacctaatcaagcctgggcaatggcgggcgcccctcccccagcctcgttgccgccttgcagtttgatctcagactgctgtgctagcaatcagcgagattccgtgggcgtaggaccctctgagccaggtgtgggatatagtctcgcggtgcgccgtttcttaagccggtctgaaaagcgcaatattcgggtgggagtgacccgattttccaggtgcgtccgtcacccctttctttgactcggaaagggaactccctgaccccttgcgcttcccaggtgaggcaatgcctcgccctgcttcggctcgcgcacggtgtgcacacacactggcctgcgcccactgtctggcactccctagtgagatgaacccggtacctcagatggaaatgcagaaatcacccgtcttctgcgtcgctcacgctgggagctgtagaccggagctgttcctattcggccatcttggctcctccgccgcaagattgcttttacagttgctccttcattcattctttctgttttcctgtctaactgctgtagaatgctcatggccttttctggctgtttccagatagaagcaaggtgactcatggggaattcaggtcatttgggaaacaaaagccatcagtagagtctccagaatctatccttctgcttttctgatgtggttagtgagagaaggtagtgacatggaaacaggaacaatattctagcatctcagcttctacctcctttgaacagcttttcctctctgcatcaatcttgttccaagctattatacgtggaaaaatctccaaagatgcttctaccaatgagtacctacctacaccattggtcacaactgcttaaaaatgagtgaggggtctcagttttgaaactagaattatatgtgactttaaaaaatatatatctatctgtaattttaaactgttttctaataaacacaaattatcagaaaaattttgtaaatacttttttttttaatttaaaaaatatagattttggtagactgccgtgtgacgccttgtcatgtgttaggcatctgtactcagatccaactaaggaagcttcacttgcaaaatgatgtcaagtcacaaggattttacaacttgggagaaagggcttagcaaaacattcccttgctcccctgaaacctagtaggccagtgaaccctggactgggccactcacactgggaatgaaaaaatatgccatcaaaggttgtgtcagctttagaggcaagtcctacttgggatcaatagagacggatgaggaaaggcagccaagtgaaggccactagcttggataccttctggactcggcttggaaggagggacagagatcaccagaggttgccatctgtgatcatcatcaaggcccaagaaagattcacacagccctccaagctcagaggaggctaaggaaaaaaggaaattctacaggtgacaagacagtcatttttttcttcaagaagaaattaattacctgtagatattcttgcaggaaaattgaatattccttttgcttataatcgattccagctcttttatggtgggatcctggcataagtctctggggaagaaagaagaaagtattaaaattacaagatctcacaaacatttttggagtctctttgtttttgtagcacgccctggacaaggcccttggataaagaggtaaagtagaggtaaatcctctaagagctcctgggtcagcaggagagctgaagtgtcaagcagttaaatatcctttgtggagataaagttaagaggctgttgggattcatgcacattcatgtagtttcatttcctgagtcaatttgttcccagtgcgtgcttgtgactgtggattcttttgtggactgattcataaaataacacttgggtacaaagtagtaagatatacctggaatcttctcttccaccatgtatcacccaggcctctagtgtctgaaccttctctggttgcaaattatggacttccacactcccaaaagtgctaaaatagaagaaacaaagaaccccaaacatcaaccccaaacgaaagcatccacacccccctcaacaaccagcaggcagaaaggcactggctaggacctatcctttagagttgacacatcaaattgcaaatcagtcaataaccttttcttattcagcatgaccctcggttaacaagattctcaaaataaaattcttaatttgtgcattaatgttgattctttaaatatttgctatttgaagagtggtccttagaccaacctaatgaacatcacctgggaactcattagaaatgtagaatttcagccaggcatggtggctcatgcctgtaatcccagcaat

SEQ ID NO: 10519 - DNA, 150 bp, Homo sapiens; identical to SEQ ID NO: 5233

SEQ ID NO: 10520 - DNA, 46487 bp, Homo sapiens
tttttgtatttttagtagagacagggtttcaccgtgttagccaggatggtctcgatctcctgaccttgtgatccgcctgcctcggcctcccaaagtgctgggattacaggcgcgagccaccgcgcccggctgaatctcttttgcaatatatttttcacaaactttccacaacttgttcaagccctcagatgtttcctatctaacttaaaataatcctttaaccctctaaactaggcaagaaatccacattcccattccttcttgtaatcttttaccatatgcacattttactttccttgcacaccttgcatgtaaaactgtttctttagtagtttcaaatacatgttacactgttgactcttagcaacttttgctgaaaaacctggttagtaagctattttaattatgtactagatttggagcctaggacaccagacagaagtgcagataaggtctctttccagcatagctagggatatggctaactccacatgtcgttaggccttatctagtggtaaagcaggcaagtcgaacaattttcaaaagccaaagaagcagtttatgaccttaaagcatttagcaaacctaatatctgacttgcataatttagaccaaatgtctaaatttttgaagatatttttattttaccaataatcctaaaactgtctttatttcccaaagattatttaggtcacatgaactaaaaggcattacagtttaaattttctgacaatatttaagcatttattttttaacaccaattaattagagctcttttatataaacatcatcacacacaacacatatgaatacatagaagattcagtagttgtaagatttttcatttgccactttttgtttcttaattggattattggcttcagggtggagtctttggaagaacagcgtggagaaagcatacagtttccagagcctaataagcagatacagctggaaggcaaaaatggatccccaaaattaagggaccatcgttatagtggatcctgaatccccaaaagagaaatgctacggagcaagacagtacaatgattttaccatacatttcattgcaaagtgatccaatgccaatcagcccattccccatgggaatcttatctctcagtgggggctggggatgttgccgtaccttccaggtggccaagagcatgcttctctgatccaaatgtgcaagtattcctccataactgccattagccatccatatatttcctacctggttattaccaaagttctttcataatgtgaagtaatttctgaaactcccaaaagtgaaaaacaggtaacgcaatgcaaacagaacagagccttagattttaagagggatctatccactttcaattcctggggttccatgaggaaaccagaggtttttcccaaaacggggtctgtggcacctcctctttttttcccaaggagtcccaagctgttagaaattatcttaggtcctttcatgtgtgcatcaagagtggcaagaagacaaaataagaaaagcaattcagttgactgagaacaaaaaacctttttttcttcagaaaaataagattcaagaagagaaaaaaacaaaggccttttaaatgtatgtatagcttggatatctgcttttaactaagctgacttttaaccatagtgttcctaagaaaatccttttaaatctcttattacttgactttagcttagccaaatagccaatacttgtggtttttgaactttaccaaaagtaacctcacaggtgaaaccaataagccttaactaaggttatgacttatccatgagtgtatgacgtatgttcaaagaggtggtaagcagtttttacaagatttagagtctacaaaggtagcttcgacaaaggaaaattcaagaagggaagtcagaagtcattcatggaggggcagagaatacattgatttctaccattcctactactggtttgcatagaaagagagaagccagaagtctggtaagaattcctaccagtctaccagcatgcctggctgctggcttctgggttccctttccctgagcagccctagcgaccctgcttgccacaccctggggaccaagccacaacaccaaggaaaaatcatcttttttccatttcatggaaactttgaactagacaaaagtcattttctgttagaaagttaaggtttgtactgcatgttgccatgtgtgtcctgagaagggggagtagataaagaagttgtctacatactgtagaagttatcccctctcaggagatttctcagttagatttttgctagggcttgtctgaataagtgtgggctattttagacattaccagggaccggtgggtgaatagcaattggtcccttaagtaatataaaggggtgtgaatcttttgttttgagggaggggatgccatttgccccacctaacaggcttagccctgttctctttattctactctgggttataaaagacataagaggctaatctgaggacctcctgcacaggggttccaagtctgactcttgtaattgcttcccagtttctttttaagccaagcagtttaaggtttgaggaaattaaaattttcccagtttgggggaatgcatccaaggggcaagtcctgtggtatggagacacaatttcccatctgccatttgcgaagagagaacagaggaggaaaaagaggaaaagggaaaaaggtgtcctctctttcttcctattatcccaaatggggcatcccccatcatcctgggttctagacttaaccattctttaccatgtacccatggtcccatctcattacaattacccacttgagaacagagaacagaagagatactggagtgaacagtgagcccctgtccatccctggggttccagaattaactggtccttactgtgtacctgcctagcctttcatcttttttccaatggtaatccgttaggctaggaccacccttcttgggttccagacttaaccagtctttactctgtatccatggtcccatctcatcacgattacccactggagaatagaggagatactggagtgaaccgtgggcccctgtccattcctggggttctggaattaattggttcttactgtgtaaccccctagtgtttcatttctgttccaatggtaatctgtcagcctgggccacccttcatctctgtcctatgggtctcttatgtgaaccctgaaaatttgagataggcctcagttaatttagaaagtttattttgccaaggttgaggacacacgccagtgacacagcctcaggaagtcctaaggacatgtacccaaggtggttggggcacagcttggttttatacattttagggagagatgagatatcaattaatatatgtaagaagtacattggttctgtccagaatggtgggggcaactggaagcagggagggggcttccaggtcacaggtaggtgagagacaaatggttgcattcttttgagtttctcataagcttttccaaaggaggcaatcagaataagcttctatcagagtgagcagagggatgactttgaatagaatgggaggcagatttgcccagcttgagtgttccctttagctaggattttgagggcacaagatattttcctttcacacttttatcagtggcctttaaccagcctatatccttgtctccatggccttatagtgactctcactcagaggattttagtaataaaataattatcttttttcttagaagcctgtttctctgttaactgccacagcggctggacttccctccccactcccttagaatatgaccttgaaggtcttgatgcacattgagaagggcatggaagtaattcgagaaatggcggctataggaggaagtggaaagaagcaagaggaatactcatggaaagccttcatgtgctcacaaaaacaggagcccttgtattcaagagggtaatatttatttgccctctgaacataaagccgtaacctctgaggacttggggcctggggtaagaatttctcctcctcccaaagtggtggtggcttaaaaagcaagagggtgggattcttgaaggaccagagtgaagcactatgcaggcagacaagccgcttttaaaagccatcagaaaacttagcgctggggcataataggaacaaaatgcacatgatgagttgtaagaaaccggcagcactggagttccaattagtgttctggccacatgccagcagacaggggaaagatggaatgtcacccgagatagtaaaaacaaatataaacctcgggggatatccacaagggagcctgtgcctttgctgctgcagaaatgcagagagccatgggcgcatgaataatagggagtgtgtgttttagaagtcatgtggcatgcaaagtgaaagcaaagaagcagactttcacccaaggcagaaggtctggtgggcgtgaaaagccattttagaacacacacacagaaaacagaagaatgggtggtatacatttttggaaaagagccaattttagttggaaagaaaaagcagaggaaatcccagacattgcatggtttttaggcctcagcctcaccactctcataagcctcctatctaggagggccatttaatgcttctgacctacttggtgtggaccctaaggtccttcccacccccgcaagccacccattagggtgagctgagaaatcaaccacaaaaagcagagtcacttatggagagagagagagactgacagagagagagagatcgattgattgattgattgggagaatgtaaaggaagagaacaagagtctctgcctggtaatccagggaattcttccgaatcttaaccaagaccaacaagtgttacttccactagtctgcaagaaccacagtgttatagagcttggggcccaagtcccttaaaatacctgtaaagccttccccagattgtgaagagtataataaattcataacttttcaatgtccaaaaatcaaccaacatcaacaagcatcaagagcagccagggaagcataacctcaccagacaaactaaataaggcaccagggaccaatcttggaaaaacagagatgtgtgacctttcagacagagaagttgaaatagctgttttgaggaaacttaatgaaattcaggataccacagagaaggaattcaaaattctatcataaatttaacaaagacattgaaaataattaaaaagaatcaggcagaaattttggagctgcatactaaagaatgcattaatagcagaattgatcacaagaaaaagaaagagaagaaaagagaaaggaaggaaagaaagaagaaagaaaagaaaagaaaaagaaaagaagaaaagaaaagaaaaaactgcacacgggggtcagatgcctccaaccaaagaaggcaaggcatagatatctcttaacatctgagtcacatggccaatatgttaccggtggcaaataaccgagtctcatggtacctaatatgttaagggtaacaagtgtccgagttaccattggtgaatctgtatgggtctgcagcaacctcaattcttgcctcctcagaagaaagaatttgactgaggggcataaggcagaaaaagagaccaaggcaagtttcagagcaagagtggaagtttattttaaaaggctttagaacaggatagaaatgaaagcatgcttgaaagagacccaagtgggcgacttgaaggacaagtgcactgtttaatctcgatcctaggactttataggctggcccttttcccatgatgcttccgttagtgtgggctgcctgcatgcaaggtgccctccttctccttaggaagtgagcatgcacagtgtatttagaaagttatatgcatgcccatctgaggctttctttccttttccagtggagtgctcccagaaggtcatactctgctattttgtctcttaatgcatatgcctgggaagttgcttcaccctcttgcctgcattcaattaacactttagtgcaataggtgtgggccattaggaaatggcctctccctggcaccaactgccaatttttcaattttagagaggcaatgcaataattgctaaatcatcttctgacagtcctagtgggtggggggagagccctcttctgccccaatcatgcctgtctaactccctgtaacataggcatatcatatgcaaactgaagaaagacaaagagaaaatactgaaaaacaaaacaaaacaaaaccccttacttacagaggaacaaggataagaattacagtgcagaaaccatgcaagtaaagaagagagtgggctgtaatatttaaaatattgaaagaaatactaccaacctagacctctgtgattagtaaaattatctttaaacatgaaggagaaataatttctcagacaaacaagaactgaggatattcatcaccagcagacctgccctgcaagagatgttaaaaagaatttcttcagggaaaaggtacaataatataggtcagaaatttatagaaagaaagggcattggagaaggaataaatgaaggcatgcttgctattgccctcatcattcttgtccatctcagtgtgctaatgaaaccacctttgcaaaaattatagctgatgaaattatgacagtgaaagagatcagaccttaccaactccatcttgcttctaaactttaagctgtccttgttcattcctgggtgtaggccaaactaaccttgggaaggaatttagtttatagtttaactctgaaacaaaattgatagtagccctttcccagtcgggggcggggtcgggggggaccttcttgcctggggaccagtctgcctttgtaggcctaacaaattagctacaagattaaaaattatggtttaggggccacacagcctccggctgcaagagtctgaacctccccaaattgctcctgggaataacatcactgttgaaaaatctaaggtcagtacttgagatactttgcagaccctgccttccttgttggaagcaagtaaaactccaaaaaaataaaggagttgtacagcaaactaaactttagttctcaaccaaattttgggagatcagggattctctggaggggggcttccaggcctctgcaagttgtcctattggtttgagccataaagatagctcaagctggtaccaagcacccataggagattcgtgaaggtcaggggcacctccactcagaatccctttgtggttaccaaaatatgaaccccaaatatctgagacaagtctcagtcaattgaggaagtttattttctcaaggttaaggatgcttctgtgacacagcctcaagaggtcttgacaacatgtgcccattgtggtcggggcacagcttggttttgtaaattttagggagagatgagacatcaattaatacatgtaagatgcacattggttctgtccagaaaggcaggacaactccaagaggggaaggggcttccaggtcaaagaaagataagagataaatggttgtattcttttgagtttctgattagcctctccaaaggaggcaatcacatatgcatttatctcagtgagcagaggggtgactttgagctctgtctgtcctttgtccacagggaatttccttgtggaaaaatggtgagggatgtatgtagcttttttttttttaatcttattaactatcttttttaggaatagaatgggaggcagatttgccctaagcagttcccagctttacttttctctttggcttagcgattttaggatcctgagatttattttcctttcacaatagatatatacttataatgcacactttccataaaccatatgtattattgtacaacttgcattttcactttgtattttgagttatttccattttggtatatatagagctacttctttttgatatcatagtagggtagaatagtactttataaatttatcatacttagtttaatcctttccctattgatggtcatttatgtaaccgcccgatgggttcttcctgccagctgcacaaacaaaatcaattcaaggagaccatggcattgcagtaaagaaagaggttaattgatgtggtgctggccacgccaaatgggagatggagtcctgtcttaactcaatctcctgaagaatttgggggctagggtttttcaaaggtagtttgggggaaatcatgggggtggctaggcaatgggtacttggtgctgattggttgggggtgcaatcataggggtgtgggaaatggtcctcctatgtgctgagtcacttctggatggggcctcaggagcagttggtgggtcgaggtggagccagacatgcaagaaatctgaaaagatacctcaaaaggccaatcttaggttctacaatagtgatgttatctgcaggaataattggggacgttgcatatgttgtaacctccagaataacggctgtcaatcctttatgtctacaccttagcaggactcagcctgctccatcctcctagcctggtggtttcattattagctttacaaaggcatttggttaagttttggggaatggctattatcatttaaactgtaaagtaaatgtctcccaaagttagcttataagcccaggaataattaagggcagcttgaaggccaaaggcaagacaggtgttagccagatcagatctccttcactgccataattttctcattgttataatttttgcaaaggtggtttcatttacattatttacaattaattgctattaaaagaaattatgcattttaatattcttgcatatatttacttaaagcattatactagagaaataaaactctcacatcagaatctgcaggcctatgtccttcgtatttaagacaatgtgttaaagttttaatactattaagcttaaaggacaaagccaataagaacacacaaatgttaagaatcataacctagagtgattcatcaaaaagtagtgtgacatgcaattgaaactcctgtttctcttagtatgactagtatctcctaagtcacatatattggtgtgtctgattgaggcatccacaaagggaatacaaatgaccaggaaaatgatcatatttttctgcctctttgtgctctatattttaaaatgcaggtattggtacttttaggaattgcttcacaatctctgtcttcctctcttgctccttccaacactgaaaaaccatacagaaagcagctgtgggtggcatactctgggctaagccctggggttacaggcagcaaagacacacctatgaattagcattgatctgcaaaccacagagggtaccatggaattgtcatgattcagtagcccctcacctccttcaacccttgactgactataccgtctacaatgtgctgagaatacagtggggaacaataccaaaagggtactttcattcaggaaacttccagtctaacaagtcaaactccccatcgcttggaagggagagtaaaaaaatatatatatattcagaagaaaaaagcacatgcatgcattaggcagggtgcaaggctgggagaaaaggaggagttgaggagcgcagctggaatctgggatctgcctcgaggaagtgcgcgaatagtggtcccctctcctcccagaacagtggagaggcgccaagaccatccctacctggtgccatcaaagagagaggactgttacgacctcctgcgagtcctgacagggaaaggccctcttttggggtcaactgtggggacggcgcaatgccaacctgagccaccatttgaaatgagaaaaagcggcgtggcagaaagaaatgagtctggtacagaccagtggttggtttcctagggttagaggtctaggtctaccttctgttagaagaggggcagtggtgaggccttgatgggagccccctgccccagaattcacttaagagcaggtgtaccttcctcccctgcgtggctccatgaagctgggaaagaaacgcacaagaggaccaccctagaggcccaggcttgtttggcctgaaatcgcctcacccctcccagactgcactgctgacaccccctctcccattagcttccaggaaggagagtgagagggctggggagagggaaggggcagacacccagcagtccctggttggggagttggggcgggggtgcagacacaccaaggggcggtttggtatccatccgctgctccctccagcgcggctcttcccaacctcctgatcctgtcccctgcctgggtccccagccgcccgcccgtccctatattatagcaacgccagaaatgtggtggtggtggtcgccacgttagggtccgcgggggtcctcctgaggcagcctggtgccaacccgcaggcccaggctggggctcgtcatggccccgcccacctctgggtcggaactaaggtgggcctgagaggggggcgtcgagcactttcgcgccgtatccctccgccccccttcccgacaccctcgcggagagagcggttcttgcagcatcctgcgcagcccctgcccagtttggtgcagaggcgtggggggcgggacgcgtctttgccattctgatagcggggaaagcggtgagaatcgaagtgaggagccgccagaggagagctgaggagaggagggggaggtcgacgacctgggccctgggcctctgaaggcaagtgggggtgcgtgagcttggggtggtccgccagggtggaccggctggcagcctgccccgccgaccctgacatcctggcaaggaggagacgatccggtcggagccggtcgccggagagaggtgcgcagtgctcgagacccctggcgatggggaggcggtgaccggtgcaggccgagccaggccaagggctgaggggctggcttgagaggcaccgtcagatcgtctggaggagaaccgcgctgaccgcctccaagccagctttgcaggcgccggcgccccgccctcgacggtgtctgtgcccggaaagggctgtgggggagctcctgcgggagaaatggcggagcgggagccattgtggggggctcccgggaaggccggggggagccggcgtcccagctctgtgcccagcccacgagaggtgggccgcgttcgctactcggggccctgattccggaaaggggcctgtgggaccccgtgtcttgggtgctgtcccttcccacaggctccaggtggttgttaaagtctcctgtctgcgtgataggtctgttgggttctccaaaagtggaactttgagtgggtgaattatgaagacactaaaatgaaatgtttaaccgccttttataataccgcactgttttattgccttacatatttagatccccacatccagttttgtgcaagcaaatagggtgtggacttagtcgaatttcacaacagtggtccatgtaaataacagggtagtatttttccacctttcttgttcaggatctgttttctcaacatgctgatccactttaagtaatgtaatgatgtgtgagaatgtgggttccgagtagaggggtaatctttttgaagggtcaatttagaacatttgaagtcaatctgcttcttcagtttatggttctggaaaccaaaactccatctccagccactcctcacagaccctctcattttggtgcagaaatagtcccacagaagaattcatggcatttctgatggtggatatctgaggagctatgagagttgggagactttatttacttagtttctgattctcaaaaaggaggtgttagaatccgaattctgggaatctgtccattaacctgctatttttctaccattgttaacatagtctcttggggttattttttgctagttgctccgccttctttttgtagggcgtgactcttctttggtgggaaggatagcatctcctgagaactcctgctgtataagcaggctgacataggtggtgaataaagtaggatctaggtatgcatggggaaggggaaggacatgcacagatggtattaaaataacagtctccattatgttccctgcctgccttgtaagtacaattgcctatgttccactacctatttctgcacctcattttttttggttcaggaaaggagctgtaacttctattgggaaaatgactgacttcaaagttggcaggaggtgtaatcaggctgcaggtcttggggtgattagggaatcattgaggaagagcagacaggtgggagacatttaacatagccttgaatattcaaaagcatatgttataatccttgttataggcattagatcatcttagtctcttctgttttctttcctctgccttcctttctatccttaggtctgtttctttctaggttcctgtagagatctgtatgtagctgttcacttggaagttaattaagaaagaacaaaaactattcatttggattcaaggtaggtttatgtgtgagcacccccgttgattggggttatggaaaggctgttgccaagtgggttagaccagatcatatcttggtgccactgtcttccatctttctagtcacctctgacctcacatttgtgtacaagtgatggggtggggtgagccaggattatgcctatgaggtaattggtagatattggggcaggaaatgggaagataagccacaaggagtactaggaggccagaagtgttatataaccaaagccctagatttggaaaggcagaaattgggtttagagattagagtgtaggtctgtcaaccaaatactcagaactccaatcccatctgtatttttgtccataggcctgcccatgagttaactatagggcatatcaacactgcaaacagggaaggaggaaaaattgcactagatcagtgcaggttggtgtgagtgctgcctgaatacacctatgaggtctagtggtatatattttagtggtggacctactagcatgggtccaaagagactgggcactcctttagcctttctcactctcagcaagcttacctgccatctttgttcctgtttgatgcagagtaaaagaatgacagtgcttgggcaggacattgttgagcattagtggcagtgtgcaaggtataaaattaagtagcagagttttttattaatccacttctacacaattcatttctactctcctatgtccttctgtgtggctgtttgcatagagaagcacagttagacaagactcaaagccagtttctttcttcaacctcaggtccatctccactggtggctgtggtggctttggattgttggaagaccatcaccttcagcaggtctgcacttgggaacaatcattctcccccagcccgagcgtgcctctgccctctgtatcattgacagaggctgtatgtttggaaagagaactttgtgactgcagaactgacagttgactctaattcttgctaccaagtttttccccgacccagtgaaagagtgttaagacttcgacctaggacacattgagaaccaaggccaagactggacagggccatataactgggcttcaaccatggctgggactaagaataagacaagagcccaggccaaaactgaaaaaaaggctgctatacaagctaaagctggagcagagagggaggctactggtgttgttaggcctgtagccaagaccagggccaaagcaaaagccaagacagggtctaagacagatgcagtagcagagatgaaggcagtgtctaagaacaaggttgttgctgagacgaaggaaggagctctgtcagagcctaagactctgggcaaagccatgggagatttcactcccaaggctgggaatgagtccaccagctccacatgtaaaaatgaggctggtactgatgcctggttctgggctggggaagaggccactatcaattcctggttctggaatggagaagaggctggtaatagtttcagcactaagaatgataaacctgaaattggtgcccaggtctgtgctgaggagttggaacctgcggctggggccgattgcaaacctaggtcaggggctgaggaggaggaggaagagaatgttattgggaactggttttgggaaggagatgatactagttttgaccctaatcctaaacctgtgagcaggatagttaagcctcagcctgtgtatgaaattaatgaaaaaaataggcccaaggactggtctgaggtaactatctggcccaatgcccctgctgtaactccagctgtgttaggatttagatcccaggcaccatctgaggcaagccctccttcatatattgttctggcctccgctgaagaaaatgcctgttctttgcctgtggcaacagcttgccgcccttctaggaacactcgctcatgctcacagcctatccctgagtgtcgttttgattctgacccctgcatccagaccatagatgagattagacgtcaaatcaggatcagggaggtaaatgggattaagccatttgcttgtccttgcaaaatggaatgctatatggattctgaggaatttgaaaaacttgttagcttacttaagtcaactactgatcctcttattcataaaatagcacggattgcaatgggtgtccataatgttcacccatttgcccaagagtttattaacgaagtaggtgtagtgacacttattgaaagcttgctcagttttccttcccctgaaatgagaaaaaagactgtaattactctgaatcctccttctggggatgaaagacaacgcaaaattgaattacatgttaagcatatgtgtaaagaaaccatgtcatttcctttgaactcaccgggacagcaatctggattaaagatactaggacaactgactactgattttgtccatcactacattgttgccaattacttttcagagcttttccatttgctgtcctcaggaaattgcaaaaccagaaatcttgttttgaaactacttttaaatatgtctgaaaatccaactgcagccagagacatgatcaatatgaaggcattggcagcattaaaactcatctttaaccagaaagaggcaaaagccaatcttgttagtggtgtggccatatttattaacataaaggagcatatcagaaaaggctcaattgtagttgttgatcacttgagttataatacactcatggccattttcagggaagttaaagagattattgaaacaatgtaaaatgagccagagatagaacattttaagccatcttcaaactctagcaggctgtacattacagtgtacacattatacactgcatctttaacacagagtcacctgtgacaggctctaggtttgagctagactattttgggggtatcaaatgaatattataccttgggctgaaaatgtttgatttttatcttgtctagattggcatatttttaacattttacttaagatagcaaaccagttcgttttaagtaagctaacttgttcattagtatctgtggcttaaaatggcaaaaaagaaaatatccttgagtttgtaatctagttacagaagtaaggcatacacacacacaaagataacagtacctagagagagagtgtgtgtgagtgtgcgtgtctctgtgtgtgcacgtgcacgctcatggccaaatgtgcgcactctacataaaggaggcaggagttcctataggctatttaatgtaagagaaactatttttctcctgttccagctgtatcagatactcgttccgcaacacagaaatgactcagaatctcagacaaaatgtattatttgttcaattttaattttgctactacattcataactcttaaattgttaggctgtttcatttacatcaaagttatctcacaaaagagaaggcaggaaacgttttgtgagtgcctattctatgtcaaacactgtgttggcaccatattttacaagtttttttcctcttctcacagtgatcttgtgagttagttacttatatttttattagaactcattattctgggtaccctccaatgagaattagagaggttaaataccttttcctagattcccacagcaggaaggtggcatagctgttttgtctgacaccagaacccatctcaccacactgctttacagtcttcctgaaggacattttgaggtgggggggccttcaaagctcagagactggtttgaatggtttaattttgcaatggatcatgtccatgccaggtgttacaattcttaacttcctccaaattcgtgtgtccattagacatttggctacatctggctggaggtcaggagaaaattctgaggtaaatagatggattttatctggcagtgtcgaaaatagtaggagcctaaaactttgttcaatgagtaagatgtagatttggagtcatcagcaggggaaacttgttagatgtcctttgtatctttttctatccatttgtattttttctttcccaaagagctgaaatcattttataccctgaatttaaaaggtaattgcttttttcctccttgcgaaatcataccttaattttttttttttttttttttaccatttatgatttattctcctatgtgtcatatgaaaggccaaggggctttatcttttactagtaggcaagcctgggcatttctgcatttgtgccagctaacactacaaaatagacttaattagagaaatttagacccagaattgcagcttcaacaacacaaaacaggaaagctagaagaggttgctgtgtcaacctacaagatagtgattcttggaagttggtatggaccagaaagcattcccaggacatttaggctatggctgagttctctaagactcagggtgggaattataatccctggtctaagctgatatgaaagtttctatgtgtgaaaatatggagttatatgctttgagattttctgccagttaaactaaaacaagatcatactgtaaatgtttgtaacttgcttccccccactgtatactgtaaacatctttgcatgtcaataaatatgcctctacaacatatttttgaatcacttaatatttttcccatgttaacagttggtatatagtgttgtaaacctttattgcatattctcataacatacaatatacacattcttttgcaaaaatgggaacacagtattgagacttgccttttcctcttaacacttatcttttcaatttagtattatatagatctgtcacatgctttttatctaataactttatagaaatataattgccatacattaagctgcatgttgaaagtatacagtgtgatcagttttggaatgtatatacacacaaaaccataaccacaatcaaaattgtaaatacattcatcacccaccaaagctactttttttttgagacagagtcttgctctgtcacccaggctggagtacagtggcgcaatctcggcccactgcaacctctgcttcccaggttcaagtgattctcgtgccttagcctcctgagcagctgggactacaggtgcatgccaccacatccgactaatttttttttttattttttgtatttttagtagagacagggtttcaccatgttggccaggctggtcttgaactcctggtctcaagtgatctacccatcttggtctccctgagtgccaggattacaggcgtgagccaccatgcccagcctcccccaaagcttcttaatgcccttttgtaatccctccctcccctctctccctgtgcccctaacccaggcaaccatgggacattttctgacaaaatagaattgttttcatttcctgtaattgtgtataaatggactcatatagcatgtactctttggtcgggaggggatctggcttatttcacttagtgtaattatttgagattcatccatatcatgtgtctcactatttcattgctttttattgccaagtagtattccaccatatggctttaccacagtttatttatccattcacttattgatggacatttgggctgttcagagtttggccattataagtaaagcagctatgagcatttgtgtacaagtgtttttatggacataggctttcatatctttggaatgacatctaacaatattgaatcttcgacccatgaataaaatctctctccacttatttaagtctcctttatttctctaagcagcattgtgtagttttcctgcaacatgcttttttagcagctgcatatattctgttatgtggtggtattacatgttatttaatctgttccctgatgatgaacacttacaggatttggtaagcatgaataattctatgatttggtatttaaatcttattctataggtgaggaagaccaaagttgtgatgggtaaagaagcagcagtcactaatattagccagaatgggggggggggtatttcatcatttttataattgggacaatgattttctgtgttaatacatgattacagagtagtcttgcttttgtcttgatacatgacattcatggagtagcctggtctgatgttaatgttctgtgaaattgtttcaattcaatgagagaacatcaaggcctagctgtgagtgctgggccagctcttagatgtcagactgcttttcttcttgtcatggatatttacaaatatttatgtatattgcctaaccttcaaaatgaatctcaccagcctcatctcatggatcatgaatgtctgtttcttcatatacttgccaacacttggtatcactgtttttaagttttgctactctcatagacaaaatcatctcattgttatttttataacaacattttaaaggttacataatactacatattatggatgtgacaattgaatcgcacctttatattccattgggttaattgtaggtatgtgaagatggaccccattacttagtgggtggaggagaggagtatatatacatctgtgtcactttgcctattttctttatgcctcctcattgctgtctttcccacgtgatctggaggcccttgcaattatcaccaactgacaactagaaaagttgtatcactttatgccttgggaactagatttaaaacaagaatgaagagtttagctgtgctgacattctgttacagagttcaggccctgaactctgttatggaccaacactcaggcaacagccatagtgactagacttgcaagtgatatgtacacacaactacacctcaaaacaaaatggggcttattaatgagacaagcaaaaatgctttccagttacagttttatgaagataacataaatgtacttctatttcttcagagttggtcattttataaaataagcttcagagaagtatcataattaattgtgagttgataaaagtcttcaagagcaacatgcactttttgctttaagattttagcttatctctggacacctactttcagctcgacagtgtgctatcttgtgtcagcagctcttctgaaaggagctctggccacctctctcctaaaggtgccatgtgcctctcaatggtcgttgctagggtttccctgaaggagaagagaactgcagaaacttgcaaactggaacagctatttgttgtgtatgttgaacacctcatttagcaaacaaaactaggctgttctcaggttgtgatatccaaaataaagcaaaatataaaagacttcggtagaaatatttttcttctccagaagatgttaatattccatgtaggagggagagactggctacaacctaaggcccagttaggtcctttgtggaaagctctaaaatgttaggaacaaacaaaatgcctagtatgttagcaatgaacaggaaagaggagtaatgcagaaagcaataatgtgtttccaggtgctctgctttgaattatgaaagagtgctattccctctccttgttgataacaaaatgtcattttaatgggaaattgcactggagaaagtgtgctccactaggcccatgctttattatgtagcttttatgtgtagctgtgctattgtagtttaaggatacaaagaattaatcttttatcagaaccatcttgattctacaaaatatgataatgtgatatgagttaaattgcactccttaacaaacatcgaatacttttttttttttttttgaggtggaatcttactctgtggcccaggctggaatgcaatggcatgatcccggctcactgcaacctccacctcctgggttcaggtgattctcctgccttggcctcccgagtacttgggattacagatgctcaccaccgcacccggctaatttttgtatttttagtagatatggggttttgccatgttgatcaggctggtctcgaactcctgaccttaggtgatcacccacctcggcctcccaaagtgctgggattacagacgtcagccactgcacccgacctacatgaatacttttataatggccttctggaaagccatacacttgggctgcaattgttcagaacattgaaattgcctttagaaccagtttgtattaattttatatttatgattgacacattataattgtgtatatttatgggtacagtatgatgtttcaatgcatgggtgcattgcataatgatcaaatcaggataattaccatatccatcactataaccacattcagaaccagtttgtgagttatacaaggacaccaggatcatcgctttatagccatggctatatattgaatatttttgtactcaagatcagtgctttttcatcttcatcatgtcctaacacactcagaaaaagagtatttgcatgggacaaacagacacatctgttcccccttaaaggcatcagcctcaaggactccagctgccccattcccacctgcaactactgtgagcactgagggaagcagtatcttcagcacacctgtaacctatttctagcatgtgattggaatgctctaccccaggtccatggttttcaactgcctttcttggagtcttaggattcccaggaaatgcttcaaaaggcactacagaggttcaggggaagctgagtgggttggatctatgtgcttcccactactctcaatcaaaacaacttagctttgggattatgtgtaagagtgtgtttggaaaaaagttccccctgttaaaaattgctgtgaccacttctataaatatccattcatccatccatctttaaaaagaatctgcatctaatggttgagttgcccttctgcatattcctaacactgacagtattactatctactgatttttttagttgatggaaatctattcatgttactcaaaagattcccgtgctcaggtttcacataatttattaaaagctctagctaataccttcaaataaagtttgtaaacttttgtaaattctatttttgaagaagtgtgtcacacacatggcagtcaggcaagagtaaatagtagttttgaatacaagtcccaaaggtatcatttttttattttgatgccagagttctcaacttcgttggcagtattttctgtctgccaaaagcataggcctccactgtacacatgtccatttgtgcaaaggttcccctaggaaacacttctagaatttgaatttctaagtctgaatagaacatttttcatcattggtgaaggtgtagaacagtgattcttaaccctggttgcattagaatcacctggagagcttttagaacctagtcatgcccaggatccgctcccaaagatgcttatttaattggtctggagaggaacttgggccttgataatttttaaaacgttccctaggtaatactaatgagcagtcaaatttgaaaaccgctgttgtagagaatcaggcaatctcatcaactgctggaggtaaaggagaataatttggtgtaacctcttctaatggtcatttaccaatatctattaaaatgttcatatttttgaatgagaaattaatagatatttatcctacagaaaaaaatacataaaagtgggcacaaatattgtataaatatgttaattgtaccaatgtttgtatttttgaaactagaaatattcaatatatccacaaataggagattaaatagcttacagtagttccgtagtatgggatattctgcattagtttaaagtaatcgaagagatctatatgtactaaaatatgatcttcgttttgaaaatgcatgaaaagagaaaaactggaatgacatataaaatatctaataggtttatagctagtggaggaactagagtgttttattatctttttatcttatttctctaattcttctttggtaaacaaatactacttatgtaataaaacatacaaccttaaggagaagatctgatgaggaagcatttgttacacaaaaagttgagcatatacccataaaggaaatatcaattaaatggagcttctcgggccgggtgtagtggctcacgcctgtaatcccagcactttggggggctgaggtggatcacttgaggccaggagtttgagaccagcttggcaacatagcaaaacccctttctactacaaatacaaaaattagccaggtgtggtagcgcatgactgtaatctcaaccactcaggtggctgaggcacgagaatcacttgaacccaggaggtggaggttccagtgagccaagatcgtgccactgcactccagcctaggcaacagagtgagactttcaaaataaaatgagataaatggaacttctgtaggggtgaattattggggcaagatacaaagtcgaatttcatgaacgcatattagtctaggaattacaaattatcgtaaatgagaagatgtaaatatgagctaaaattcacagtaatcgcccaagtaaatgagatatttaagcaatccagaaccttttctcatcaagttgattaagggaaataatctcccaaggtgttgggaggctgataggaaagtgtgtgtttcataatcagaacctaagaaatctgacacacaaactttgaaagtgtataagggaatgatcaaaaattagctgagtgtggtggtgggtgcctgtaatcccagctactcaggaggctgaggcaggagaacggcttgaacccaggaggtggaggttgcagtgagacaagatggtgccactgcactccaacctgggcaactccatctcgaagaagaaaatgtataagggaatgagaaacgttttgttttccggaggtcaagggaagtcgcagatcttggatggccgttacatatattattggcaatgcaaagagtcggtttacatccagacaccatactctcttttaaaaatgactgcatcaaataagtcttgtgaaaagcaaagaaaataataaaattgtgtttttatcttaaactagtaacagaagcaatcagttgctgaatggtctgtcactttatattcagtaggacctccctagacaggattattctgtgaagtagcatggttggaacaaaaagtagctaaggaagacatttcttctttttttccttttaatagacattctgtgcaccctttaacacaatatggttgcagcatcaaaggacacaattgattaatagtcatcataaaacttcacaaccatcctacaatgtgaaaaactgagcgcttagcctctactaaaggtttgtttattacatgaatgaaggaatgaacgaatgagctatgaggcactggatattgataaaaacaattctctatctttaaagtggaagttgagaagaaaacattagttccttgaacagccaactacctttgccaccagtaggtttagtcatacaaaaatctcttgaatggaatctatggtctttgagatatttcaaactgtgatagaaacaatgcaattaattcaagcaggtcctttctttaggactgatctacaaaatatgataatgtgatatgagtttaattgcactcctctacactataaaggacatctacactgatcaggcaaacctcacaattcaaatgaaccaattcaaactgcacatgtgagcttctcaaatgttttgtaggtataggctcaatagagggttgtttgctattaaatattggaaagtttacaaatttgtgttgggcagcattcaaagccatcctgggccacatgaggctgcgggtcacagattggacaagcttgctttaactcataatttgattttttaatgtttctctgatgcatgtgaaaatattatgagtaaaaagacaatgtttgggctctgctttaaaatactctagaaaacacacacacacacacacacacacaaacacacacacacaaaagggttggagagagttttaaaaatggcagaatgttactagatgttgcaacttgctggtgggcatatgggtgttcattaagctatcttttctacctttgtatatgctagaaattaaaattttaatccaaaaataaataaatattggaatcttaatatacaattttaatacttttatcatttgacatgtcctatgtaatatgctgtgaggatgaaaatacaactccattttcttttgaatatgtgttaaaaataataataaaaattatttttctttgcccagtgatttgaaaatgccacttttatcatcataaacatttataaatgctttggtcactctctcagtgggctttctattttatttcattaaattatatattgttatattggttttaattgttcttgccttgtaatttgttttagtataaaacagagaaagagtctcttcattatgcttcttctgaatggccatcattcttgttttattttattttatttattattcctgtttctaatggaagtaaggaagggtagagtgacttactcagtgttataaagtaagaatgttgttgatatagccccgggacccagatttcatgcctcccattacagtattctgtttgtcagcatcgttattttgctttattcttttgtgggatcttgtctctctgtaccttgaaggatataaccaacatcaagttctcttgcttctctgctgctgacagggaaaaaaaaaaaaggaagcaggaatgtacacacaccagttacatataaatgggtggtctttcatccctatctcaattatatcatcctaaacattctataatacaaaaatgatgcttaaggtaatatataatgtaatatgtgcttatttctctgtctgattcttaaaaaatttctgatgtatttaacagtcatgctgcaatctcaccagaattcttacactcagtcactacattcagttcaattagttaaacaaaaactcccagagtgtttggccctggctgaggctctacagatatatgttgctgtgtggtaggataccattgtggttaataccaatgtgctttgacaccatacagtctgggctagggtactgcctctgccccctactagccatgtggtcctggacaagtttcttaacctttctataccttgaggtcctgatccataaatggggataataccttaaagagctgttacgaagctcaaatacattaatgtcattaaagtactgaacatggtgtccagcatagaaatgtaggctagggtggaccttcatgctttttgttcatctgtcttgacgttgaaactccttttgggtctggctttacttgctgctcatataaccaatttctacatgttttaccatttaaaacatgcgtttaataaaggggaacaaaagctaagctctaaattttggttgaaactgcagattttgatacagtttataaaaacgactatacttcagtttgagaaactcatgtaaggatgaaaaaagactggagactctcaattctgtatgccatatgcatttatttaacaaatatgtatggaatgtctattatatgccaggctccagaagccctcaaaccatatctttattacagaaatttcttcaggggtccagacccatgaattcaaatacctatgagcaatttatatctaaagcagtgattcccattcaggagcaattatgctccttagctccagggacatggaaatgtctggagacatttttggtagtcacacctgggggtgctactggaatcttatgattagtggccaaggaggctgctgaacatcccccaatgcctaggacagcccccacagcaaagaactctccagcccaaaatgtcaatagtgctgaggttgagaaaacctgctctagaacagggcaaatgttactacccacacctatctgcaaaggttcatggtggaacccaaggttggggtctgaccaccctggattcaaataaccatgctgcctcttattgggcgtgtgtccttgtaaaatatatttaacctccattagccttaggagagcctgcttctggggaggaataagtttaagcagggaatattgatacctaacttacagaacagttgtaaggacttagagaaacagtatgtgaagtgcctaacacagtgtctggcccattgtaggcccttgaaatgttagttttctttccatccccctttctaacttctgcttctgagatgactttaacctaaactacatagtgctaagcagcataattgtgttctaaagagcttctgaaagcaaggcaacagaaagaaaaataaactcacacagacccacattatgtgtaagagttggtgcctcttctgtgttgtggcatcgtgcattgtaggtggcatggggaaatgtcaccccatttctttagaatcagtgtacctttcctgacctctttgggccccccttggagagtgaacatcaggagtggccattgactggttatctgggttgttcctgtggctccataaagacacatgcccagggaagagcagagcatgaggatgggtcttctggagagagcaatggagtgaaaggcagaagatgtcgcttccagagcctgacaaactgctttctgtgtgatgtgggtaaaacatataccttctcctggctacagacttggtgttagggcatgtgagttgaggggatcttctagcaggccaattttgggtataaatcatttggcttgtctctttccaagcatttctgccatcatataagttctcatattctagtgctgctgaaggattaaatgaattaaactatctcataggaaatctgggacattgctgaggcagaaggtcaaagtgtgctggtgggactcctagatggcccttatcacttctgcttgggaggggcacactccatttcccctcatagctcactggccacatctagtcacatgcccaggtctgatgtcagtggagtggggtcagtgggtgcctcagtgcacttgagctgccataacaaaatacctgaaagtgggtaatttgtaaacaacagaaatgtattactcaaagttctggaggctaggaagtccaagatcaagatgccagaatatttgtagtgtggtaaagactccgtctgcatcataaatgacaccttcttgctgcatgctcacatggtgaagtggcaaacaggttctctcaggcctctgataaggacactaatcccatttatgagggctctgccttcatggcctaactacctcctaaagattattaggtttcaacatataaatgtgtgggagacacaaacattcagacaaaagaagtgggcctaagagggaccctaaggacctgccggtacatgtaacttcacagctaggtttcatgggccagaaaacaagatttcatctccactatcatcttcctcaacatgaggggttattgagtgagtacctttaggggacaatactagggaaatgtaaaacttccaaatgggaagctgctggttttattgtggggagggaaagaatggaatcacattccatttctgccacttctctggagagggtcttagtccctttgagaaggagcttggtcatctgtgaaataagacgcaccacattatcttcttcagagtactgtcctgagggataaatgagaaaacctgtcaagtgcctatgggagatagtaggacttcagcacataacaggtctggctatttgccccctccctcccagagagtagatgacattgacctaaaccaaagggcattactgctattgagaccttgtggaaaggtagcagcaagagctgaaatatatccccataacctatgagctttgggccagttctgagttgtgggatgagttacatgtgagagctggggaaaaggaaaaataaatcaccataccatttcctataactgcatctgccttcctatcctcttaatttatcattcagtttgacactggaggagcagtttcccattaactttaaggtagaagggacaccacagggcaatatgacaagaatactggacggaagactagagtcataagaccagacacattatgatccacgattatgttctgttatatggcaaaagggagatgatcagcataggcctgacctaattagtcaagccctgtaaaatcagagaattttctcctgctgtttagagtagggcaagtcagagattcaaagcacaggaagccttcaatgtgccattgctggatggaagaaggaggccacatggcaggcaagtggactagcccccaggagctaagaatatccccaactgacagtcatcaaggaaatggggactgcggttcaatggccacaaggaaatgacttctgccagcagcaagaatgatcttggaagcagatttttatctagatcatccgcgtgagacctcagtggagccaacatgggcaccttgattctagctttgtgagaccttgagcagagaataaggtcatgctggaccagtcttctgacctacagacctgtgagctactagatggatgtagctttcagacactaagtctggttacacacctacaataaattaatacattccagttaagttaaatctattcaatgcatacacagtatttttgtttacatgtacacatgtgtatagatgataattggtggaaacataattacagtttttattagtgcatggtggggttagatattatcaatattcatattggtatttgaatgcactttccacattttttaaatagacagtgggttacttattaatcagagataaaacacattagagctttgttcatgtcaaatttgatagatttcagacttttcaaaaggtattgtaaatatgatagtaggcaaacacgtacacaaccaaggttatgaagcaaaacattacagagtggactctcctgtgtgagttccctgattgcctcagcgccctcagaaggaaccactatccaaaatttcttgtttagtcatgaatacatccctaaactaaacacataattgctttgcatatttttatctctatataagtaacatatttatatatctattatcgaaatgttttcttctgaaaatagtgtttctgagatgtttctaaccaggtgactttgggactattttgatatttacccatgctcctgtgaacaggtttgctatgtaccgagactctgcaatgcacatctgagagggcagcagatgacagagcctcacatgcttctattgtgggtgctgctcaatatctccacaaagaagttgtaccaatttgtccgctccaagctatgtatgggcttctcgtggccccaacatttcaattcaaacaggatgcaacataaacacaaattcgatgattgggttttcttttcaaactctagaattattccaagacatattctaaggtataatatggaaccattagctaagcatttttaatgcacctgtgaaatacactatttaaaacataatacgatagggaaaaataaagaaaatctaatgtaccaataacaggatctcagaataaaaaatattaaaaatctgtgaaacctatttttgcacagatcaggaaaaacagatgttttcaaattgttggatggaatataagaactattaaagaaattttaaagttcaactatataggaagcattaaaaatattaaatggtcatgctctttgacaaaacagttccacttctgggaatgtatcctcctgatatggcctcaagagtctcctgctgtaaccactcgtgtccacactgctcagggctgagatgaccatttccttagttggcccagtgccttcatgtcccagatcctgagtcatctacccctggatcaaaacaggaaaatcaaatctgaatcatggatggatgcccagactcgaaggaccatccactaattcaccacaaacattgatacagagcaatgctcaggtcccaactcctggagagatttgtagacctcaggcctcatccctgtctgggagaaatcttccttcctctcccatctttgtgtcctgagaggcccccacatccctaccaggtacaagcagcccggtcctttcaacaaattaagttttcataaaggatgaaagaaaaactggctccagaaggcttctgctgtcagccctctcacaaacctcccctgaagtaaggagagggggcaccaaccttactgcagggagggtaagcaaggagaacagagattaacctccttaacagtacatgtccagatacatttgctaaaggtctaccactagcaactcaaggtgcccaggctggcaggttctatccctggctctggcagtgggcctggtgagtaacctccttgccattcagctctgtgtttaggagcacgtgctttatagtcactgacatccatgaggaagagaggatactggtacctcaccagcacggctgtcatgagattaaatccagacactaatgtgaagaaactggagctgggcccagctaaaccatctgccttacaaaatagtagctgtcttttcctcctccaagcagggaactcatgttactctgagctgccacctcagccagggccccttaagagggcgcacatcgtagtcaccttgatgagtcttttctaaaccctcagctgaaactcccttgttggtggaaaaataggactttggcatcaaagatcattaatgtcttaagttataatatgagccttggaaaacagatatatccacttggcaccaacagtatatgtgagcgtctgctggcttttcattccaccaacaccaagtattaccaacttttgtccttattgccaatccaatctgctcattttccccagacctgtcccattggaagaatcagctcagatggtcattaaacttagagattcacagggtcatcccctgcaattgccagatttagcaaataataagacgatttaaaatttttattttgttatttatttcatttacttttatttatttaattaaaatccagttggattttaattttaaataaactaatattgcatgccacataaactaaaaaatattcctattaatccggaatttaaagttaactgagttgattttaatctggtaactgtacacgtggagggctctgtggagagccaagatgctcaggtcaacagccttaactgagctcccagcagacgccaacaccagtcatcattcatgtgagtgagctctctcagatgtcccagatgagtggaacctccagatgactgcagccccaggtgacagacatcatatagagcagaaaacatccagctgggcccagttaacacacaaaatactgagagaaaataaatggctattaattaagggtgcttgttaagaaggaacggatatctaaaacattatggttttggtgaacttttcctcattttctgtgttgtgttatcattgggtaagaaaggaattttcttatccttgaaggcttagtgaaacttggttataattgtatcatctgagtgttggcttacatgtgggtacagatttctgaacatgtcatcaattccttcttgaagggattcccaagggcaatttacatgatatctatttttcatgctagtcttaaaatttgaaacctaactccttaagaagaattcccactgcaatcatgtgaattaagatactgagagggcattgctacaaaccattctatgaggaaacctgagaggttgtcttagtgagtattcattctgaacaattttagaagtgtttctcaaagaaagtgtcctgaaacactttctcctgctatagtgataacccttggcaaggaagtaactttccttgggcacacatagacagggctcctttaggagacagcagatagatatacattgcagtccttggtctttatgactgtcccaatgcagcactgctgggtggataagtcaattctagaacttactcatagtaagcccacgtgacagcaaatctaagtcacattctccaatatcaccttataagagataaagtcaatatatgtttctccttattcttttcctatgtttctcagttggtttagagctcagactagaagcagaagagtattttgggggccccttaaagaattaagcattgtgaatcaagaactataggaataattgtagagtcagtgagacacagttagaggagtaaacctgtgggcctattttaagtcccatccctgaaggcaaagctgaacaagtgcctcctgaagggcagcttactaccaagaagttgaagggagagggcttgggcagagtatcatgtgtctccttccagattctccaatcggataagtcattcctgccgtagagaggagtgagtgtgtagaggctacatgtatttttgtcatggatgtattttccacatggaaaaacataccaggaatgaaggataagaatttccttaaggcagggctgggtgcggtggctcacgcctgtaatcccagcactttgggaggccgaggcgggtggatcacgaggtcaggagatcgaggccagcttgactaacatggtgaaaccctgtctctactaaaaatataaaaattagctgggtgtggtggtaagcgcctgtaatcccagctactcgggaggctgaggcaggagaatcgcttgaacctgggaggcagaggttgcagtgagctgagattgcgccgtgcactccaacctgggcgatagagcgagactccgtctcaaaaaaaaaaaaaaaaaaaaaaatttccttaaggcaaactactgtgtgttttaattgactggattcctgcctactaaatgattatattattctagtccggcctccctgaaataactgtattattactcaaatgacagtttttgtgtttctagatcattcagtcacttgattataaacaatctgttttctgccacagaaaaccaactgcctagtatagtgtgtgagttgtacatgttcctcctcagagggctagctcatctcccagagtcctaggacacctctctgggcttctgtgtactgatgatactcctctaaggtcacttttttttttttttttttttgagaatctcggctcactgcaagctccgcctcccgggttcacaccgttctactgcctcagtctcctgagtagctgggactacaggcgctcgccaccacgcccggctaattttttgtatttttagtagagatggggtttcaccgtgttagtcaggatggtgtcgatcttctgacctcgtgatcctcccgcctcgccctcccaaagtactgggattacaggcatgagccaccgcgcccggcccccttaggtcacttttaaagcaaaattcctgacaacatggacttcctttcctctaccataatgagtagagagtcttgaaaattgcccggatcccagcctctaattggtatgttttctcagggagttatctgaagaatgaaggtgttttgctttaagggataggctggggatggaggagcgggttgtgcatagtcattttcaggtgtggaagacaagccagtgctacgcggttgccatagtaacctgacgtcatattagcgacggtgacgactttttattgagaccaatttggcctggggagaaccgccttcaggcgtttggactcagtggaggttgtgagtgcccagcagtgtggcctgaatctccgtggggtttagggagacgaaaggaccccagatcgacgtcccctcgttcccactttggggatcggcgctctggctgtttcgtgaaggagagagaggtgggtctcttctggccccagtgagtgtggtgtcctgctccagggtgtcccggggctactttccctgtaaaggcgggacgcgggaggatgagacaggtaaagaccctctctgagcccagtttcccactctgtaaaatggaaataaaaatgctcacccacaggattgctgaaaccttcagtgataacataggtgcaagacgatagccctgtggttattgcaggatcaggaatgcctgtatgaagtcaggcctcttcttgttctgtttcaaactttcttacagtatagacaagggagaaactttatgtttaacatgcatttatgataagtttatatatatatttctgactgcataaataataaccagtgattcccatcaacactatcaaatgaatgttgaaatataaagttagttagaaggccttcctaccaatttgagattataatatgcattctcccatatctgttgtataataaatttgtttatgaactataacttataaagtgtcaattaaaaagtcatatgatgttttgatatattttatacattgtagaatggctgaatcaagctaataaacctatgcattacctaatgtacttttttttgtggtgaacacttaaaatctacccttttagcagttttcaagtgtacaatatatttttattaaccatggtcactatgatgtacaatagatcccttgaatttatccctcctctctaactgaaattttgtatccattgaccaacatctccccaaacccctccccagcctctgtctggtaattactgttctactctctgcttctatgagttcaacttatttagattccatatacaagtgagattacgtggtatttgtcttgctgtgcctggcttatttcacttaatgtcctccaggttcatccatgttgtcacaaatgacaggatttccttcttttttcaaaaagctgaatagtacgccattgtgtgcatgtatgacattttctttattcatctgttggtggatacttaggttgattccataccctggctattgtgaataatgctgcagtgaacatgggagtacatacatctgtttgaggtactaatttcatttcctttggatatatactcagaagggggactgctggatcatttggtaattctatttttagtttttttcaggaatgaccatactgtttctgtaatatctgtataaatttacattcccagtattgtacaagggttccatttttttccacatccttgtgaacacttaccatcttctgtttttttaaataatggccatcctaacaagtgtgaggtgatatcttgttatggttttaatgtgcatttccctgacaattagtgatattgagaattttttcacatatctgttggccacttgtatgtcttactttgaaaaatgtatattttattatatatggacacatgattattgtacatatttatgggggtacactgtgatatttcaatatatgtatacaatgtgtagtgataaaatcagggtagttagcatatccatcatctcaaatctttatcatttatatgtgctggtaacattcaacattttctcttctagctatttgaaaaaatacattaaattattgtttgataatttagtataatgctatagaacactagagattattcttcctatccagggtctggagtatgggctagccttcaatggatgttaatctagtgtctggagtacagacatgtgcaaagtgaccttggcttaggggcccggatcccagcctagttcctctaattggtatgttttctcagggagttatctgaagagtgaaggtgttttgctaggtctctatggcagtggctctggtgtctgaggcatgggcaggcacagtcaggcacagagctggggtctggagtatgggtatttacagagtagttgtagcttgggggggtcagtgacacatgcagcattgggacaggtggcacctctggtcccagagtggtataatagctgctgcttcttgagatgagaagtgtgtagccacttctccctctctggggttccttgggcaggaatggctgttggttatctcagtggcgaaagatgccagtgtcctctccagagcagactgctggggaccatggtgattcctgccacatggctaatagcaatagcctttgcctttcttctttgctcctagacatctcctggcacctcaagtatactgatctcaccagcaatattttctgtgtggatattccccatttttttttctactgtgttgctgcagattcttaaatgggcccctgagccctcccatgaatactttagtttgtggatagctgtctacacttgtttttttgtggcagggggtgatgaaggctgatatctcctactctgccctcttggtccttcagtatctagtttgccctattctaatgataccctgccatgtcccctaaaggaaccgtataggcttatatatcattgttattattttcaaggacataacattttcagttctgttgtacccagcctacccattcctcccactgtcctgtctccagacaaatacagcacttttgtcattatagattagatttcatttatttaaaaataatcatagaggttttttttttattttttttttttagggatctggcttctttcattcactctatgtatttttagatttgtccattttattgcctatttcaatagtttttttttttttattacagagtagcattacagtataggatatactacaattcgttttgtccattcacttgctaatggatatttgggttgtattcaatttaggggatcttgtgtatgagtctttacagagaaatgtgctttctttctctagggtaaatacttaggattgcagtggctggaacatgttatagatgtaagactaacattgtaagaaactgccaaactgttttcaaagtggttgtaccatttttcattgtctcagcagagcttcatcctccacaacctcgtcagtgcttggtatggtcagtctctaactttagtgattctcatgcggcgataaaacaagacgacccaatggagcttaattaggccacacacaaaaaacattaactatttaaaggaataatatttaatctactgggctaaaaatttcagttggggtaacttcagagcaccgtacaacctctgaatgattaaaacccggactagactagttattcataaaagtgtgttataatttattgacccaagcaatttgatcaatagaacaagttaccctagggataacagcatgatcatatcttagagttcatatcaaccatagggatttacaatcctgatgtgggatcagaacatctcaatagtataacagctattttttttttttttttttttgagacgaagtctcgccccgtcgcccaggctggagtgcagtggtgcaatctcggctcactgcaacctctgcctcccaggttcaagcgattctcttgcctcggcctcccgagtagctgggactacaggcgcccgccacctcgcctggctgattttttgaatttttagtagagacggggtttcaccgtgttagtcaggatggtctggatctcctgaccttgtgatccgcccgcctcagcctcccaaagtgctgggattacagacgtgagccaccgcgcctggccagcagctattaattgtttatgttttcagtgaccaaagtcctacatgatttaagttcaggatctgggttggtttccacctatttaatatttctcccaatacaaaaagagaagagaattatggcacacaaaaagcaccctcaattcaaaagatgatataatctagatctaatttattattatacactttgccccaaaacagggcttgttaagatggtagagcctggtaattgcataaaacttgaaattttataatcagaggttcaattactcttctttttaaaataattgtttattttatttttattttttgtgggtatacagtaggtgtatgtatttatggggtacatgggacgttttgatacaggcatgtaatgcatatcaatcacatcgtggaaaatgggtatctcctcaagaatttatcctttctgttacaaaaaaatccaattatactcttttagttgttttaaaatatacaattaagttattattgactatagtcaccctgttgtgctatcaaatactaggtccgtttcattctattttttgtactggttaaccatcccccatctctccccaaccctccccaattcctttcccagcctctggtaaccatccttctactctctatctccacaggttaaattgttttgatttttagaccccacaaataaataagaacatgcaaggtttctccttctatgtctggcttacttcacttaacataatgatcgccagttccatccatgtttttgcaaatgactggatctcattattttttatggctgagtagtactccatcgtgtataagtaccacattttctttatccattcatctgttgatggacacaggcttcttccaactcttgtctattgtgaacagagtggcaacaaacatgggagtgcagatgtctcttcaatatactgatttcctttcttttgggtatatatccagagtaggattgctggatcacatgggtagctctattttcagttttctgaggaacctccaaactgttctctacaatggttgtagtaatttacgttcccaccaacagtgtacgagggttcttttttctccacatcttcacctgcaattgttattgcccgtcttttggacataagccattttaactgagaagggatgatatctcattgtagttttgatttgcatttctctgatgattcattacgttgagcacctatatatgcctgtttgtcatttgtatgtcttcctttgagaaatgtctattcagatatatatatatatttttttttttttttttttttttagacggagtcttgctctgtcagcaggctggagtgcagtggcgcaatctcggctcactgcaacctccacctcctgggttcaagcgattctcctgcctcagcctcccgagtagctgggactacaggcgcatgccaccatgcccagctaatttttgtatttttagtagagatggggtttcaccattttggccaggatggtctcgatctcttgacctcgtgatccacccaccttggcctcccaaggtactgggattacaggcatgagccaccgtgcccggcctgcccattttaaattcagattattatattttttcctatagaactatttgagatacttatacatctggttattaattccttgtcagatgggtagtttgcaaacatttttacccattctgtggttgtttcttaactttgttgattgtttcctctgctgtgcagaagccttttaacttgatgtgatgctatttgtccatttttgctctggttgcctgtgcttgtggggtattactcaagaaatttttgcccagactgatgttctggagagttttcccaaagttttcttgtagtagttttatagtttgaggtcttagatttaattctttaatccattttgatttgatttttgtacatgatgagagataggggtctagtttcattcttctgcatataggtatccagttttcccaggaccatttattgaaggtactgtctttacagtatatgttcttggcacctttatcaaaaatgatttcactgtaggcgtatgcatttctttccgggatctctattctgttccattcatctatgtgtctgtttttatgacagtagtatgctgttttggttactatagctctgcagtataatttgaagtcaggtaatgtgattcctccacttttattcttattgctcaggatcgctttagctattctgggtcttttgtggttctatatcccttttagggtactttttttctatttctatgaagattgtcattggtattttgataggaattgcattgaatctgtagattgctttgggtagtatgggcattttaacaatattgatttttccagtgcctgaacgagggatatttttccatcttctggtgtccccttcaatttatttcatcagtcctttgtggttttcattatagaggtctttcacttctttggttaattcctaggtattttatttcgtttgtggctattgtaaatgggattacatttttattttttttttcagattgctcactgttggcatatagaaatgctactgatttttccatgttgattttgtatcctgcaactttactgaatttatttattagtatgaatagttttttggtggagtctaggtttttccaaatataagataatgtcatctgcaaacaaggatgattttaattcttcctttccaacttggaggcactttatagctttctcttctttggatgctctagctaagagctccagtactgtattaaataacagtggtgaaagtggccggccatattatgttccagatcttagagaaaaggctttcaattttttttcccattcagtatgatactagctgtgggtctgtcaatatgggttttattatgttgaggtatgttccttctaccccagttttttagggtttttatcaagaaagagatgttgaattttatcaaatgcttttccagcatcaattgaaatgatcatatggtttttgtctttctgttgacatgatatatcacattgattgatttgcatatgttaaactgtccttgcatcccaaagataaatcccacttggtcatgatgaatgatctttttgatgtatcattgaattgggttttgctggtattttgctgaagatttttgcatcaatattcatcatagaaattggcctatagtttttttttagtgtgtttttgtctggttttggtatcaaaataatactgtcctcatagaatgagtttggcagtattccttccttctgttttttggaatagtttgagtaggatttgggtattagttctctttaaatgtttggtagaatttagcagtaaagccatggggtcctggactttttcgttactgggtgtattagtctgttttcacactgctgataaagacataccccagactgagactgggcaatttacaaaagaaagaggtttaattggacttaacagttccacatggctggggaaacctcacaataatggtggaaggcaaggagatacaagtcacaccttatatgaatggcagcaggcaaacagagagagagagcttgtgcagagaaactcccatctttaaaaccatcagatctcatgagaccggttcactatgacaagaacagcatgagaaagacctatccccataattcaaacatcttcccccaggtccctcgcacaacatgtgggaattatgggagctacaagatgagatttgcgtggggacaaagagccaaaccgttatcactggggagactttttactatggctttaatctcattacttgtttttttctttttttttttttactttaagttttagggtacatgtgcacaacgtgcagattagttacatatgtatacatgtgccatgttggtgtgctgcacccattaattcgtcatttaacattaggtatatctcataatgctatccctcccccctccccccagcccacaacaggccccggtgtgtgatgttccccttcctgtgtccatgtgttctcattgttcaattcccacctatgagtgagaacatgcggtgtttggttttttgtccttgtgatagtttgctgagaatgatggtttccagcttcacccatgtccctgcaaaggacatgaactcatcattttttgtggctgcatagtaatccatggtgtatatgtgccacattttcttttttttttttttttttttgagacggagtctcgctctgtcgcccaggccagactgcggactgcagtggcgcaatctcggctcactgcaagctccgcttctcgggttcacgccattctcctgcctcagcctcccgagtagctgggactacaggcacccgccaccgcgcccggctaattttttgtatttttagtagagacagggtttcaccttgttagccaggatggtctcgatctcctgacctcatgatccacccgcctcggcctcccaaagtgctgggattacaggcgtgagacaccgcgcccggccgccacattttcttaatccagtctatcattgttggacatttgggttggctccaagtcttcgctattgtgaatagtgccgcaataaacatacgtgtgcatgtgtctttatagcagcatgatttataatcctttgggtatatacccagtaatgggatggctgggtcaaatggtatttctagttctagatccctgaggaatcgccacactgacttccacaatggttgaactagtttacagtcccaccaacagtgtaaaagtgttcctatttctccacatcctctccagcacctgttgtttcctgactttttaatgattgccattctaactggtgtgagatggtatctcattgtggttttgatttgcatttctctgatggccagtgatgatgagcattttttcatgtgtcttttggctgcataaatgtcttcttctgagaagtgtctattcatatcctttgcccactttttgatggggttgtttgtttttttcttgtaaatttatttgaattcattgtaggttctggatattagccctttgtcagatgagtagattgcaaaaattttctcccattctgtaggttgccttttcactctgatggtagtttcttttgctgtgcagaagctctttagtttaattagatcccatttgtcaattttggcttttgttgccactgcttttggtgttttagacatgaagtccttgcccatgcctgtgtcctgaatggtattgcctaggttttcttctagggtttttatggttttaggtctaacatttaagtctttaatccatcttgaattaatttttgtataaggtgtaaggaagggatccagtttcagctttttacatgtggctagccagttttcccaatgccatttattaaatagggaatcatttccccatttcttgtttttgtcaggtttgtcaaagatcagatggttatagatatgtggcattatttctgagggctctgttgtgttccattggtctatatctctgttttggtaccagtaccatgctgttttggttactgtagccttgtagtatagtttgaagtcaggtagcgtgatgcctccagctttgttcttttggcttaggattgacttggcaatgcaggctcttttttggttccatatgaactttaaagtagttttttccaattctgtgaagaaagtcattggtagcttgatggggatggcattgaatctataaattaccttgggcagtatggtcattctcatgatattgattcttcctacccatgagcatggaatgttcttccatttgtttgtatcctcttatttcattgagcagtgatttgtagttctccttgaagaggtccttcacgttccttgtaagttggattcctaggtattttattctctttgaagcaattgtgaatgggagttcactcatgatttggctctctgtttgtctgttattggtgtataagaatgcttgtgatttttgcacattgattttgtatactgagactttgctgaagttgcctatcagcttatggagatttttgggctgagatgatggggttttctagatatacaatcatgtcatctgcaaacagggacaatttgacttcctcttttcctaattgaataccctttatttccttctcctgcctgattgccctggtcagaacttccaacactatgttgaataggagtggtgagagagggcatccctgtcttgtgccagttttcaaagggaatgcttccagtttttgcccattcagtatgatattggctgtgggtttgtcatagatagctcttattattttgagatacgtcccatcaatacctagtttattgagagtttttagtatgaaggttgttgaatttagtcaaaggccttttctgcatctattgagataatcatgtggtttttgtcattggttctgtttatatgctggattacgtttattgatttgtgtatgttgaaccaggcttgcatcccagggatgaagcccacttgatcatggtggataagctttttgatgagctgctggatttggtttgccagtattttattgaggatttttgcatcgatgttcatcagggatattggtctagaattctctttttttgttgtgtctctgccaggctttggtatcaggatgatgctgtcctcataaaatgagttagggaggattccctctttttctattgattggaatagtttcagaaggaatggtaccagctcctccttgtacctctggtagaattcggctgtgaatccttctggtcctggacttttttggttggtaagctatcaattattgcctcaatttcagagcctgttattggtctattcagagattcaacttcttcctggtttagtcttgggagggtgtatgtgtcaaggaattcatccatttcttctagattttctagtttatttcatagagttgtttatagtattctctggtgatagtttgtatttctgtgggatcggtggtgatatcccctttatcattttttattgtgtccatttgattcttctctcttttcttctttattagtcttgctagcggtctatcaattttgttgatcttttcaaaaaaccagcgactggattcattaattttttgaagggttttttgtgtctctatttccttcagttctgctctgatcttagttatttcttgccttctgctagcttttgaatgtgtttgctcttgcttctctagttcttttaattatgatgttagggtgtcaattttagatctttcctgctttctcttgtgggcatgtagtgctataaatttccctctacacactgctttgaatgtgtcccagagattctggtatgttgtgtctttgttcttgttggtttcaaagaacatctttatttctgccttcatttcgttatgtacctagtagtcattcaggagtaggttgttcagtttccatgtagttgagtggtttcgagtgaatttcttaatcctgagttctagtttgattgcactgtggtctgagagacagtttgttataatttctattcttttacatttgctgaggagtgctttacttccaactatgtggtcagttttggaatgagtgtggtgtggtgctgaaaagaatgtatattctgttgatttggggtagagagttctgtagatgtctattaggtccacttggtgcagagctgagttcaattcctggatatccttgtgaactgtctgtctcgttgatctgcctaatgttgacagtggggtgttaaagtctcccattattattgtgtgggagtctaagtctctttgtaggtcactaaggacttgctttatgaatctggctgctcctgtattgggtgcatatatatttaggatagttagctcttcttgttgaattgatccctttaccgttatgtaatggccttcattgtctcttttgatctttgttggtttaaagtctgttttatcagagactaggattgcaacccctgcctttttttgttttccatttgcttggtagatcttcctccatccctttattttgagcctatgtgtgtctctgcacgtgagatgggtttcctgaatacagcacactgatgggtcttgactctttatccaatttgccagtctgtgtcttttaattggagcatttagcccatttacatttaaggttaatattgttttgtgtgaatttgatcctgtcattatgacgttagctggttattttgcttgttagttgatgcagtttcttcctagcctcgatggtctttacaatttggcatgtttttgcagtggctggtaccggttgttcctttccatgtttagtgcttccttcaggagctcttttagggcaggcctggtggtgacaaaatctcccagcatttgctcgtctgtaaagtattttatttttcctttacttatgaagcttagtttggctggatatgacattctgggttgaaaattcttttctttaagaatgttgaatattggctcccactctcttctggcttgtagagtttctgcagagaaatcagctgttagtctgatgggcttccctttgtgggcaacccaccgtttctctctctctgcccttaacattttttccttcatttcaactttggtgtatctgacaattatgtgtcttggagttgctcttctcaaggagtatctttgtggcattctctgtatttcctgaatttgaatgttggcctgccttgctagattggggaagttctcctggataatatcctgcagagtgttttccaacttggttccatcctccccgtcactttcaggcacaccaatcagacgtagatttggtcttttcacatagtcccacgtttcttggaggctttgttcgtttttttttattcttttttctgtaaacttctcttctcgcttcatttcattcatttagtcttccatcactgataccctttcttccagttgatcgaattggctactgagacttgtgcattcatcacgtagttcttgtgccttggttttcagctccatcaggtcctttaaggacttctctgcattggttattgtagttagccattcatctaattttctttcaaggtttttaacttctttgtcatgggttcgaactt

SEQ ID NO: 10521 - DNA, 6037 bp, Homo sapiens
agctattttattattattattattattattattatttttttaattatactttaagttttagggtacatgtgcacattgtgcaggttagttacatatgtatacatgtgccatgctggtgcgctgcacccactaactcgtcatctagcattaggtatatctcccaatgctatccctcccccctcccccctccccaccacagtccccagaatgtgatattccccttcctgtgtccatgtgatctcattgttcaattcccacctatgagtgagaatatgcggtgtttggttttttgttcttgcgatagtttactgagaatgatggtttccaatttcatccatgtccctacaaaggacatgaactcatcattttttatggctgcgtagtattccatggtgtatatgtgccacattttcttaatccagtctatcattgttggacatttgggttggttccaagtctttgctattgtgaataatgccgcaataaacatacgtgtgcatgtgtctttatagcagcatgatttctagtcatttgggtatatacccagtaatgggatggctgggtcaaatggtatttctagttctagatccctgagaaatcgccacactgacttccacaatggttgaactagtttacagtctcaccaacagtgtaaaagtgttcctatttctccacatcctctccagcacctgttgtttcctgactttttaatgattgccattctaactggtgtgagatgatatctcatagtggttttgatttgcatttctctgatggccagtgatgatgagcattttttcatgtgttttttggctgcataaatgtcttcttttgagaagtgtctgttcatgtccctcgcccactttttgatggggttgtttgtttttttcttgtaaatttgtttgagttcattgtagattctggatattagccctttgtcagatgagtaggttgcgaaaattttctcccatgttgtaggttgcctgttcactctgatggtagtttcttttgctgtgcagaagctctttagtttaattagatcccatttgtcaattttggctttggttgccattgcttttggtgttttggacatgaagtccttgcccacgcctatgtcctgaatggtaatgcctaggttttcttctagggtttttatggttttaggtctaacgtttaaatctttaatccatcttgaattgatttttgtacaaggtgtaaggaagggatccagtttcagctttctacatatggctagccagttttcccagcaccatttattaaatagggaatcctttccccattgcttgtttttctcaggtttgtcaaagatcagatagttgtaggtatgcggcgttatttctgagggctctgttctgttccattgatctatatctctgttttggtaccagtaccatgctgttttggttactgtagccttgtagtatagtttgaagtcaggtagtgtgatgcctccagctgtgttcttttggcttaggattgacttggcgatgcgggctcttttttggttccatatgaactttaaagtagttttttccaattctgtgaggaaagtcattggtagcttgatggggatggcattgaatctgtaaattatcttgggcagtatggccattttcacgatattgattcttcctacccatgagcatggaatgttcttccatttgtttgtgtcctcttttatttccttgagcagtggtttgtagttctccttgaagaggtccttcacatcccttgtaagttggattcctaggtattttattctctttgaagcaattgtgaatgggagttcactcatgatttggctctctgtttgtctgttgttggtgtataggaatgcttgtgatttttgtacattgattttgtatcctgagactttgctgaagttgcttatcagcttaaggagattttgggctgagacaatggggttttctagataaacaatcatgtcgtctgcaaacagggacaatttgacttcctcttttcctaattgaataccctttatttccttctcctgcctgattgccctggccagaacttccaacactatgttgaataggagcggtgagagaggtcatccctgtcttgtgccagttttcaaagggaatgcttccagtttttgcccattcagtatgatattggctgtgggtttgtcatagatagctcttattattttgaaatacgtcccatcaatacctactttattgagagtttttagcatgaagggttgttgaattttgtcaaaggctttttctgcatctattgagataatcatgtggtttttgtctttggctctgtttatatgctggattacatttattgatttgcgtatattgaaccagccttgcatcccagggatgaagcccacttgatcatggtggataagctttttgatgtgctgctggattcggtttgccagtattttattgaggatttttgcatcaatgttcatcaaggatattggtctaaaattctcttttttggttgtgtctctgcccggctttggtatcagaatgatgctggcctcataaaatgagttagggaggattccctctttttctattgattggaatagtttcagaaggaatggtaccagttcctccttgtacctctggtagaattcggctgtgaatccatctggtcctggactctttttggttggtaaactattgattattgccacaatttcagctcctgttattggtctattcagagattcaacttcttcctggtttagtcttgggagagtgtatgtgtcgaggaatgtatccatttcttctagattttctagtttatttgcgtagaggtgtttgtagtattctctgatggtagtttgtatttctgtgggatcggtggtgatatcccctttatcattttttattgtgtctatttgattcttctctctttttttctttattaatcttgctagtggtctatcaattttgttgatcctttcaaaaaaccagctcctggattcattgattttttgaagggttttttgtgtctctatttccttcagttctgctctgattttagttatttcttgccttctgctagcttttgaatgtgtttgctcttgcttttctagttcttttaattgtgatgttagggtgtcaattttggatctttcctgctttctcttgtgggcatttagtgctataaatttccctctacacactgctttgaatgtgtcccagagattctggtatgttgtgtctttgttctcgttggtttcaaagaacatctttatttctgccttcatttcgttatgtacccagtagtcattcaggagcaggttgttcagtttccatgtagttgagcggctttgagtgagattcttaatcctgagttctagtttgattgcactgtggtctgagagatagtttgttataatttctgttcttttacatttcctgaggagagctttacttccaactatgtggtcagttttggaataggtatggtgtggtgctgaaaaaaatgtatattctgttgatttggggtggagagttctgtagatgtctattaggtccgcttggtgcagagctgagttcaattcctgggtatcctttttgactttctgtctcgttcatctgtctaatgttgacagtggggtgttaaagtctcccattattaatgtgtaggagtctaagtctctttgtaggtcactcaggtcttgctttatgaatctgggtgctcctgtattgggtgcatatatatttaggatagttagctcctcttgttgaattgatccctttaccattatataatggccttctttgtctcttttgatctttgttggtttaaagtctgttttatcagagactaggattgcaacccctgcctttttttgttttccatttgcttggtagatcttcctccatccttttattttgagcctatgtgtgtctctgcacgtgagatgggtttcctgaatacagcacactgatgggtcttgactctttatccaatttgccagtctgtgtcttttaattggagaatttagtccatttacatttaaagttaatattgttatgtgtgaatttgatcctgtcattatgatgttagctggtgattttgctcgttagttgatgcagtttcttcctagtctcgatggtctttacattttggcatgattttgccacggctgttaccggttgttcctttccatgtttagcgcttccttcaggagctcttttagggcaggcctggtggtgacaaaatctctcagcatttgcttgtctgtaaagtattttatttatccttcacttatgaagcttagtttggctggatatgaaattctgggttgaaaattcttttctttaagaatgttgaatattggcccccactctcttctggcttgtagggtttctgccgagagatccgctgttagtctgatgggtttccctttgagggtaacccgacctttctctctggctgcccttaacattttttccttcatttcaactttggtgaatctgacaattatgtgtcttggagttgctcttctcgaggagtatctttgtggcgttctctgtatttcctgaatctgaacgtcggcctgccttgctagattggggaagttctcctggataatatcctgcacagtgttttccaacttggttccattctccgcatcactttcaggtacaccaatcagacgtagatttggtcttttcacatagtcccatatttcttggaggctttgctcatttctttttattcttttttctctaaacttcccttctcacttcatttcattcatttcatcttccattgctgataccctttcttccagttgatcgcatcggctcctgaggcttctgcattcttcacgtagttctcgagccttggttttcagctccatcagctcctttaagcacttctctgtattggttattctagttatacattcttctaaatttttttcaaagttttcaacttctttgcctttggtttgaatgtcctcccgtagctcagagtaatttgatcgtctgaagccttcctctctcagctcatcaaaatcattctccatccagctttgttccattgctggtgaggaactgcgttcctttggaggaggagaggcgctctgcgttttagagtttccagtttttctgttctgttttttccccatctttgtggttttatctacttttggtctttgttgatggtgatgtacagatgggttttcggtgtggatgtcctttctgtttgttagttttccttctaacagacaggaccctcagctgcaggtcttttggaatactctgctgtgtgaggtgtcagtgtgcccctgctggggggtgcctcccagttaggctgctcgggggtcaggggtcagggacccacttgaggaagcagtctgcccgttctcagatctccagctgcgtgctgggagaaccactgctctcttcaaagctgtcagacagggacatttaagtctgcagaggttactgctgtctttttgtttgtctgtgccctgcccccagaggtggagcctacagaggcaggcaggcttccttgagctgtggtgggctccacccagttcgagcttcctggctgctttgtttacctaagcaagcctgggcaatggcgggcgcccctcccccagcctctctgccgccttgcagtttgatctcagactgctgtgctagcaatcagcgagattccgtgggcttaggaccctccgagccaggtgtgggatataatctcgtggtgcgctgttttttaagccggtctgaaaagcacaatattcgccaggtgcgtccgtcacccctttctttgactcggaaagggaactccctgaccccttgtgcttcccaggtgaggcaatgcctcgccctgcttcggctcgcgcacggtgcgcgcacccactggcctgcgcccactgtctggcactcccttagtgagatgaacccggtacctcagatggaaatgcagaaatcacccgtcttctgcgtcgctcacgctgggagctgtagaccggagctgttcctattcggccatcttggctcct

SEQ ID NO: 10522 - DNA, 6075 bp, Homo sapiens
tttctcttttttttttttttttttgaattgtgttggcttttttttttttttttttattatactctaagttttagggtacatgttcacattgtgcaggttagttacatatgtatacatgtgccatgctggtgcgctgcacccactaacgtgtcatctagcattaggtatatctcccaatgctatccctcacccctcccccgaccccaccacagtccccagagtgtgatattccccttcctgtgtccatgtgatctcattgtttaattcccacctatgagtgagaatatgcggtgtttggttttttgttcttgcgatagtttactgagaatgatggtttccaatttcatccatgtccctacaaaggacatgaactcatcattttttatggctgcatagtattccatggtgtatatgtgccacattttcttaatccagtctatcattgttggacatttgggttggttccaagtctttgctattgtgaatagtgccgcaataaacatacgtgtgcatgtgtctttatagcagcatgatttatagtcctttgggtatatacccagtaatgggatggctgggtcaaatggtatttctagttctagatgcctgaggaatcgccacactgacttccacaatggttgaactagtttacagtcccaccaacagtgtaaaagtgttcctatttctccacatcctctccagcacctgttgtttcctgactttttaatgattgccattctaactggtgtgagatgatatctcatagtggttttgatttgcatttctctgatggccagtgatgatgagcatttcttcatgtgttttttggctgcataaatgtcttcttttgagaagtgtctgttcatgtccttcgcccactttttgatggggttgtttgtttttttcttgtaaatttgtttgagttcattgtagattctggatattagccctttgtcagatgagtaggttgcgaaaattttctcccatgttgtaggttgcctgttcactctgatggtagtttcttttgctgtgcagaagctccttagtttaattagatcccatttgtcaattttggcttttgttgccattgcttttggtgttttggacatgaagtccttgcccacgcctatgtcctgaatggtaatgcctaggttttcttctagggtttttatggttttaggtctaacgtttaaatctttaatccatcttgaattgatttttgtataaggtgtaaggaagggatccagtttcagctttctacatatggctagccagttttcccagcaccatttattaaatagggaatcctttccccattgcttgtttttgtcaggtttgtcaaagatcagatagttgtagatatgcggcattatttctgagggctctggtctgttccattgatctatatctctgttttggtaccagtaccatgctgttttggttactgtagccttgtagtatagtttgaagtcaggtagtgtgatgcctccagctttgttcttttgtcttaggattgacttggcgatgcaggctcttttttggttccatatgaactttaaagtagttttttccaattctgtgaagaaagtcattggtagcttgatggggatggcattgaatctgtaaattaccttgggcagtatggccattttcacgatattgattcttcctacccatgagcatggaatgttcttccatttgtttgtgtcctcttttatttccttgagcagtggtttgtagttctccttgaagaggtccttcacatcccttgtaagttggattcctaggtattttattctctttgaagcaattgtgaatgggagttcactcatgatttggctctctgtttgtctgttgttggtgtataagaatgcttgtgatttttgtacattgattttgtatcctgagactttgctgaagttgcttatcagcttaaggagattttgggctgagacgatggggttttctagataaacaatcatgtcgtctgcaaacagggacaatttgacttcctcttttcctaattgaataccctttatttccttctcctgcctgattgccctggccagaacttccaacactatgttgaataggagcggtcagagagggcatccctgtcttgtgccagttttcaaagggaatgcttccagttattgcccattcagtatgatattggctgtgggtttgtcatagatagctcttattattttgaaatacgtcccatcaatgcctaatttattgagagtttttagcatgaagggttgttgaattttgtcaaaggctttttctgcatctattgagataatcatgtggtttttgtctttggctctgtttatatgctggattacatttattgatttgcgtatattgaaccagccttgcatcccagggatgaagcccacttgatcatggtggataagctttttgatgtgctgctggattcggtttgccagtattttattgaggatttttgcatcaatgttcatcaaggatattggtctaaaattctcttttttggttgtgtctctgcccggctttggtatcagaatgatgctggcctcataaaatgagttagggaggattccctctttttctattgattggaatagtttcagaaggaatggtaccagttcctccttgtacctctggtagaattcggctgtgaatccatctggtcccggactctttttggttggtaaactattgattattgccacaatttcagctcctgttattggtctattcagagattcaacttcttcctggtttagtcttgggagagtgtatgtgtcgaggaatgtatccatttcttctagattttctagtttatttgcgtagaggtgtttgtagtattctctgatggtagtttgtatttctgtgggatcggtggtgatatcccctttatcattttttattgtgtctatttgattcttctctctttttttctttattagtcttgctagcggtctatcaattttgttgatcctttcaaaaaaccagctcctggattcattgattttttgaagggtttttgtgtctctatttccttcagttctgctctgattttagttatttcttgccttctgctagcttttgaatgtgtttgctcttgcttttctagttcttttaattgtgatgttagggtgtcaattttggatctttcctgctttctcttgtaggcatttagtgctataaatttccctctacacactgctttgaatgcgtcccagagattctggtatgtggtgtctttgttctcgttggtttcaaagaacatctttatttctgccttcatttcgttatgtacccagtagtcattcaggagcaggttgttcagtttccatgtagttgagcggctttgagtgagattcttaatcctgagttctagtttgattgcactgtggtctgagagatagtttgttataatttctgttcttttacatttgctgaggagagctttacttccaactatgtggtcaattttggaataggtgtggtgtggtgctgaaaaaaatgtatattctgttgatttggggtggagagttctgtagatgtctattaggtctgcttggtgcagagctgagttcaattcctgggtatccttgttgactttctgtctcgttgatctgtctaatgttgacagtggggtgttaaagtctcccattattaatgtgtgggagtctaagtctctttgtaggtcactcaggacttgctttatgaatctgggtgttcctgtattgggtgcataaatatttaggatagttagctcctcttgttgaattgatccctttaccattatgtaatggccttctttgtctcttttgatctttgttggtttaaagtctgttttatcagagactaggattgcaacccctgcctttttttgttttccattggcttggtagatcttcctccatccttttattttgagcctatgtgtgtctctgcacgtgagatgggtttcctgaatacagcacactgatgggtcttgactctttatctaacttgccagtctgtgtcttttaattgcagaatttagtccatttatatttaaagttaatattgttatgtgtgaatttgatcctgtcattatgatgttagctggtgattttgctcattagttgatgcagtttcttcctagtctcgatggtctttacattttggcatgattttgcagcggctggtaccggttgttcctttccatgtttagcacttccttcaggagctcttttagggcaggcctggtggtgacaaaatctctcagcatttgcttgtctataaagtattttatttctccttcacttatgaagcttagtttggctggatatgaaattctgggttgaaaattcttttctttaagaatgttgaatattggcccccactctcttctggcttgtagggtttctgccgagagatccgctgttagtctgatgggctttcctttgagggtaacccgacctttctctctggctgcccttaacattttttccttcatttcaactttggtgaatctgacaattatgtgtcttggagttgctcttctcgaggagtatctttgtggcgttctctgtatttcctgaatctgaacgttggcctgccttgctagattggggaagttctcctggataatatcctgcagagtgttttccaacttggttccattctccacatcactttcaggtacaccaatcagacgtagatttggtcttttcacatagtcccatatttcttggaggctttgctcatttctttttattcttttttctctaaacttcccttctcgcttcatttcattcatttcatcttccattgctgataccctttcttccagttgatcgcatcggctcctgaggcttctgcattcttcacgtagttctcgagccttggttttcagctccatcagctcctttaagcacttctctgtattggttattctagttatacattcttctaaatttttttcaaagttttcaacttctttgcctttggtttgaatgtcctcccgtagctcagagtaatttgatcgtctgaagccttcttctctcagctcgtcaaaatcattctccatccagctttgttctgttgctggtgaggaactgcgttcctttggaggaggagaggcgctctgcgttttagagtttccagtttttctgttctgttttttccccatctttgtggttttatctacttttggtctttgatgatggtgatgtacagatgggttttcggtgtagatgtcctttctggttgttagttttccttctaacagacaggaccctcagctgcaggtctgttggaataccctgctgtgtgaggtgtcagtgtgcccctgctggggggtgcctcccagttaggctgctcgggggtcaggggtcagggacccacttgaggagtcagtctgcccgttctcagatctccagctgcgtgctgggagaaccactgctctcttcaaagctgtcagacagggacacttaagtctgcagaggttactgctgtctttttgtttgtctgtgccctgcccccagaggtggagcctacagaggcaggcaggcctccttgagctgtggtgggctccacccagttcgagcttcccggctgctttgtttacctaagcaagcctgggcaatggcgggcgcccctcccccagcctcgttgccgccttgcagtttgatctcagactgctgtgctagcaatcagcgcgattccgtgggcgtaggaccctctgagccaggtgtgggatatagtctcgtggtgcgccgtttcttaagccggtctgaaaagcgcaatattcgggtgggagtgacccgattttccaggtgcgtccgtcacccctttctttgactcggaaagggaactccctgaccccttgcgcttcccaggtgaggcaatgcctcgccctgcttcggctcgcgcacggtgcgcacacacactggcctgcgcacactgtctggcactccctagtgagatgaacccggtacctcagatggaaatgcagaaatcacccgtcttctgcgtcgctcacgctgggagctgtagaccggagctgttcctattcggccatcttggctcctcccctgt

SEQ ID NO: 10523 - DNA, 5479 bp, Homo sapiens
tttttttttaaatcaattgacaatgatttttattaatttctttctttattattattattatactttaagttttaggtacatgtgcacaacgtgcaggtttgttacatatgtacacatgtaccatgttggtgtgctgcacccattaactcgtcatttagcattaggtatatctcctaatgctatccctcccccctccccccaccccacaacagtccccggtgtgtgatgttccccttcctatgtccgtgtgttctctttgctcaattcccacctatgagtgagaacatgtggtgtttggttttttgtcctagcgatagtttgctgagaatgatggtttccagcttcatccatgtccctacaaaggacatgaactcatcattttttatggctgcatagtattccatggtgtatatgtgccacattttcttaatccagtctatcattgttggacatttggcttggttccaagtctttgctattgtgaatagtgtcgcaataaacatatgtgtgcatgtgtctttatagcagcatgatttataatcctttgggtatatacccagtaatgggatggctgggtcaaatggtatttctagttctagatccctgaggaatcgccacactgacttccacaatggttgaactagtttatagtcccaccaacagtgtaaaagtgttcctatttctccacatcctctccagcacctgttgtttcctgactttttaatgatcgccattctaactggtgtgagatggtatctcattgtggttttgatttgcatttctctgatggccagtgatgatgagcatttttttgtgtgttttttggctgcataaatgtcttcttttgggaagtgtctgttcatatccttcacccactttttgatggggttgtttgtttttttcttgtaaatttgtttgagttcattgtagattctggatattagccctttgtcagatgagtaggttgtgaaaattttctcccattctgtaggttgcctgttcactctgatggtggtttcttttgctgtgcagaagctctttagtttaattagatcccatttgtcaattttggcttttgttgccattgcttttggtgttttagacatgaagtccttgcccatgcctatgtcctgaatggtattgcctaggttttcttctagagtttttatggttttaggtctaacatgtaagtctttaatcaatcttgaattaatttttgtataaggtgtaaggaagggatccagtttcagctttctacatatggctagtgagttttcccagcaccgtttattaaatagggaatcttttccccattgcttgtttttgtcaggtttgtcaaagatcagatagttgtagatatgcagtattatttctgagggttctgttctgttccattggtctatatctctgttttggtaccagtaccatgctgtttttgttactgtagccttgtagtatagtttgaagtcaggtagcgtgatgcctccagctttgttcttttggcttaggattgacttggcaatgcgggctcttttttggttccatatgaactttaaagtagttttttccaattctgtgaagaaagtcattggtagcttgatggggatggcattgaatctataaattaccttgggcagtatggccattttcacgatattgattcttcctacccatgagcatggaatgctcttccacttgtttgtatcctcttttatttcattgagcagtggtttgtagttctccttgaagaggaccttcacatcccttgtaagttggattcctaggtattttattctctttgaagcaattgtgaatgggagttcactcatgatttggctccctgtttgtctgttattggtgtataagaatgcttgtgatttttgtacattgattttgtatcctgagactttgctgaagttgcttatcagcttaaggagattttgggctgagacgatggggttttctagatatacaatcatgtcatctgcaaagagggactatttgacttcctcttttcctaattgaatgccctttatttccttctcctgcctgattgctctggccagaacttccaacactatgttgaataggagtggtgagagagggcatccctgtcttgtgccagttttcaaagggaatgcttccagtttttgtccattcagtatgatattggctgtgggtttgtcatagatagctcttattattttgagatacgtcccatcagtacctaatttattgagagtttttagcatgaaggttgttgaattttgtcaaaggccttttctgcatctattgagataatcatgtggtttttgtctttagttctgtttatatgctggattacttttattgatttgtggatgttgaaccagccttgcatcccagggatgaagcccacttgatcatggtggataagctttttgatgtgttactggattcggtttggcagtattttattgaggatttttgcacgccattgcatcaattggtctaaaattctctttttttgttgtgtttccgccaggctttgttatcaggatgatgctggcctcataaaatgagttagggaggagtccctctttttctattgattggaataatttcagaaggaatggtaccaattcctccttgtacctctggtagaattcggctgtgaatccatctggtcctggactttctttggttggtaagctattaattattgcctcaatttcagagcctgttgttggtctgttcagagatttaacttcttcctggtttagtcttgggagagtgcatgtgtcgaggaatttatccatttcttctagattttctagtttatttgcgtagaggtgtttatagtattctctgatggtagtttgtatttctgtgggatcggtggtgatatcccctttgtcattttttattgcgtctatttgatccttctctcttttcttctttattagtcttgctagcggtctatcaattttgttgatcttttcaaaaaaccagctcctagattcattaattttttgaagggttttttgtgtctctatttccttcagttctgctctgatcttagttatttcttgccttctgctagcttttgaatgtgtttgctcttgcttctctagttcttttaattgtgttgttagggtgtcaattttagatctttcctgctttctcttgtgggcatttagtgctataaatttccctctacacactgctttgaatgtgtcccagagattctggtatgttgtgtctttgttttcattggtttcaaagaacatctttatttctgccttcatttcgttatgtacccagtagtcattcaggagcaggttgttcagtttccatgtagttgagtggttttgagtgagtttcttaatcctgagttctagtttgattgcactgtggtctgagagacagtttgttataatttctgttcttttacatttgctgaggagtgctttacttccaactgtgtggtcaattttggaataggtgtggtgtggtgctgaaaagaatgcatattctgttgatttggggtggagagttctgtagatgtctattaggtccacttggtgcagagttgagttcaattcctggatatccttgttaactttttgtcttgttaatctgtctaatgttgacagtttggtgttaaagtctcccattattattttgtgggagtctaactctctttgtaggtcactcaggacttgctttatgaaactgggtgctcctgtattgggtgcatatatatttaagatagttagctcttcttgttgaattgatccctttaccattatgtaatggccttctttgtctcttttggtctttgctggtttaaactctgttttatcagagactaggattgcaacccctgcctttttttgttttccatttgcttggtagatcttccttcatccctttattttgagcctatgtgtgtctctgcacgtgagatgggtttcctgaatacagcacactggtgggtcttgactctttatctaatttgccagtctgtgccttttaattggagcatttagcccatttacatttaaggttagtattgttatgtgtgaatttgatcctatcattatgatgttagctggttattttgctcgttagttgatgcagtttcttcctagccttgatggtctttacaatttggcatgtttttccagtggctggtatgggttgttcctttccatgtttagtgcttccttcaggagctcttttagggcaggcctggtggtgacaaaatctctcagcatttgcttgtctgtaaagtattttatttctccttcatttatgaagcttagtttggccagatatgaaattctgggttgaaaattcttttctttaagaatgttgaatattggcccccactctcttctggcttgtagagtttctgtggagagatcagctgttagtctgttgggcttccctttgcaggtaacccgacctttctctctggctgcccttaacattttttccttcctttcaactttggtgaatctgacaattatgtgtcttggagttgctcttctcgaggagtattgttgtggtgttctctgtatatcctgaatttgaatgttggcctgccttgctagattggggaagttctcctggattatatcctgcagagtgttttccaacttggttccattctccatgtcactttcaggtacaccaattagaggtagatttggtcttttcacatagtcccatatttcttggaggctttgttcatttctttttattcttttttctctaaacttctcttcacgcttcatttcattcatttcgtcttccatcactgataccatttcttccagttcattgcatcagttactgaggcttgtgcattcatcacgtagttctcttgccatggttttcagctccatcaggtcctttaaggacttctgtgcattggttattctagctatccattcgtctaattttttttcaaagtttttaacttctttgccattggttcgaacttcctcctttagctcggagtagtttgatcttctgaagccttcctctctcaactcgtcaaagtcattctccgtccagctttgttccattgctggtgaggagctgcgttcctttggtggaggagaggcgctctgatttttagagtttctggtttttctgctctgttttttccccagctttgtggttttatctacctttggtctttgatgatggtgatgtacagatgggtttttggtgtggatctcctttctgtttgttagttttccttctaacagacaggaccctcagctgcaggtctgttggagtttactggaggtccactccagaccctgtttgcctgggtatcagcagtggtggctgtagaagagtggatataggtgagctgcaaatgctgctgcctgatcgttcctctggaagttttgtctcagaggagtacctggccggccgtgtgaggtgtcagtccgcccctactggtgggtgcctcccagttagg

SEQ ID NO: 10524 - DNA, 4840 bp, Homo sapiens
cagtagtcttttttttatttttttttcgttactagaagttttagggtacatgtgcacaacgtgctggtttgttacatatgtatacatgtgccatgttggtgtgctgcacccattaactcttcatttaacattaggtatatctcctaatgctatccctccccccttccccaaccccaaaacaggtcccagtgtgtgatgttccccttcctgtgtccatgtgttctcactgttcaattcccacctatgagtgagaacatgcagtgtttggttttttctcattgcaatagtttgctgagaatgatggtttccagcttcatccatgtccctacaaaggacatgaactcatcattttttatggctgcatagtattccatggtgtatatgtgccacattttcttaatccagtctatcattcttggacatttgggttagttccaagtctttgctattgtgaatagtgctgcaataaacatacgtgggcatgtgtctttatagcagcatattttataatcctttgagtatatacccagtaatgggattgctgggacaaatggtatttctagttctagattcctgaggaatcgccacactgacttccacaatggttgaactagtttccagtcccaccaacagtgtaaaagtcttcctatttctccacattctctccagcacctgttgtttcctgactttttaatgatcgccattctaactggtgtgagatgatatctcattgtggttatgatttgcatttctctgatagccagtgatgatgagcattttttcatgtgtcttttggctgcataagtgtcttcttatgagaagtgtctgttcatatccttcacccacttgttgatggggttgtttgttttttcttgtaatttgtttgagttcatgtcgattctggatattagccctttgtcagatgagtagactgcaaaacttttctcccattctgtaggtgcctgttcactctgatggtagtttcttttgctgtgcagaagctcttgagttttattagatcccatttgtcaattttggcttttcttgccattgcttttggtgttttagtcatgaagtccttgcccatacctatctcctgaatggtatggcctaggttttcttctagggtttttatggttttacgactaacatttaagtctttcatccatcttgaattaatttttgtataaggtgtaaggaagggatccagtttcagcttcctacatatggctggccagttttcccagcaccatttattaaatagtgaatcctttccccatttcttgtttttgtcaggtttgtcaaagatcagatagttgtagatatgtggcattatttctgagggctctgttctgttccatttgtctatatctctgttttggtaccagtaccatgctgttttggttactgtacgcttgtagtatagtttgacctcaggtagcatgatgcctccagctttgttcttttggcttaggattgacttgggaatgcaggctcttttttcattgcatatgaactttaaagtagatttttccaattctgcgaagaaagtaattggtagcttgatggggatggcattgaatctataaattaccttgggcagtatggccattttcacgatattgattcttcctacccatgagcatggaatgttcttccatttgtttgtatcctcttttatttcattgagcagtggtttgtagttctccttgaagagttccttcacatcccttgtaagttggattcctaggtattttattccctttgaagcaactgtgaatgggagttcactcatgaactggctctctgtttctctgttattggtgtacaagaatgcttgtgatttttgcacattgattttgtatcctgagagtttgctgaagtttcctatcagcttaaggagattttgggctgagtcaatggggttttctagatatacaatcatgtcatctgcaaacagggacaatttgacttcctcttttcctaattgaataccctttatttccttctcctgcctgattgccctggccagaacttccaacactatgttgaataggagtggtgagagagggcatccctgtcttgtgccagttttcaaagcgaatgcttccagtttttgcccattcagtgtgatattggctgtgggtttgtcatagatagctcttattattttgagatatgtccaatcaatacctaatttattgagagtttttagcatgaagtgttgttgaattttgtcaaaggccttttctgcatctattgagataatctaatcatgtgttttttgtcattggttctgtttatatgctggattgcatttattgatttgcgtatgttgaaccagccttgcatcccagggttgaagcccacttgatcatggtggataagctttttgatgtgctgctggattcggtttgccagtattttattgaggatttttgcatcaatgttcatcaaggatattggtctaaaattctctttttttgtggtgtctcagccaggctttggtatcaggatgatgctggcctcataaaatgagttacggaggattccctctttttctattggttggaatagtttcagaaggactggtaccagctcctccttctacctctggtagaatttggctgtgaatccatctggtcctgaacttttttttgttgctaaactattaattattgcctcaatttcagagcctgttattggtctattgagatattcaacttcttcctggtttagtcttgggagggtgtatgtgtcgaggaatttatccatttcttctagattttctagtttatttgcatagaagtgtttatagtattctctgacgttagtttgaatttctgtgagatcggtggtgatatcccctttatcattttttatcacgtgtatttgattcttctctcttttcttctttattagtcttgcttgttgtctatcaattttgttgatctttccataaaaccagctcctggatttattgattttttgaagggttttttgtgtctctatttccttcagttctgctctgatcttagttatttcttgccttctgctagcttttgaatgtgtttgctcttgcttttctagttcttttatttgtgatattagggtgtcaattttggatctttcctgctttctcttttgtgcatttagtgctataaatttccctctacacactgctttgaatgtttcccagagattctggtatgttatgtctttgttctcattggtttcaaagaacatctttatttcttccttcatttcgttatgtacccagtagtcattcaggagcaggttgttcagtttccatgtagttgagcggttttgagtgagcttcttaatcctgagttctagtttggttgcactgttgtctgagagacagtttgttatgatttctgttcttttacatttgctgaggagtgctttacttccaactatgtggtgaattttggaataggtgtggtgcagtgctgaaaagaatgtatattctgttgatttgggatggagagttctgtagatgtctgttaggtctgcttggtgcagagctgagttcagttcctggatatccttgttaacattctgtctcattgatctttctaatgttgatagtggggtgttaaagtctcccattattaatgtgtgggagtctaagtctctttttaggtctcaaaggacttgctttatgaatctgggtgctcctgtattgggtgcatgtatgtttagggtagttagctcttcttgttgaactgatccctttaccattatgtaatggccttctttgtctcttttgatctttgttggtttaaagtctgttttatccaagactaggattgcaactcctgactttttttgttttctatttgcttggtagatcttcctccatccctttattttgaggctatttgtgtctctgcatgtgagatgggtctcctgaaaacagcactgtgatgggtcttgactctatccaatttgtcagtctgtcttttaattggagcatttcacccatttacatttaagattgagattgttatgtgtgaatttgatcctatcattatgatcttagctgattattttgctcgttagttgatgcagtttcttcctagccttgatggtctttacaatttggcatgtttttgcagtggctggtaccggttgttcttttccatgtttactgcttccttcaggagctcttttagggcaggagtaatggtgataaaatctctcagcctttgcttgtctgtaaaggattttatttctccttcacttatgaagcttagtttggttgggtatgaaattctgggttgaaaattctcttctttaagaatgttgaatattggcccccacccttatccagcttgcagcgtttctgccgagagatcgcctgttagtctggtgggcttccctttgtgggtaacctgacctttctctctgtctccccttaacattttttccttcatttcaactttggtgaatctgacaattatgtgtcttggagttgctcttctcgaggagtatctttgtggtgttctctgtatttcctgaatttgaatgttggcctgccttgctagattggagaagttctcttggataatatcttgcagagtgttttccaatttggttccattctcccggtcactttcaggtacaccagtcagacgtagatttggtcttttcccatagtgccatatttcttggaggcttgtccatttcttttacctctttttctctaaactctcttctcgcttcattcattcatttgatcttcccatcactgatacactttcttccagttgatcgaatcagctactgaagcttgtgcattcgtcatgtagttctc

SEQ ID NO: 10525 - DNA, 27862 bp, Homo sapiens
tttctttctttttttttaatttattattattatactttaagttttagggtacatgtgcacaatgtgcaggttagttacatatgtatacatgtactgtgctggtgcgctgcacccactaactcgccatctagcattaagtatatctcccaatgctatccctcccctctccccccaccccacaacagtccccagagtgtgatgttccccttcctgtgttcatgtgttctcattgttcaattcccacctgtgagtgagaatatgtggtgtttggttttttgttcttgcaatagtttactgagaatgatgatttccaatttcatccatgtccctacaaaggacgtgaactcatcattttttatggctgcatagtattccatggtgtatatgtgccacattttcttaatccagtctatcattgttggacatttgggttgattccaagtctttgctatagtgaataatgccacaataaacatatgtgtgcatgtgtctttatagcagcatgatttatagtcctttgggtatatacccagtaatgggatggctgggtcaaatggtatttctagttctagatccctgaggaatcgccacactgacttccacaatggttgaactagtttacagtcccaccaacagtgtaaaagtgttcctatttctccacatcctctccagcacctgttatttcctgactttttaatgattgccattataactggtgtgagatggtatctcattgtggttttgatttgcatttctgtgatggccagtgatgatgagcattttttcatgtgttttttggctgcataaatgtcttcttttgagaagtgtctgttcatgtcctttgcccactttttgatggggttgtttgtttttttcttgtaaatttgtttgagttcattgtagattccggatattagccctttgtcagatgagtaggttgcgaaaattttctcccagtttgtagattgcctgttcactctgatggtagtttcttttgctgtgcagaagctctttagtttaattagatcccatttgtcaattttggctttggttgccattgcttttggtgttttagacatgaagtccttgcccatgcctatgtcctgaatggtaatgcctaggttttcttctagggtttttatggttttaggtctaacgtttaagtctttaatccatcttgaattgatttttgtataaggtgtaaggaagggatccagtttcagctttctacatatggctagacagttttcccagcaccatttattaaatagggaatcctttccccattgcttgcttttctcaggtttgtcaaagatcagatagttgtagatatgcagcgttatttctgagggctctgttctgttccattgatctatatctctgttttggtaccagtaccatgctgttttggttactgtagccttgtagtatagtttgaagtcaggtagtgtgatgcctccagctttgttcttttggcttaggattgacttggcgatgcgggctcttttttggttccatatgaactttaaagtagttttttccaattctgtgaagaaagtcattggtagcttgatggggatagcattgaatctataaattaccttgggcagtatggccattttcacgatattgattctttctacccatgagcatggaatgttcttccatttgtttgtatcctcttttatttccttgagcagtggtttgtagttctccttgaagaggtccttcacatcccttgtaagttggattcctaggtattttattctctttgaagcaattgtgaatgggagttcactcatgatttggctctctgtttgtctgttgttggtgtataagaatgcttgtgatttttgtacattgattttgtatcctgagactttgctgaagttgcttatcagctgaaggagattttgggctgagacaatggggttttctagatatacaatcatgtcatctgcaaacagggacaatttgacttcctcttttcctaattgaataccctttatttccttctcctgcctaattgccctggccagaacttccaacactatgttgaataggaatggtgagagagggcatacctgtcttgtgccaattttcaaagggaatgcttccagttttttcccattcagtatgatattggctgtgggtttgtcatagatagctcttattattttgaaatacgtcccatcaatacctaatttattgagagtttttagcatgaagcgttgttgaattttgtcaaaggacttttctgcatctattgagattatcatgtggtttttgtctttggttctgtttatatgctggattacatttattgatttgcgtatattgaaccagccttgcatcccagggatgaagcccacttgatcatggtggttaagctttttgatgtgctgctggatttggtttgccagtattttattgaggatttttgcatcaatgttcatcaatgatattggtctaaaattctcttttttggttgtgtctctgcccggctttggtatcaggatgatgctggcctcataaaatgagttagggaggattccctctttttctattgattggaatagtttcagaaggaatggtaccagttcctccttgtacctctggtagaattcagctgtgaatccatctggtcctggactctttttggttggtaagctattgattattgccacaatttcagatcctgttcttggtctattcagagattcaacttcttcctggtttagtcttgggagagtgtatgtgtcgaggaatttatccatttcttctagattttctactttatttgcgtagaggtgtttgtagtattctctgatggtagtttgtatttctgtgggatcggtggtcatatcccctttatcattttttattgcgtctattggattcttctctctttttttctttattagtcttgctagcggtctatcaattttgttgatcctttcaaaaaaccagctcctggattcattaattttttggagggtttttgtgtctctatttccttcagttcttctctgattttagttatttcttgccttctgctagcttttgaatgtgtttgctcttgcttttctagttcttttaattgtgatgttagggtgtcaattctggatctttcctgctttctcttgtgggcatttagtgctataaatttccgtctacacactgctttgaatgcgtcatagagattctggtatgctgtgtctttgttctcattggtttcaaagaacatctttatttctgccttcatttcattatgtacccagtactcattcaggagcaggttgttcagtttccatgtagttgagtggttttgagtgagattcttaatcctgagttctagtttgattgcactgtggtctgagagatagtttgttataatttctgttcttttacatttgctgaggagagctttacttccaactgtgtggtcaattttggaataggtgtggtgtggtgctgaaaaaaatgtatattctgttgatttggggtggagagttctgtagatgtctagtaggaccgcttggtgcagagctgagttcaattcctgcgtatccttgttgactttctgtctcgttgatctgtctaatgttgatagtgtggtgttaaagtctcccattattattgtgtgggagtctaagtccctttttaggtcattcaggacttgctttatgaatctgggtgctcctgtattgggtgtatatatatttaggatagttagctcttcttgttgaattgatccctttaccattatgtaatggccttctttgtctcttttgatcttggttggtttcaagtctgttttatcagagactaggattgcaacccctgcctttttttgttttccatttgcttggtagatcttcctccatccttttattttgagcctatgtgtgtctctgcacgtgagatgggtttcctgaatacagcacactgatgggtcttgactctttatccaatttgccagtttgtgtcttgtaattggagcatttagcccatttacatttaaagttaatatagttatttgtgaatttgatcctgtcatgatgatgttagctggttattttgctcgttagttcatgcagtttcttcctagtctcgaaggcctttacattttggcatgattttgcagcggctggtatcggttgttcctttccatgtttagtgcttccttcaggagctcttttagggcagacctggtggtgacaaaatctctcagcatttgcttgtctgtaaagtattttatttctccttcacttatgaagcttagtttggctggatatgaaattctgggtggaaaattcttttctttaagaatgttgaatattggcccccactctcttctggcttgtagagtttctgcccatagatccgctgttagtctgatgggcttccctttgtgggtaacccgacctttctctctggctgcccttaacattttttccttcatttcaactttggtgaatctgacaattatgtgtcttggagctgctcttctcgaggagtatctttgtggtgttctctgcatttcctgaatctgaatgttggcctgccttgctagattggggaagttctcctggataatatcctgcagagtgttttccaactggttccattctccccgtcactttcaggtacaccaatcagacatagatttggtcttttcacatagtcccatatttcttggaggctttgctcgtttctttttattcttttttctcaaaacttcccttctcgcttcatttcattcacttcatcttccatcactgatatcctttcttccagttgatcgcatcggctcctgaggcttctgcattcttcatgtagttctcgagccttggttttcagctccatcagctcctttaagcacttctctgtattggttattctagttatacattcttctaaatttttttcaaagttttgaacttctttgcctttggttcgaatgtcctcccgtagctcggagtaatttgatcatctgaagccttcttctctcagctcgtcaaagtcattcttcatccacctttgttccgttgctggtgaggaactgcattcctttggaggaggagaggcgctctgctttttagagtttccagtttttctgctctgtttttttcccatctttgtggttttatctacttttggtctttgatgatggtgatgtacagatgggtttttggtgtggatgtcctttctgtttgttagttttcctcctaacagacaggaccctcagctgcaggtctgttggagtacccggccatgtgaggggtcagtgtgcccctgctggggggtgcctcccagttaggctgctcgggggtcagggacccacctgaggacgcagtctgcccattctcagatctccatctgcatgctgggagaaccactgctctcttcaaagctgtcagacagggacatttaagtctgcagaggttactgctgtttttttgtttgtctgtgtccagaggtggagcctacagaggcaggcaggcctccttgagctgcggtgggctccacccagttccagcttcctggctactttgtttacctaagtaaacctgggcaatggcggcgcccctcctccagcctggctgccaccttgcagtttgatctcagactgctgtgctagcaatcagcgagactctgtgggcataggaccctccgagccaggtgtgggatataatctcctggtgcgccatttttgaagtccgtcagaaaagcgcagtattcgggttggagtgacccgattttccaggtgccgtctgtcacctctttctttgacaaggaaagggaattccctgaccccttgcacttcccaagtgaggcaatgcctcgccctgcctcagcttacacagggtgcgcgcacccactgacctacgcccactgtctggcactccctagtgagatgaatccggtacctcagatggaaatgcagaaatcacccatcttctgctgggagctgtagaccggagctgttcctatttggccatcttggctccacccttcttttgctttttcacataaatgttaggatctgcctttcagtttttacaaaagcctgcttggatattgaaattgcattgaatctgtagatcaatttagggacaatttacatcttgacaactttgagctttgtaatccatgaacatcaaagatttttaatttttcttatcaatattttgtagttttaacatacaaatcttgtgcagattttgttaaatttatatctaagtagttggtgtttttgatgtaattttaaattatactttaaaaaatttgtgattttttccttgcttttatacaaaaatataattgatatttgtatattgttcttatataccaagacctcatatcccaaactcagttattaaatatagttgtctttttcgtatatttttggatttttaaaatgtagacaatcatgtcatttgtgaatataagtagttttttttttatttttaactgtattctttaattttttttcttcttttgttgtaccggttaggaccttgcatacaattttgaacagaagtggtgaatagctttttaactttttaaaatgtttcatttactattatgtgatatttggaaatgtggcggaggcactttttttattttttgacttttttattattatactttaagttcttggatatacgtgcagaacgtacaggtttgttacataggtatacacgtgccatggtggtttgctgcacccattaacctgtcatctactatttgtcctcatgctctccctcttctagccccccacccccctgacaggccccagtgtgtgatgttcccctctctgtgtccgtgtgttctcattgttcaacacccacatatgagtgagaacatgtggtgtttggttttcttttcctgtgttagtttgctgagaatgatggttaggggaggcactttaaaacataaaattccaatattctcattttttaatcatcagaaaaatcaatgaacattttggcaaaaaaggaaaagaatagtctgtgtgaaattttacaccagcatttgattatggaaatagaaatgggagaaccttggagatcaatttatccaattatcttattttacatatgaggaaactaaagttctctattccttaacatacgatttcttaagagaaaataacatctctatagccaccggttcaagttttaattttgggtgtccagagctcagcctctgcctcccttaacacagcatatcagaaaacaccatagctttgtgctttgaggagtgttcctttctgtttgagccttgtcctctgcaggaactgtttagaggtagataatgctgttatccacccccggagatgatgacttaattgttctggagtatagcttgggcactgggtttttaaaacactttccatgtgattttaatgtgctaacagacccattcctagggcagtatggcactcagaaccttaggtggaagcttgttataatcttagagtcagatgtgactcaggtgttttggattttaatagacaccaggtgcaggatccccttctaagggctgcgtaagtatgcagcgtccgtcgctcttggcctactgcctatgaggacctgcagaggtcttacagggtaatttctgctgccggggaaacagcctttctgtgcatcgactttcagtgaccttccagtcgtgattccctcctggccttcacctgcagatgtccgcctgcctgttcttgccggctggctcggcagaaacactcatgccatctgtgctgggctgtctggaccaagaaggtttggacagagggcggacattcctgtggagtcaaaggccagcagtactgccctggctcagagcaaagaattttaaggtagctctacctccatgcagcagcttctcacattgtgtcttagaagaggtgcagaattatcaggtaagtcctctatccttagcaaatctgaccttcttctaacattttcttttttaaaaaaacaaaaagagtaaaaagtggcatatttgcataccacaggggacatacaagtcttatttaaggaacataattatgatattttaccctcatttcactaaccattttattcactgtaataagaactactccagaaccaaagacttaaaacatgaacaaattaaaaccatgtagggagcattcctgaagcattcctcctcattctgttttcaagatctataaacaccatatgttgagtggacagtattagagtgttctggcttaaactatggtctgtttttctttctttctttttctttttgtattcccttgagactgacctaattgattcaaaagacaaaagaccaaggacattaccagagaaacaggaatcaaatactaagaattcacatgcatatggaattacttattttatcaaaaaatgttcctgaacttcacacagcaaatggccaaagtgattcttttaccatctgattgttcagttaatataaagagtcctgtactgcattcttagcatgaataacacacagtgaattagacacatagaaagttgtcttaccttgaccaaatagcagttacacttgggtgaagaacaagttttgctgctgagaaacttaagaaaaattgacagacatccaatttcacatgatcattaattctttttctctggaaataaggccaagttttatggacgatgaacaccaatgagagtaaaagttctttaggaaatcgctttctagctaaacctagtttcttattactttccacccacctgtctctctacttattcaacccacttcaattcctcctttcaaatagacaggcagacgtttcaggcaactagacctgctttttcagtagccttttccactagggtggtgagtgggcaaggctaacatttgtacaagatgctcatgttgatataactgaatctgtgagttcaaggactcaatatgccacaattcaaaaaactgtatcagcaaccatatgtattttttaatgaaataaatattactgacagcacatgctttattaaattgataatgcaatgcagcattgtcttttctcaggattggtacatctggctgtacatcaaaccccatctacttacatacaatagcgttgttagttgtaacattcagtaagattcatcatccagtaaaatcacctttgtcaagtgctgagccacagacaactgcaccctggcattggaagccatactttttgatcccatgaataaagatgaaatctaagacctctaaaatgcagtcaagataaagtagaatcctttgtaacaccactcagggaaacgcatgtgcttgcaaatgtctggtttcccagctttcatggcagtgcacactgcattctggggatattgctagacaggtgggtcaggatgcaagcctaatgtgcacccctcccctttccaccaccaccaaagcaagtatacctcctttcttctgagagcagagaaaatgggtttagacaagagggatactgacaggaagagaaaaaaagggagaatctttctcattctatttgttatgggagaaagctaagcaaacaattgaaagcaaaccctatttccacagccctggatgctttccaagtaacattttaaggaaatctaataacaactaatatttttgagcatttgtcatgcattaggcacttttctcaatcacatgaattaactaatgttatccacacaacaatgctactattatttaccatctccatatttctaaagagaaaactgaggctaaaagaagttaagaaaatttcacagatagtgtgagggtcaagtttaaaacttagccattcttgggccagagtctgcattattaaccattgctttctacagacgtctctgacaagaacttgatattcattatcttattaaacctcaataattctgtgaggtgactactgtttttctactttacagaagaggctatggagacatacagaggttaaataatttgcacaagtgaacaccatttgtatactcctggagctagggttcaaacccacacgagttaacaaatgacagctagcctaaccttcttgcaatattcacaagacatctaatcaaagggcccagcaaacactacatctgtgtggtcttttgctacatcccttctgtgcctttggcatcgccatctccacctctgtcctaggaggagctcatgtgggcaccagatcacatgttgatggtatgactgtcatttttaccattctagactacaggttgcagctggctgcatttcaaatcatgtcatcattatactttaggactgataataatactgcgggcaatatttctacttaagcttgacattgtgacaaaagagatctatgcaaaccaatgcattttcaaatatcaaagtatgcttcaaaataccatgaaatacttagacttccaacatgagtaggtgcatttagaaggcaagctgtcttgtattcaatatacattttatctgagggagcaaaagttagaatatattttccttggagtctataaaaatcacatagcttgcaacagaacatcataaatttactcaggccttttcagatattgaactaaatatatcaaatataaaatacatatgcatatctttagcctgcacatgtttatggtaactggtctccgaggaatttctcttctcattatataatggtgtaaatgctttgagaggcagtgagagaagatacattccttcaatatctccaaatgataaaagatagacatcttttgtttgatgagaactatagtcaaaataaccatttaaagagtacataaaaagaaagcacaaagtacaattgaataaaaccagacctgagtttctgtggcagagagagtccagacatagcacagatggatccagaaaaaggctagcaccattagattttgaaattagggacgcaatctttgataagaggtgagggaaaaatgcttcttggctgttttccactttggaagtggaatgagaatgagaggagtttccttttgataatagcctcttggatggatttaatcactttaattttggattccctctattttctcttgccagctactaatacttataacaattctcagattctgaatgtctatgtaaatgcaactacaagccctgtgtatggggtgtgaagattttactacattataagatattttaactgttattaactcttaaaaacccaagttgaagctttaatgtttatgtagattttcaaacaggaatttttgttcagaaaattttcaggtttgtgaaagggtcagtgttagagaaaggaaatccctactttcatggtttctagtgatattctggcagaggatagatagattccagatgtttcttttggtcaaaggatgagaacaaaaactattgctctgaaaaatcagagccacctggcccgagacacatcatggaatagcggagagaatattaagtggagaatgagaaattactgattttcaccaatagagaaatgtagtagagactgctacagacttaagttgcttaactattctgaatctcagctgttaagattaaaaactaggcagtctctacaggcctcttccagctggaaaagtctaaggtataaatttattgttaatagtagctgttattattcttcttaccatttatttatatcccactttggaacataaagtgtttgaggttggccaggtgcagtggcctatgtctgtaatcccagcactttgggaggccaaggtgggtggatcacctgaggtcaggatttagagaccagcctggccaacatggcaaaaccccgtctctgctaaaagtacaaaaattaaccggatatggtggcacacgcctgtagtcccagcaactcgggaggtgaggcaggagaattgcttgaacccgggaggtggaggttgcggtgagccgagatcgtgccactgcactgcagcctgggcaacagagcaaactcttgttttattattaaaactcagttttaaataataataataataataaagtgttcgagttcatgccttagagaaacattattcacaactggatacaataagtagataaatgggtcaaaggaagactgaagtagttaactaaaataaagattagtgccacttccctgatatcagtattaagatggtgtgaagtactgtctacaggtagcacaaggttttactcagaggaagatctaggtcctcttgaacttttatatacatgggttctgagatcccaaagttcaattctatagggcacaaccacaccaatttattttggaggattttcaaacgaagtattgatgattgcctgtggtagtataaaatagtttccataaggatatatgcaggtcagctaatttaaaccaatttagctcttttacaaaaatcaaacgtagattagtgagaaaaatataaccctagatagtaaaacaatttgatttcatgtggagaattgacagacacttgccgattaaacattggaggacacttgtcaaaagtgattattttggctttaaaattttgattttcaactcactctttttaatgaaaatcacatggaaacttgttactttcttttggctttatttattcttagctacttgggagggtcattgcctttcagccagcatgtaaccccaggagcaatggaggagacactgtctagttcatcagttcaaacctgataagcagtgagttcacaggtaatgcaaccaaatcacttgattatccacctgaaaacaatgaaatagagaagcacatttagctgtctgtatttggtagcagaagagccattgttcccgcatttatcattaagatccaaggcaaagagaaagtggctaaaaacccaccaccattttacgtacttaaaatttgatatctagtatatacatgaataacaatgaatctggagtgaattcatacataattagtttctgtccataaattcgaaggttgaatagctatcaatgagagttgcaaatcttctgctgcatctccgcgtttctcaaaggatgatacattgtgtaacaatcatcagccatggaagagcccaccttcttcctgtgtaggatgttggcctatttacaatttgttgccccaaaaaagaaagtgacatgaaatttggaaaatatctttaacaagccagtagattcataacttgctgagatcccaggattttcttcaaagaaaagtgattgtctctactttgggtacctccagagtaggggtgggggccacatccatagagttaacaatggaaatgaagagtcaatgatcaagacccaccagaagtaatcaacctaatgaaattctagtatcagaaaaacaaagattcttcaaaactctgtcatttctttctggagaaaaacagtctttctagatgccaatcaggattgggacttttattattgtattcactgttcaccaaattataccaaggaaaaccatataatagaatatgacctcattccatttctacttgtccaaatcatatctcactatcaaaattcctacattcaaatttcatgagggtgtaaagagcttatagtgaaatttaaatgaaataaacacttaggtgactatttccaaattctgtctcctatgttactccatcaacccagttaggagtactcttagcttcttggtgatcttcctcaaaaaaggaataagagggcaagtcccacaatggaaaaatctcatagcatatgtgccagtctgccaataatatattgatagggaaattttatctactaagataacaaagatacagtttcaaaaacttcccagttatgaaaagtcactaatggagctttaaaaattctcatttcatttcaatttttaaaacactttaaatcttaccaatccagtcttatgtctggtacatgagggactgtaccatataaaaagtatggtgtaatctctcactaggattagtgaaggggcctcctctactgtgttatatgtggtctcaataggcagctacatgtgttggtaagcaaagagggtaatcataataattgttggttctgcaggaagtgactcaatgaaaattacccccaaatttgttttaggtactacaacttaggacctttatataggatgtttcatatgtattatcacatttaattctcatggcatatacttgcataggatcattttacagacgaggaaactgagggaagtatgttttgtaaatttagtacacattctccatgtctggtgtagcctctttgaaataaaaaagcatttcttaataattatttcattaaaatttaatgttaaagcttttactgtcttagtagtttatagtttgtaaaagttaaatcacctgtgttttctcttttgaataggaaatggtattggttttttgttggtgaaatggttacctacttcaaagatatgactgtgataattttacaaaacatttctaagtacaatgtagctgagagctgttttcatatttcctatggtacagcatgttctctgatttcataatttatcttcattttcataagcaatattttccttgaacttgttttcaaaggaaattgcaattaatatatgagttttcaatgagttgatattcatccaaatctgatggctcaaagaaaattgcattgtattaaaaatgttggggtatctcaactgtttgccttttagcaactgtttggcaaaactctcacattccaaatctccacagagcagtctcaggagacgaacatgtcttgcacatgatttgtctttagggatataagaatccaacttttaacagactaaaacccaactgaggaatgatgtctttaaagtatgtgtcagacaacccttcaaaaaaagaaaaatgaaatggataaaaatctctaatacatttgggaaaatatatactctactatactttccatatggtaagtgaaggaataaattacattattgattaacatattttctagatgaattttatcttctcagtccttctagagaaggttattactaaatagttctatatcaaataactggaagtaatgaaaattgcacatgtcaatgatcacagatgcctttaggatatccttgtggaaaacaaagataaccacatggatttcatgtacttttctttaaaaagcacttagccttttgtcaactttgagagattgaatcaaaagaggtatatttggtaatgttataaactttctctgctagaaaagctgccatcaattctacaactctgaaaatcttaaaccacaaagtacaaatctttaaacaaagcctctttcctccaagacttctcagttcttcactcccaagtacacgtttttctctcagagattgtcagttccccaagccttctcacttctcccagtttattgccagcttaactctccagcacaaggtcttctatcttttcccctcaactgccctgtaaaccctcaataatggctcagtttacttactcatctgtctccattatttatgtttttatttgctatcattatttttaaagagatagggtctcactatatggcccaggctggtcttgaacttctggacttaagtgatcctcctgccttggcctgccaaattgctcagattacaggtgtgagccaccgtacctggccctcatttcttttgaaattttagagctgccagctctactggggaagtcattaggttcattcttctttggaacccaaaagctggcaatatacaaaattagaggttttcatctttctccttccactcatatgttctcctgtgccccgtcccatgtcaatgaagggtacactgcccaaccagtatatgagtaccttgtacagcacatctaaccattctcagacttgttgactttctctctctaatatgtccagaatctacttcccgtctcaacattcttactgccattgctttaggacattccatcattattatttcatgtttggattgctgcacacatgtcctaccttgataccctccctctatttttaccctttctagtctattcttcttattgagatagagtcatttaaaaaaaattctaatgtattatgttgcttgtctctttaatccctccatcgactttctgccacaaacagtctaagaacatgtgtgtcccttaatatgactatcaaggtcttttgtgacctgttacccacttgccttttttgacctatattctacggaattattgcagttttctaatggtaaattttttttttgttttttcatagttttccccctgtgtttgaagtgccattatcaatgttcttcatccataaaatctatggtagttcctctaagacagctagatgcttccccatcctgaatcctgacttatcttcttaccttactctggggttcatatttctcctgggtgcttccttagtaccacagcataatatcaccatgtatcaatgttatttgtccaccttatctgccagattacatgctttttaaaagaaagggcaatgttcagtccttatatccccagaatctacccaagagtatgccacttctcagaaatgtttgctgaacaaataaatgaagaatttattaaaagagtgaacatatgaatggatgaatgctctcaaaggactcatatgtttttctccaggggagaggcaagggctaaaaataagaatagaagatttagttgagtaataggctaactgctaggaatataaaggcatattactgtaacattcaagaatacagtaagccaggtgcggtggctcacacttgtaaccccagcactttgggagcccgggtggatcacgaggttaggagttcgagaccagcttggccaacacagtgaaaccccatccctactaaaaatacaaaaatcagctgggtgtgctggctggcgtctgtcattccagctactcggaggctgagacacgagaattgcttgaatctgggaggcagagattgcagtgagctgagatcatgccactgcactccagccttggtgacagagctagactctgtctcaaaataggtaaataaatgcataataaaataaatataaagaaaaagaatacagtagcccctccacacccttattcatgggggatatgtcccaggaccccccagcggaggcctgaaactgaagatagtactgaagcctgtataaattatgcatgattttttccttcagaatttcacaggcagaagattcatccttaccatagattttagcaacttaagcaggcaattttttttcttctcttgttgagaacttttcccttcttgcttaaagaaagcaatttatggcttcttttttggtatatccaaacagccagcatcactaatgttgtgctttggggacattgttaagtcaaataagcattacttgaacacaagcactgtgacaccaggacagttgagctaataactgaaagggttactaaatgactaagggcagggtggtagcatctataatgcaggttcactggacaaagggtagattaatatcctgggcgagatggagcaggacagtctcagatttcatcacactactcagaaatgcatgaaataaaaaacttataaattgtttatttcttgaatttttccatttaatgttttcagactgcagttagtgtcaggtagctgaaactgcaaaaagtaaaaccatggttaaaagagaactactgtatagtttgggagcaagattcccagggttcaaatcttagctctctctggccttattttccttatctgttaagtgagaccaagactagtacctacctctgggttcttctgaaaattcaatgaggtcgtatgtgtaatattcttagactttgcctggcacattctaagttctcaatcaaagttggattttattttgtaccctttctgacagcccagacctctactggagataacaagaggcttgcaggatttgtttaaagtcaaaaaattttttttttcccagatgactgtttggagattacctcaaataaatgttctgtaagaggcaaaaagaacaagttgcagttatgttggcttgttcagttggggagccagtgttagttaagagtgtgagtcagctacacacaactaatggaaagtgctttaggccaaaaatgcgcagaccctgactgcttacaaccacatttatcgcctctcttctacaagccctttatttgcttgctcaggatgttattaatagaataaaacaaggaacgatagccagggacctcgtttttggtcccagccatgccaccaatgagttgtgtgacttgaatcaacttggttaaatttggtattctctatttctataaaatgagaattagataatttccctacttacttcaagaaaaataactgatatgaaactattgagataggagggctttatactcttaggcacttgactttaagacagaaattctgtccagctttgtataatacctttctttcttttttttcagagattaaaaaaaaatccataagtgtacctctttagtgtcatctctctgtccgccagtgcttgctctcttggtggttataaaaaatgtggagaaactccacatggctgatttgggcaggggctggagttagttgcatccagtttctaggtgtgcattgagaactgttaagtgccaaccttcttgataggtgtgcagaatatagtaataagtaagataggatgtaatcctgggaagctcacatttattgaggaagccctggtaactgacctatgtgttttaaaggccataggtctgtgaagaggtttattttatctccctctagcaaaagaaaaactgtttgtaaatttgttataaaacagtacagtacaaatttgttttataacaaatttgttataaaacaaaattcagacttgttagcatattttaattttttctatattaaaaaatggtgattcttagttatgagatgaggtcagtacaggagacccacagtctctaaaaaaatgtgcaccctcagatattttggacacagatataataaaccaaccactctgtattgaagataatcagaatcaatacagatctgatgagattagctacctgaaccagtcagttggggccacagaagcttgtaagcctgctgtccgggagtgaggggtatattatgtgtggcttatctagaggccaggtgttcccaaattcaatcaagatggtcagtgtcctcctggaaaatataactgtattctaactgatagaaataaaaccatcatctttgcaattgtagtggaaagaatgtgaggtgaattgcaaaataatggaaaggtgatgatttatgatttacactaagtagagaaaatgcaagattctgtgtgccttttgaggactgcccaagagacgaatgtcctgatgttcacaaacaccatgtctgatagtgatatggttgccaatgtagacgttcttcaagagaagactgtgcatgcagctagccaacataaatattcttgactgctccatgcatatttttcactggaaattaataagtgtactgaacaatctttgtgttgtactcctttatagtcttttagaacttttaaaaaatatcctgactttctggcagactgacattgggcaaggttagtgaatctcctaaatgcttagtttcttcatctggaaagcagagataaaatacctgcctcagtgttgttatggaaattaaattagcaatacatcaaaagcacttttcacagtcactagtgcatgggcagtactcaatgaatggtaactgttattatgaatattattgtagctttgggtaattcccagaaatctcttcaggcatggctgaccattttttttttgggggggggatacagtatcaggcaaataaataaatgtgtatgagtgtgtgtcatatcatgcaaataaataagtgtatcagggtgacatcacaccaataaacaagactttgtttagaaatggtgctattgataatgatttctgattgatttgtagaaacaatattgcttggtgaaataaatgatttaactatgggtctgtgctgttctgtaggccccaggaccccccagtgtttagacatgatggggactcaataaaacataaattctccttgatttattgctcagtcagcctcctggatcactagtcaaagaaaatgaaaatactgatttataccctcatgctcagaatttccacgttgaatctttcactgaaaatcagacttttacgaatgttgacaaagaaaaatttaaaaactgtggcaaggtacagtttatccttggtaggacatctgtcgattgtcactaagcctgggcctttacatcctagccaagtgggtaataaattagctatagaaaatagtcattaagagactctataaaacactaggtaagaatacaaactctagagtaagcttgcagagatttggctttttcattttctagctctgtgatcttgagcaagatacttgagcttactgtgaaatgaggatggtaacagttagtacctaatcaagaagagaaaaatagtgcctagaatagggatgcagaatgtcagatgaggaggtagtggaggaattttaagtaggatggtcagggaggtttgcggagaaggagactgaagatctgaaagaggatgaagatgaagaatgcagaattgtcttggaaaagaggacatgaggcaaaaggagcagagcaggtacaagtgtccccaggagagaatatgcccagtatgatggagatagattgtgagcactttgagatgaattcatagagtacatggaggagacacgtgtgaggtcattatagtaactttgagtaaggaaggcgttggcaggtgtggagggttgaattgtgtctcctgaaaagacatgttcaagtcctaacgcctagtacctatgaatgtggccttatttggaaatggagcctttgaagatgtcatcaagcttagatgaagtcatactgaactaggttgggccctaatcctgtgactgacgtttttataagaagagggaaatttggacacagacacacagggaggggaacaccatgtgaagatgggagcagagactggagtgatgcagctgcaagccaaggaattacaaggaattccaggattgccgctggaatctaggaagaggcaaggaaggatcctctcctggagccttgagagagagcatggccctgctgacaccttgatttcagacttcgaggctctagaactgcgagacaatcaatttcagttgttttaagccactcaatttgtggtgatttataatggcagccctaggaaaactaatacagaggatttagaacacacaagcttgctcctacgactgagttgacaatagattacagaggagaaagactggaagcagcaaagtcagttaggagctattacaataaatcaagcaaaagattgcatttgctttagagtagagtagtggtggttgcagtggtgaaaagtgattggattctggatattgtcaaaaggtagactaaatagctttactaatgagtcatatatgggatatgaaaataaaggaggtatccaggaagattctaagtatagaagaatggagttgatttaactgagatgaagaaaactttgagtggcacaggtttggggcaaagatcaaaagtccagtttagggcaagttaagtttgagtcatcacttagagatccaaggggaaatgctagtaggcaactgaatacctgagtctggagttcgggacagtgtttagggtggaggtgtgttttagtttgttctgttataacaacataccttagactgggtggcttataaacaatagaaatttatttctcacagttatactctgggaagttcaagatcaaggcaccaatagattctttttttttttttaagttgatatggaactttatttatttctttattttttgaatttttttttttaattatactttaagttttagggtacatgtgcacattgtgcaggttagttacatatgtatacatgtgccatgctggtgcactgcacccactaactcgtcatctagcattaggtatatctcccattgctatccctccccactccccccaccccacaacagtccccagagtgtgatattccccttcctgtgtccatgtgatctcattgttcaattcccacctatgagtgagaatatgcggtgtttggttttttgttcttgcgatagtttactgagaatgatgatttccaatttcatccatgtcactacaaaggacatgaactcatcattttttatggctgcatagcattccatggtgtatatgtgccacattttcttaatccagtctatcattgttggacatttgggttggttccaagtctttgctattgtgaataatgccgcaataaacatacgtgtgcatgtgtctttatagcagcatgatttatagtcctttgggtatatacccagtaatgggatggctgggtcaaatggtatttccagttctagatccctaaggaatcatcacactgacttccacaatggttgaagtagtttacagtcccaccaacagtgtaaaagtgttcctatttctccacatcctctccagcacctgttgtttcctgactttttaatgattgccattctaactagtgtgagatggtatctcactgtggttttgatttgcatttctgtgatggccagtgatgatgagcattttttcatgtgttttttggctgcataaatgtcttcttttgagaagtgtctgttcatgtcctttgcccactttttgatggtgttgtttgtttttttcttgtcaatttgtttgagttcattgtagattccggatattagccctttgtcagatgagtaggttgcaaaaattttctcccagtttgtaggttgcctgttcactctgatggtagtttcttttgctgtgcagaagctctttagtttaattagatcccatttgtcaattttggcttttgttgccattgcttttggtgtcttagacatgaagtccttgcccgtgcctatgtcctgaatggtaatgtctaggttttcttctagggtttttatggttttaggtctaatgtttaagtctttaatccatcttgaattcatttttgtataaagtgtaaggaagggatccagtttcagctttctacatatggctagccagttttcccagcaccatttattaaatagggaatcctttccccattgcttgtttttctcaggtttgtcaaagatcagatagttgtagatatgcggcgttatttctgagggctctgttctgttccattgctctatatctctgttttggtaccagtaccatgctgttttggttactgtagccttgtagtatagtttgaagtcaggtagtgtgatgcctccagctttgttcttttggcttaggattgacttggcaatgcgggctcttttttggttccatatgaactttcaagtagttttttccaattctgtgaagaaaggcatttgtagcttgatggggatggcattgaatctgtaaattaccttggacagtatggccattttcacgaaattgattctttctacccatgagcatggaatgttcttccatttgtttgtatcctcttttatttccttgagcagtggtttgtagttctccttgaagaggtccttcacatcccttgtaagttggattcctaggtattttattctctttgaagcaattgtgaatgggagttcactcatgatttggctctctgtctgttgttggtgtataagaatgcttgtgatttttgtacattgattttgtatcctgagactttgctgaagttgcttatcagctgaaggagattttgggctgagacaatggggttttctagatatacaatcatgtcatctgcaaacagggacaatttgactcttcttttcctaattgaataccctttatttccttctcctgcctaattgccctggccagaacttccaacactatgttgaataggaatggtgagagagggcatccctgtcttgtgtcagttttccaagggaatacttccagtttttgcccattcagtatgatattggctgtgggtttgtcatagatagctcttattattttgaaatacatcccatcaatacctaatttattgagagtttttagcatgaagggttgttgaattttgtcaaaggctttttctgcatctattgagataatcatgtggtttttgtctttggttctgtttatatgctggattacatttattgatttgcatatagtgaaccagccttgcatcccagggatgaagcccacttgatcatggtggataagctttttgatgtgctgctcaattcgttttgccagtattttattgaggatttttgcatcaatgttcatcaaggatattggtctaaaattctcttttttggttgtgtctctgcctggctttggtatcagaatgatgttggcctcataaaatgagttagggaggattccctctttttctattgattggaatactttcagaaggaatgttaccagctcctgcttgtgcctctggtagaattcggctgtgaatccatctggtcctggactctttttggttggtaagctattgattattgccacaatttcagatcctgttattggtctattcagagattcaacttcttcctggtttagtcttgggagagtgtatgtgtcgaggaatttatccatttcttctagattttctagtttatttgcatagaggtgtttgtagtattctctgatggtagtttgtatttctgtggaatcggtggtcatatcccctttatcttttattgcgtctatttaattcttctctctttttttctttattagtcttgctagcggtctatcaattttgttgatcctttcaaaaaaccagctcctggattcactaattttttgaagggttttttgtgtctctatttccttcagttctgctctgattttagttatttcttgccttctgctagcttttgaatgtgtttgctcttgcttttctagttcttttaattgtgatgttagggtgtcaattttggatctttcctgctttctcttgtgggcgtttagtgctataaatttccctctacacgctgctttgaatgtgtcccagagattctggtatgttgtgtctttgttctcgttggtttcaaagaacttctttatttctgccttcatttcgttatgtacccagtagtcattcaggagcaggttgttcagtttccatgtagttgagcagttttgagggagattcttaatcctgagttctagtttgattgcactgtggtctgagagatagtttgttataatttctgttcttttacatttgctgaggagagctttacttccaagtatgtggtcaattttggaataggtgtggtgtggtgctgaaaaaaatgtatattctgttgatttgaggtggagagttctgtagatgtctattaggtctgcttggtgcagagctgagttcaattcctgggtatccttgttgactttctgtctcgttgatctgtctaatgttgacagtggggtgttaaagtctcccattattaatgtgtgggagtctaagtctctttgtaggtcactcaggacttgctttatgaatctgggtgctcctgtattgtgtgcatatatatttaggatagttagctcttcttgttgaattgatccctttaccattatgtaatggccttctttgtctcttttgatcttggttggtttaaagtctgttttctcagagactaggattgcaacccctgcctttttttgttttccatttgcttggtagatcttcctccatccttttattttgagcctatgtgtgtctctgcacgtgagatgggtttcctgaatacagcacactgatgagtcttgactctttatccaatttgccagtctgtgtcttttaattggagcatttagtccatttgcatttaaagttaatgttgttatgtgtgaatttgatcctgtcatgatgatgttagctggttattttgctcattagttgatgcagtttcttcctagtcttgatggtctttacattttggcatgattttgcagtggctggtaccggttgttcctttccatgtttagcgcttccttcaggagctcttttagggcagacctggtggtgacaaaatctctcagcatttgcttgtctgtaaagtattttatttctccttcacttatgaagcttagtttggctggatatgaaattctgggtggaaaattcttttctttaagaatgttgaatattggcccccactctcttctggcttgtagggtttctgccaagagatccactgttagtctgatgggcttccctttgtgggtaacccgacctttctctctggctgcccttaacattttttccttcatttcaagtttggtgaatctgacaattatgtgtcttggagttgctgttctcgaggagtatctttgtggcgttctctgtatttcctgaatctgaatgttggcctgccttgctagattggggaagttctcctggataatatcctgcagagtgttttccaacttggttccattctccccatcactttcaggtacaccaatcagacgcacatttggtcttttcacatagtcccatatttcttggaggctttgctcatttctttttattcttttttctctaaacttcccttctcccttcatttcattcatttcatcttctatcgctgataccctttcttccagttgattgcatcggctcctgaggcttctgcattcttcacgtagttctcgagccttggttttcagctccatcagctcctttaagcacttctctgtattggttattctagttatacattcttctaaatttttttcaaagttttcaacttctttgcctttgttttgaatgtcctcctgtagctcagagtaatttgatcgtctgaagccttcttctctcagctcatcaaagtcattctccatccagctttgttccattgctggtgaggaactgcattcctttggaggaggagaggcgctctgctttttagagtttccagtttttctgttctgttttttccacatctttgtggttttatctacttttggtctttgatgatggtgacgtacagatgggtttttggtgtggatgtcctttctgtttgttagttttccttctaacagacaggaccctcagctgcaggtccgttggagtaccctgccatgtgaggtgtcagtgtgcccctgctggggggtgcctcccagttaggctgctcggggtcaggggtcagggacccacttgaggaggcagtctgcccattctcagatctccagctgcgtgctgggggtaccactgctctcttcaaagctgtcagacagggacatttaagtctgcagaggttactgctgtctttttgtttgtctgtgccctgcccccagaggtggagcctacagaggcaggcaggcctccttgagctgtggtgggctccacccaattcgagattcctggctgctttgtttacctaatcaagcctgggcaatggtgggcgcccctcccccagcctcgctgccgccttgcagtttgatctcagactgctgtgctagcagtcagcgagactccctgggcgtaggaacctctgaaccaggtgggggatataatctcgcggtgcgccgtttttgaagcctgtcggaaaagcgcagtattcgggttggagtgaaccgattttccaggtgcggtctgtcacctctttctttgactaggaaagggaactccctgaccccttgagcttcccaagtgaggcaatgcctcgccctgcttcggctcgagcacggtgcgcacaaccactgacctgcgcccactgtctggcactccctggtgagatgaacccagtacctcagatggaaatgcagaaatcaccgtcttctgcgtcgctcatgctgggagctgtagaccagagctgttcctattcggccatcttggctcc

SEQ ID NO: 10526 - DNA, 8360 bp, Homo sapiens
ttttttttttctttttttttttttttttttgagatggagtgtcactctgtcacccagggtagagtgcagtggtgcaatctcggctcactgcaacttccgtctcccgggttcaagcgattctcctgcctcagcctcctgagtacctgggattacaggtgtgtgccaccatgcccggctaatttttgtatttttagtagagacgaagtttcaccatgttggtcaggctggtctcgaactcctgacttcgtgatccacccgcctcggcctcccaaagagctcatctattttctagaagctgatttggaaaaaaaaaaaaaaagagaagtctctaaattaccctttacccaaacttccagtcatcaaagttaccactgtttaagtattgtaaaaaaatatatatagattttatatgtgtagcaaacagcattctatttctttctgtgccatgtgctacaaagtggagcgtgttgagcatcatgaggcattgcactaccatttccgggaaaatatactttaatgacattgaagtgcaaacagtctcatggaagcaaactgtgcagctttggctaagaatgggctgaagccctgtgcaaacaacaatgagatactgaggacaatcttaaaagtactgaagaatattgcttttaaaatcccaaacctatgtatagttctttgttatatactcattaatgaaagctaaggggaccagggaagggaaatagggacttaagttactgctgcttgccttttctttactaattagattcaagagcattaaaaactatgattaaaacgtgtacgcttgcttcattgcatcttttgtctcaatgtgtatttaggaaaacctaagttatttgtttttattatttttaacaaattgcagtttcatccaagtaatattttcttgttgtatagtgccacaggaattctgaacattgatcagtctttaaaatgaaaacaagtatcttttttcattgcttcattttatttcttgttattttcagcatattggatggatatttagattatcccattttttcactattataaacaatgttttgaggaattttttttttttttttgagacggagtctcgctttgttgcccaggctggagtgcagtggctcaatctcggctcactgcaagctctgcctcccaggttcatgccattctcctgcctcagcctcccaagtggccgggactacaggcatgcaccaccatgcccagctaatttttgtattttttagtagagacggggtgtcaccatgttggccaggctggtcttgaactcctgatgacctcaagtgatctgcctgcctcggcctcccaaagtgttggggtgtgagcattgcgccagccagaactttcttaattacaaaattatcttatgtgaaaagaaatgttcatgcaagaaaatatagagaaaccacaatatactgcagtaacatatgtagaacccacttgctcagaatagctattaatgctctggagatgtgcatgtctgtaacatgtctgtgtgcatctgtctatctacttacatctatctatctatctatctcctttagatgacataaatttataaagattggatgtactatatatactttttgagttcaaaaaattttatttagaagtaatttaaacgttataaaagattgtaaaaacagttcaaagcacacacacacacacaccctccctttatccagatttttacttattttgtcccacttatttgttctctgtctcaccaacacatatacctcttttattgtttctggacttccaaccagttttgttaaagccaggttacagaggaagtcactcatgttttcttctaggacttgtatagttttattgctttcatttagatctctgcttcatttgtagtttattcatatgtatgttgtatggaattcatcttatttttctagttgtcctaaaacaattaatgtatgtcaatcttttttttttttgttataaaacttatggttttattttgcagcaaccaaatattccttatataagcaacagataaacagagtactttaaaatatttgtttacaataaaattgggcttcccttcatatgttaaatacaacttatgtgccagaaaagtgtgaaaggaaaatagaatcttgggaccccaaactcactatgccaaaggagaagttaagcttgggaactgagtcatgcaaaaactgccttccttctgtccccagacagatagctgtaatttcacatatttactttctcttatgtaaaatatagatttattgagcatgagaggaatgcataattgacttattgttctactccctttctttcttcctttttttttttagttatacttttaagttttagggtacatgtgcacattgtgcaggttagttacatatgtatacatgtgccatgctgtcgctgcacccactaactcgtcatctagcattaggtatatctcctgatgctatccctcccccctccccccaccccacaacagtctccagagtgtgatattccccttcctgtgtccatgtgatctcattgttcaattcccgcctatgagtgagaatatgcggtgtttggttttttgttcttgcgatagtttactgagaatgatgatttccaatttcatccatgtccccacagaggacatgaactcatccttttttatggctgcatagtattccatggtgtatatgtgccacattttcttaatccagtctatcattgttggacatttgggttggttccaagtctttgctattgtgaataatgccgcaataaacatacgtgtgcatgtgtctttatagcagcatgatttataatcctttgggtatatacccagtaatgggatggctgggtcaaatggtatttccagttctagatccctgaggaatcgccacactgacttccacaatggttgaactagtttacagtcccaccaacagtgtaaaagtgttcctatttctccacatcctctccagcacctgttgtttcctgactttttaatgattgccattctaagtggtgtgagatggtatctcattgtggttttgatttgcatttctctgatggccagtgatgatgagcattttttcatgtgttttttggctgcataaatgtcttcttttgagaagtgtctgttcatgtccttcgcccactttttgatggggttgtttgtttttttcttgtaaatttgtttgagttcattgtagattctggatattagccctttgtcagatgagtaggttgcgaaaattttctcccattttgtaggttgcctgtttactctgatggtagtttcttttgctgtgcagaagctcttgagtttaattagatcccatttgtcaattttgtcttttgttgccattgcttttggtgttttagacatgaagtcgttgcccatgcctatgtcctgaatggtaatgccaaggttttcttctagggtttttatggttttaggtctaacgtttaagtctttaatccatcttgaattgatttttgtataaggtgtaaggaagggatccagtttcagctttctacatatggctagccagttttcccagcaccatttattaaatagggaatcctttccccattgcttgtttttgtcaggtttgtcaaagatcagatagttgtagatatgcggcgttatttctgagggctctgttctgttccattgatctatatctctgttttggtaccagtaccatgctgttttggttactgtagccttgtagtatagtttgaagtcaggtagcatgatgcctccagctttgttcttttggcttaggattgacttggcgatgtgggctcttttttggttccatatgaactttaaaatagttttttccaattctgtgaaaaaagtcattggtagcttgatggggatggcattgaatctgtaaattaccttaggcagtatggccattttcatgatattgattcttcctacccatgagcatggagtgttcttccatttgtttgtatcctcttttatttccttgagcagtggtttgtagttctccctgaagaggtccttcacatcccttgtaagttggattcctaggtattttattctctttgaagcaattgtgaatgggacttcactcatgatttggctctctgtttgtctgttggtggtgtataagaatgcttgtgatttttgtacattgattttgtatcctgagactttgctgaagttgcttatcagcttaaggagattttgggctgagacaatggagttttctagatatacaatcatgtcgtctgcaaacagggacaatttgacttcctcttttcctaattgaataccctttatttccttctcctgcctaattgccctggccagaacttccaacactatgttgaataggagtggtgagagagggcatccctgtcttgtgccagttttcaaagggaatgcttccagtttttgcccattcaatatgatattggctgtgggtttgtcatagatagctcttattattttgaaatacgtcccatcaatacctaatttattgagagtttttagcatgaagggttgttgaattttgtcaaaggctttttctgcatctattgagataatcatgtggttttttgtctttggctctgtttatatgctggattacatttattgatttgcgtatattgaaccagccttgcatcccagggatgaagcccacttgatcatggtggataagctttttgatgtgctgctggattcgttttgccagtattttattgaggatttttgcatcaatgttcatcaaggatattggtctaaaattctctttttttgttgtgtctctgcctggctttggtatcagaatgatgctggcctcataaaatgagttagggaggattccctctttttctattgattggaatagtttcagaaggaatggtaccagttcctccttgtacctctggtagaattcggctgtgaatccatctggtcctggactctttttggttggtaagctattgattattgccacaatttcagctcctgttattggtctattcagagattcaacttcttcctggtttagtcttgggagagtgtatgtgtcgaggaatttatccatttcttctagattttctagtttatttgcgtagaggtgtttgtagtattctctgatggtagtttgtatttctgtgggatcggtggtgatatcccctttatcatttttaattgcgtctatttgattcatctctctttttttctttattagtcttgctagcggtctatcaattttgttgatcctttcaaaaaaccagctccaggattcattaattttttgaagggttttttgtgtctctatttccttcagttctgctctgattttagttatttcttgccttctgctagcttttgaatgtgtttgctcttgcttttctagttcttttaattgtgatgttagggtgtcaattttggatctttcctgctttctcttgtgggcatttagtgctataaatttccctccacacactgctttgaatgtgtcccagagattctggtatgttgtgtctttgttctcgttggtttcaaagaacatctttatttctgccttcatttcgttatgtacccagtagtcattcaggagcaggttgtccagtttccatgtagttgagtggttttgagtgagattcttaatcctgagttctagtttgattgcactgtggtctgagagatagtttgttataatttctgttcttttacatttgctgaggagagctttacttcccagtatgtggtcaattttggaataggtgtggtgtggtgctgaaaaaaatgtatattctgttgatttggggtggagagttctgtagatgtctattaggtccgcttggtgcagagctgagttcaattcctgggtatccttgttaactttctgtctcgttgatctatctaatgttgacagtggggtgttaaagtctccgattattaatgtgtgggagtctaagtctctttgtaggtcactcaggacttgctttatgaatcttggtgctcctatattgggtgcatatatatttaggatagttagctcttcttgttgaattgatccctttaccattatgtaatggccttctttgtctcttttgatctttgttggtttaaagtctgttttatcagagactaggattgcaacccctgcctttttttgttttccattggcttggtagatcttcctccatccttttattttgagcctatgtgtgtgtctgcacgtgagatgggtttcctgaatacagcacactgatgggtcttgactctttatccaatttgccaatctgtgtcttttaactggagcatttagtccattgacatttacagttaatattgttatgtgtgaatttgatcctgtcattatgatgttagctggttattttgctcattagttgatgcagtttcttcctagtctcgatggtctttacattttggcatgattttgcagcggctggtaccagttgttcctttccatgtttagtgcttccttcaggagctcttgtaaggcaggcctggtggtgacgaaatctctcagcatttgcttgtctgtaaagtattttatttctccttcacttatgaagcttagtttgtctggatatgaaattctgggttgaaaagtcttttctttaagaatgttgaatattggcccccactctcttctagcttgtagggtttctgccgagagatccgctgttagtctgatgggcttccctttgagggtaacctgacctttctctctggctgcccttaacattttttccttcatttcaactttggtgaatctgacaattatgtgtcttggagttgctcttctcgaggagtagctttgtggcgttctctgtatttcctgaatctgaacgttggcctgccttgctagattggggaagttctcctggataatatcctgcagagtgttttccaacttggttccattctccccatcactttcaggtacaccaatcagacatagatttggtcttttcacatagtcccatatttcttggaggctttgctcatttcttttattttttttctctaaacttcccttctcacttcatttcattcatttcatcttccattgctgataccctttcttccagttgatcgcatcggctcctgaggcttctgcattcttcatgtagttctcgagccttggttttcagctccatcagctcctttaagcacttctctgtattggttattctagttatacattcttctaaatttttttcagagttttcaacttctttgcctttggtttgaatgtcctcccgtagctcagagtaatttgatcgtctgaagccttcttctctcagcttgtcaaagtcattctccatccagctttgttccgttgctggtgaggaactacgttcctttggaggaggagaggcgctctgctttttagagtttccattttttctgttctgtttttttccccatctttgtggttttatctacttttggtctttgatgatggtgatgtacagatgggtttttggtgtggatgtcctttctgtttgttagttttccttctaacagagaggaccctcagctgcaggtctgttggaataccctgccgtgtgaggtgtcagtgtgcccctgctggggggtgcctcccagttaggctgctcgggggtcaggggtcagggacccacttgaggcagtctgccctttctcagatctccagctgcctgctgggagaaccactgctctcttcaaagctgtcagatagggatatttaagtctgcagaggttactgctgtctttttgtttgtctgtgccctgcccccagaggtggagcctacagaggcaggcaggcctccttgagctgtggtgggctccacccagttggagcttccaggctgctttgtttacctaatcaagcctgggcaatggcgggcgcccctcccccagcctcgctgccgccttgcagtttgatctcagactgctgtgctagcaatcagcaagactccgtgggcgtaggaccctccgagccaggtgtgggatataatctcgtggtgcgcctttttttaagcccatcggaaaagcacagtattcgggtgggagtgacccgattttccaggtgccgtctgtcacccctttctttgactcagaaagggaactccctgaccgcttgcgcttcccaagtgaggcaatgcctcaccctgcttcggctcgtgcacagtgcgtgcacccactgacctgtgcccactgtctggcactccctagtgagatgaacccggcacctcagatggaaatgcagaaatcacccgtcttctgcgttgctcacgctgggagctgtagactggagctgttcctgttcggccatcttggctcctccctttcc

SEQ ID NO: 10527 - DNA, 6054 bp, Homo sapiens
ttttttttttttttttttaatttttttttttttattatactctaagttttagggtacatgtgcacattgtgcaggttagttacatatgtatacatgtggcatgctggtgcgctgcacccactaacgtgtcatctagcattaggtatatctcccaatgctatccctcccccctcccccgaccccaccacagtccccagagtgtgatattccccttcctgtgtccaagtgatctcattgttcaattcccacctatgagtgagaatatgcggtgtttggttttttgttcttgcgatagtttactgagaatgatggtttccaatttcatccatgtccctacaaaggacatgaactcatcattttttatggctgcatagtattccattgtgtatatgtgccacattttcttaatccagtctatcattgttggacatttgggttggttccaagtctttgctattgtgaatagtgccgcaataaacatacgtgtgcatgtgtctttatagcagcatgatttatagtcctttgggtatatacccagtaatgggatggctgggtcaaatggtattcctagttctagatccctgaggaatcgccacactgacttccacaatggttgaactagtttacagtcccaccaacagtgtaaaagtgttcctatttctccacatcctctccagcacctgttgtttcctgactttttaatgattgccattctaactggtgtgagatgatatctcatagtggttttgatttgcatttctctgatggccagtgatgatgagcatttcttcatgtgttttttggctgcataaatgtcttcttttgagaagtgtctgttcatgtccttcgcccactttttgatggggttgtttgtttttttcttgtaaatttgtttgagttcattgtagattctggatattagccctttgtcagatgagtaggttgcgaaaattttctcccatgttgtaggttgcctgttcactctgatggtagtttcttttgctgtgcagaagctctttagtttaattagatcccatttgtcaattttggcttttgttgccattgcttttggtgttttggacatgaagtccttgcccacgcctatgtcctgaatggtaatgcctaggttttcttctagggtttttatggttttaggtctaacgtttaaatctttaatccatcttgaattgatttttgtataaggtgtaaggaagggatccagtttcagctttctacatatggctagccagttttcccagcaccatttattaaatagggaatcctttccccattgcttgtttttctcaggtttgtcaaagatcagatagttgtagatatgtggcattatttctgagagctctgttctgttccattgatctatatctctgttttggtaccagtaccatgctgttttggttactgtagccatgtagtatagtttgaagtcaggtagtgtgatgcctccagctttgttcttttggcttaggattgacttggcgatgcgggctcttttttggttccatatgaactttaaagtagttttttccaattctgtgaagaaagtcattggtagcttgatggggatggcattgaatctgtaaattaccttgggcagtatggccattttcacgatattgattcttcctacccatgagcatggaatgttcttccatttgtttgtgtcctcttttatttccttgagcagtggtttgtagttctccttgaagaggtccttcacatcccttgtaagttggattcctaggtattttattctctttgaagcaattgtgaatgggagttcactcatgatttggctctctgtttgtctgttgttggtgtataagaatgcttgtgatttttgtacattgattttgtatcctgagactgctgaagttgcttatcagcttaaggagattttgggctgagacgatggggttttctagataaacaatcatgtcgtctgcaaacagggacaatttgacttcctcttttcctaattgaataccctttatttccttctcctgcctgattgccctggccagaacttccaacactatgttgaataggagcggtgagagagggcatccctgtcttgtgccagttttcaaagggaatgcttccagtttttgcccattcagaatgatattggctgtgggtttgtcatagatagctcttattattttgaaatacgtcccatcaatacctaatttattgagagtttttagcatgaagggttgttgaattttgtcaaaggctttttctgcatctattgagataatcatgtggtttttgtctttggctctgtttatatgctggattacatttattgatttgcgtatattgaaccagccttgcatcccagggatgaagcccacttgatcatggtggataagctttttgatgtgctgctggattcggtttgccagtattttattgaggatttttgcatcaatgttcatcaaggatattggtctaaaattctcttttttggttgtgtctctgcccggctttggtatcagaatgatgctggcctcataaaatgagttagggaggattccctctttttctattgattggaatagtttcagaaggaatggtaccagttcctccttgtacctctggtagaattcggctgtgaatccatctggtcctggactctttttggttggtaaactattgattattgccacaatttcagagcctgttattggtctattcagagattcaacttcttcctggtttagtcttgggagagtgtatgtgtcgaggaatgtatccatttcttctagattttctagtttatttgcgtagaggtgtttgtagtattctctgatggtagtttgtatttctgtgggatcggtggtgatatcccctttatcattttttattgtgtctatttgattcttctctctttttttctttattagtcttgctagcggtctatcaattttgttgatcctttcaaaaaaccagctcctggattcattgattttttgaagggttttttgtgtctctatttccttcagttctgctctgattttagttatttcttgccttctgctagcttttgaatgtgtttgctcttgcttttctagttcttttaattgtgatgttagggtgtcaattttggatctttcctgctttctcttgtaggcatttagtgctataaatttccctctacacactgctttgaatgcgtcccagagattctggtatgtggtgtctttgttctcgttggtttcaaagaacatctttatttctgccttcatttcgttatgtacccagtagtcattcaggagcaggttgttcagtttccatgtagttgagcggctttgagtgagattcttaatcctgagttctagtttgattgcactgtggtctgagagatagtttgttataatttctgttcttttacatttgctgaggagagctttacttccaactatgtggtcaattttggaataggtgtggtgtggtgctgaaaaaaatgtatattctgttgatttggggtggagagttctgtagatgtctattaggtctgcttggtgcagagctgagttcaattcctgggtatccttgttgactttctgtctcgttgatctgtctaatgttgacagtggggtgttaaagtctcccattattaatgtgtgggagtctaagtctctttgtaggtcactcaggacttgctttatgaatctgagtgctcctgtattgggtgcataaatatttaggatagttagctcctcttgttgaattgatccctttaccattatgtaatggccttctttgtctcttttgatctttgttggtttaaagtctgttttatcagagactaggattgcaacccctgcctttttttgttttccattggcttggtagatcttcctccatccttttattttgagcctatgtgtgtctctgcacgtgagatgggtttcctgaatacagcacactgatgggtcttgactctttatccaacttgccagtctgtgtcttttaattgcagaatttagtccatttatatttaaagttaatattgttatgtgtgaatttgatcctgtcattatgatgttagctggtgattttgctcattagttgatgcagtttcttcctagtctcgatggtctttacattttggcatgattttgcagcggctggtaccagttgttcctttccatgtttagggcttccttcaggagctcttttagggcaggcctggtggtgacaaaatctctcagcatttgcttgtctataaagtattttatttctccttcacttatgaagcttagtttggctggatatgaaattctgggttgaaaattcttttctttaagaatgttgaatattggcccccactctcttctggcttgtagggtttctgccgagagatccgctgttagtctgatgggctttcctttgagggtaacccgacctttctctctggctgcccttaacattttttccttcatttcaactttggtgaatctgacaattatgtgtcttggagttgctcttctcgaggagtatctttgtggagttctctgtatttcctgaatctgaacgttggcctgccttgctagattggggaagttctcctggataatatcctgcagagtgttttccaacttggttccattctccacatcactttcaggtacaccaatcagacgtagatttggtcttttcacatagtcccatatttcttggaggctttgctcatttctttttattcttttttctctaaacttcccttctcgcttcatttcattcatttcatcttccattgctgataccctttcttccagttgatcgcatcggctcctgaggcttctgcattcttcacgtagttctcgagccttggttttcagctccatcagctcctttaagcacttctctgtattggttattctagttatacattcttctaaatttttttcaaagttttcaacttctttgcctttggtttgaatgtcctcccgtagctcagagtaatttgatcgtctgaagccttcttctctcagctcgtcaaaatcattctccatccagctttgttctgttgctggtgaggaactgcgttcctttggaggaggagaggcgctctgcgttttagagtttccagtttttctgttctgttttttccccatctttgtggttttatctacttttggtctttgatgatggtgatgtacagatgggttttcggtgtagatgtcctttctggttgttagttttccttctaacagacaggaccctcagctgcaggtctgttggaataccctgccgtgtgaggtgtcagtgtgcccctgctggggggtgcctcccagttaggctgctcgggggttaggggtcaggggtcagggacccacttgaggaggcagtctgcccgttctcagatctccagctgcgtgctgggagaaccactgctctcttcaaagctgtcagacagggacacttaagtctgcagaggttactgctgtctttttgtttgtctgtgccctgcccccagaggtggagcctacagaggcaggcaggcctccttgagctgtggtgggctccacccagttcgagcttcccggctgctttgtttacctaagcaagcctgggcaatggcgggcgcccctcccccagcctcgttgccgccttgcagtttgatctcagactgctgtgctagcaatcagcgagattccgtgggcgtaggaccctctgagccaggtgtgggatatagtctcgtggtgcgccgtttcttaagccggtctgaaaagcgcaatattcgggtgggagtgacccgattttccaggtgcgtccgtcacccctttctttgactcggaaagggaactccctgaccccttgcgcttcccaggtgaggcaatgcctcgccctgcttcggctcgcgcacggtgcgcacacacactggcctgcgcccactgtctggcactccctagtgagatgaacccggtacctcagatggaaatgcagaaatcacctgtcttctgcgtcgctcacgctgggagctgtagaccggagctgttcctattcggccatcttggctcctcc

SEQ ID NO: 10528 - DNA, 25036 bp, Homo sapiens
aactgtcaggttgccgtctaggtagcggttgtgcttgctgaggctgcacttgctgacactgcagctgcgacgcggctaagaggcgcagagcgaggagtcgggatttggtcgcgagcggcgacggtgggtagcagcgctccgggcagatcctgcgtccctgcatccctggcgaaagtagtggagggagatttaaagttccttggcgcgtgtttcctccccctgggctcttccccagaccgcgagtgattcagctgttgtgccggaaggtcccaaagtttcccctccgaggcgtgcaggaagaggaagtgagcaggagtgagggatgctgagcgattactgtcatcagaggttccggtcacttaaaacgttgagaaaaaataaccatgtataaagctctgttgtgcttaagtaagatttttcttaaaacaggctgggtcggaaggtgatggaagaaaacttatggccttttgcttactgcaatggcttttctcctctgcttctagtccctgctttggggaggggctggcgcgcccctttccttgagtgcagctaggcctggtgaaaggcacaggcgacatcaccctgctgctagtttgcatgttaattcgctcttcctttgcctcttgggggttccatttgaattcccagacccctgttttgctgtcagccagataattaccaagatgttattttatgtttctggcaacagagaagcacacaaaagttttgatcttgttttctgataccttggattagagactactgaaaatgtagtgaactaatgtgcgtccgccacccattaaagcagttttcatttttctcctttgtttctgaacctagaaacagtaaggaaaatgctactgttctagagtttcaaataactcataccttgttgacataaagcagggcagatggaagatagcatattttccaagagtgcggtgggtttttttgtgtctgcagtgtgtccatattaagaaacaatttttgagatctgaccatacttactagctcatttttaaataatcagcacccccccccccccacccctgttacctgcctggtctcaaatcctgaaggaagaagtgaataaaaatataaatggaccaagttatcacagtggtagatttgaagtcagtgaagcagccattccttgctgcagatacatgcacttattttatcctccctaattggcttaactaaagacagtcatgctgagatttagtttacttaacatgtgtatgcacagtgatactcactggaaaaagttgaactttcctttccacaatttagttccagcctgtgtttccattctatttttgcacttttccctgtatcttccttttctatttcaatttcctcatctctcatttatttttcagcccactgtgactaagacctgtaattgttttactttccagtgaaattgttcaagcaaacgtctcagcaacctcctaatctccaaattctatccaatcctcatggttctttggcatctaattctattttcttctcaaagttgtgatattgcttccatagttctaatgttctgacttcctttgctgactcctcttctttgctgactgttcttctcttgccctttagatgttagtggttctggctttaaccctcttctcattcacagtcgtagtccttaactctattagggctatggtcccctctgaacgcatatttaaagcgaaagatcttctttctagaaaaatacacattcacatttatgataaaaatattgcatacgagtcgggtatagggacctgatatggttaggtcttgtgtccccactcaaatcccatcttcaattgtaatctccacatgtaggggaagggaagtgattggattataagggcgatttcccccgtgctgttctcatgatagtgaattctcacgagatctgatggttttataaatggtagtttttcctgcactctctcacatactgtctcacctgccgccatctaagatgtgcctgcttccccttctaccatgattttaagtttcctgaggcctccccagacatgcggaactgtgagtcaataaaaattcttttatttataaattacccagttttgggcagttctttttttttttttttttttttgagacggagtctcactctgtcgcccaggctggagtgcagcggcgcgatcttggctcactatgagctccgcctcccgggttcacgccattctcctgcctcagcctcccaagtagctgggactacaggcgcccaccaccacgccaggctaattttttgtatttagtggagacggggtttcaccgtgttagctagtatggtcttgatctcctgacctcgtaatcctcccacctcagcctcccaaagtgctgggattgcaggcatgagccaccgtgcccggcctgggcagttctttatagcagtttgaaaaacgtactaatacaggacctcaggataagaactttttctcacattccttttttataggtggtctcatccattcccttttttcagcagttcccattatgccagtgattcctcaaactggatctccaacttatacctccagtgcggcgctcccacaatgcttaactccaggaaacaccattcacagtgtagccattgtgaatggcagttcttggagtagcgcactacgtagccagtgtgaccacagactgcatacttgcagctttaccctagtgcctcagaggcatcctcacacccagctcatctgatatggcactcattgtccttcctcccaacctgctcatcttcctaccttccttgccttggtgagtggcactatccatctagttacccaaaccggagatctggaagccaccaacagttctttttaaccccttgatctattattgatcattttctctttccatcaccataacacaactgtcttgtagtcataccctccatccccttcccattgctacttcctagacttaggtcatcatttatcttcttaattactatcaaagagaacatttatctcttagactactgcagtcagctctcaattgatctctctctcttttttttttgagacggagtctctgtcacccaggctggagtgcagtggtgcgatcttggctcactgcagcctccacccccagggttctagctattctcctgcctcagcctcccaagtagctgggattacaggcacctgccaccaggctcggctaattgttttgtatttttaatagagacagggtttcgccatgttggccaggctggtctcaaactcctgacctcaggtgatccacctacctcagcctcccaaagtgctaggattacaggcatgattcactgcacccagcctgatctctcttaatatccaaattcatcctcaacgctgctggaatgatctttctgatcatgtaacttttaaaaaatatttcaataacttgtctagaataaacacccagatttttaatatgacaagttttgaccttccatgatctggctgctccttactttttgtttcatccttagccaatcctttgcacccattgctttgtccttaccaaactgcttgctgttcgtggcatacatgtccatggctctgtctttgcttatattgctctactgcctagaatatctacacctgtgtttataccttttatccatctttcaggatgagacctactcatctttcagatctcaacacctgggtcatcttctctaaaaactttctgtgcctcctttcctgcttatttacagtcatgcaatcttaccccatgaaaaatagctactcctatctctctactttgtatctgttattttagggcctatcagcagtttattcatcagtcggtcacttatataatatacatgcctggccctctctacagattgtaaactccttaagaatgaggacttcattttacattcctcaccaatgtcttacatattactggtattcagatagttcgaatagtcactatttgttctttgaataattcggttacttgttactaaaagtacttttaatgattttttgattaggactttcaacaaattctctatgcatatatttgattctgttgttctgtataagctcacttttcttaaaataatatttccaaaggtaagtttcccaagaagggaatttgcacaaattgtttgttctctcttggttctgtgtcttagaggaaagtacacagcacccaggttgtcacacattgctcaagaacagtgatcacaatctattatgctcaacaggccccgctggggatttttctgaagacctgactacgttataaactcactaatattgggactgggtcttcaactgttttttgcccagtgattttttgcctgtaggtactcaatatgttgaatgaatgattttagcatatcacaggaagattgcagatttggatactgttgcacttatatatatctggaaaggattttatcttaaatatcaaggaaaaaagctaaagttagcttctactgttttagagcatttgtgcagaatgtcatcagatgaggagaaatactcacttccagttgtgcaaaatgactccagtcgaggcagttctgtctcttcgaatcttcaggtaggaaaaaatttctaaatttaccatgactttttttattttaaacaaatgaatgtaagggaaaactaggattttttaataattttttcatccatttacaagggagtttttcaatttataataatatcaaacttcaggaattactgtacacattttaggagtgactttacattgttttaacttttcagaaaatattgatgaactcttcatacactctgtacaaaggcttcaaccaacacagtaagaggtgaaacaaatgttcaagaaacatttttttgtttaaatttttttcattttagctacctctcatgaatgctactttcacttttaatgcaaattaatacaatatcaaaccatccaaagttctagagctcaagattcccttgtgttctacttgctgaggtttggtctctgttgtcacaacattcagtacaatctgctgcccaggacctggacattgacagataaaatgaagtgggtcagttaactacagagggtgtggtatttacatgaaatgttttaaatttctcttatttctaaatatttcatcatcaaaaatatggatttagatttctggagtagattttaaatatgagaataatgacatggtatatcttaaattttacagttgtattactcaaggggaaaggctgtttatgcctaagcatatgaaattgttattgattctgtacgatatgagaaaagctttaggaaaatattttatgaaacaaatttgttcctttaatcgaaattatggatttcaaaatggggaaggtattgggaaaatatctgaatatttacaggataaaactagtctggagttgtggcagagcttttgcaccctagccttcccttttgatggtacctgtcccatgtagtcctctcttcaggtgacagtacttcctccacccttcatcgctgtctgattgaaacttgaagatagaactgattaactcatttatactaaaatgtaaacaccttgtgagctctcaaatttcatttcgtgaagagataaagctttaaatcaaaagaataactctctagagtggaattttagagagacggaagaagaacctgccagaaattattttgtgttattgtttacccacctataatgtaagctcaactgagagtctattactgtcaactaatgttcctactggttcttggactgaagttgaaagcctctccatattccctgtacatacagtgttattactttgggtttcactactggaagcacttcaaaatataaatacaaaaaaaaatcttaaaaataacataaaatacacatttttacatatgtagtaaatatgtaaatccaaacatttaatacaaaagcccctcataaataaatattcctcttaaggaacttttttgttactctctttttatgcgaatgcttcataagccagaaggtggtaaatgctgagggatgggcagcatccatagtgcttatacactgaaaatttcctctaaccacagctcctatcagccaagttgctctgactctaatggttgaggcatgggtggagctatatttcagggtcatatcaattcagctcttgggggttggggaggggggcaaaattacaagttttgaatgttaacagaggttatgtttggcaattaagaaagccaatattgtttattttgattcttaattttaaattttatttttaaataacttatttggcttgtgtctacatatatgaaactctaaaatagtcatttaaataactgattttttctaaatgttttcttgaaataagttggaatatatggtcatggaatactattgacatatacttatttatttcccctttaagccatagcaattgtggtaaaatatatgaaatatatgaatatgtatgaagtatatgatttgaaatatgtgtttggatcttttttttccttctcttatccagagcagaagtcagactagggaagccacaagtgaaagccactgacttccacttctccctccgttcctacatgctagaggtggtgataggctaactctgagtagagctgacttggctaaatctagttgcaactgacaccacagcaggaacactataaaaagtttatgaacctcacaatataagatcaccatcatattaatctgctcaggctaccataacaaagtaccataaattcataggcttaaacaacagacatttatcttctcacagttctggaggctagaagtcccagatcacagcccaaaagggtcagtttctggtgagggctctctttgtggattgcagacaggtgccttcttgctgtatctttgcatggcctttcctcagtacagtatgtgcaggtgggaggagagcatgcacaaggttcctggtgtctcttctgatgagtacattaatgctctcagggccccaaccaatgaccttatttaaccttaattactttcttgaaggcctcatctccaaatacagccacactgggtgttagggcttcagcatatgaattttgaggggacacaaacattcagactccgtaactccataacagccacacttttatatattcttagccaaaatcaaaagtatattttgggtgtttgggaagtataatagtgctttaacagaaaccaagtaagggtggtttaagtgggttccttacagtttcattctgtctctcataaattctgagctgatacgtagtcctgagatcatctgaggacccaatcccttctctctttttgctgtaccatgagctgttgaccgtgtttgcattgtcaggtactggtgcactgacagtgtactaccactagcccatgggaagaggggaccagcaggaagcagcttcgtttttaaggacttcacctaaagttgtacacatcatttccagttgaatcccatagaccaggtctcttggccacacctagctgcagaggaggctgggaaatgtagctgggtggccatttgcccaaatcaaaccctggggctttattaagttaaagaaattaaaaagaaatggatgctgctggattagttacagtctctatgcacttgaaattttatgtattagtttattaggaccaacacacacattcaggtttataggaactagtaaatatcttgtgcatggccccaatttattaagctctttgggaatttctttttgataattagaaaaccaatatgctttgggaagtgtattttttttaacctaaggatatttaaatctatttaaataatcatagttacttttgtcaatgtaaaaattaaatgttggtgctcgcttcagcagcacatatactaaaactggagccacacagaaaattagcatggaccctgtgcaaggaggacatgcaaatttgtgaaatgttctataattttttaataatttttttaagttttataatataaaaaaagttgtattgtgatatcctaaatgatttgtttcctaataagagccttctgtctcagtgataaccattatgtaaaatactgatttttatttgctactaggaaatgtaagtttaaaactcagacagatgtttattctcatgaaggtgacatcactaacaaaaatggttgattatagcaatatgaaggagattctggttgaattttctaaagattttctctttgaaatatctctctcttcctcttctgtcgttagccttaaaatatataaaaatcagtatttgctatacctaatgtttactgcgtgtaagtatctatgttaaatatgtgaatcaggccgggtgcagtggctcacgcctgtaatcctagcactttgggggtccagggctgtggatcaagaggtcaggagttcaagaccagcctgaccaacatggtgaaaccccatctctactaaaagtacaaaaattaggtgggcgtggtggtacaaacctgtaattccagatactcaggaggctgaggcaggagaatcgcttgaacctgggaggcagaggttgcggtgagccaagaccatgccactgcactccagcctgggctacagagcaagactccatctcaaaaaaaaagaagaaaaaaattgtaaatcaagaaatcaaggttgaagcgcaaaccaggtcactcttgtacatgtaattgccataaaagctagcagttttcaaatatataaaagcataagcttttttaaaaaacaattttacttaaaattccgatataaaaaagcagatgaaaacaaaactacagtagtatagatttattttgtaaattcaaatgcaatcagttaataaaaacagttaagctgccttgataaatgtacatttgaaattggggggtaatagaaggccattgcagttttataaacttaagtatccagtttgcttctatattttgtttaggttacataattttttttcagttccaaaaatggtatctttttaatagcatgtctcatcttcaattaaaccaatctgacatataaaattaagtgatagaaaatttttgattcagtgttgagtcactcacagaaccttatcacctcttcatactttgttgttgtttccccagagacaggatcttgctctgtcacccaggctggggtgcagtggtgccatcttgtcttactgcagcttccagttcctaggcttaagtggtcctcctgcctcagcctcctgagtagctacaactacaggcacacaccaccacacctagcaaatttttgtaaaaaatttattgtagagatgaggtctcactttgttgctcaggcttcaagccatcctcctgcctcagcctctcaaagtgctgagtttacaggcatgagtcactgcacccagccctcttcaaactgttaatcataaatataaaaatcacacaagaagcactcgaggaactcaagcttggaataagtggtaaaactttgtaatataataagcatgggactctattatggtaattaaatttctttaaaacaaattcagttgaatatattataacattgtaactgttacactacattattgattattggcctctcttaggaagaatatgaagaactgcttcattatgctatagtgactccaaatattgaaccctgtgcttcacagtcatctcatcctaagggagaattggtgccagatgtcagaatttctacaattcatgatattcttcatagtcaaggttatatatatttttcaagatatctcttaatttaaaatattactgagtttattaatgatactgacaggattgtgaaaatgcctgtccagatcagtgattcttctcaaccatttatgtgtattagtatcatctaggggagctttttacattttaatatattattcctgactctcgtgtgacagcttgatttttctttgaacttcatttgactcttacttttatgaagaataataaagttgaagcaatgctatggcaactgcatggctttttggtatgttgtatctcagtacttgttccaacagttttatgccaggattaacctgaaaactaaatgcccaagactaaaattaaagatggtaaccctgagagtctcttaaattactttacaaacctcatgctagtgctttatcagcagtatttatatgggcatggaggactgtttgaataattatcacaaggtgaacccatctgtggaccatgtcagcaacagaactgaaagctactataaaccaggatgtgtgttgatagatgagtgaaaagtggagaaaagaggataaagctccttttacctccattccttattcaggtgaagacaacatcccaaactctaaataaatgttctttcaaagggcacagaaagccttcctaaaacagtcctgataaggaccagttatcacactataggcgtaactccaaggatccctgtccttgaaggcgcatgacatagcctactcagaggccaaaggctcctgggcttctgctaagtcatagctctagtgtctgttgtctctcattctctgtagacgtggatttttcactgttcctctgtctttggcctgttgcagtggaacaacaaacaggaccacaggatgagagccttaaaatacaggccaggcagtggctcatgcttgtaatgccagtactttcagaggctgaggcaggaggattgcttgagcccaggaggttgagacaagcctaggcaacatagcaaaaccctagctctacaaaaaaattagccgggcagagcagcctatagtcccagcaccttgggaggctggggtgggaggattgcatgagctcaggagttcaaggctgcagtgtgccatgattatgccactgcacttcagcctaggcaacagagcaagactctgtttaaaaaaaaaaaaagaaaaaactttcgagatgctgtagtcaacagttcaaggtaatcatctgggatttaagaccattgttcttttctcttatgtaagatagcatttatttattctctgccatttccaaaaaggatttgagattaaaacatacgttatatagtaagtttagatatcctttagtcatcttgattcacaagtagactttgttaaagtcttctatgtaaattcatcatcccacattctctttattcttggtatctcagttgcttgatagaaggcatggtatgtggaaattggcaaagtatgtgtaagcctctaacagtcattcttgagaggtttttcccagtttcctttttgccatctgttgactacaggttcctgaagtggaagcaaatgttttgggggagccagtgccacttgagtttgattgtggctagtgaaaagcagcgggcctctggaaatacccagtgtcataagagagcagatccttttctaagttctaatgtcattcacccacttattctcttagtgtgaattgaatgctatagtagactacattatctctcatctatatttggtgcataagttggagcttatcaatgatatagtaagtctttttctagtctcagatttttatctgttcttgtcctttgttttagtgttcctatatccccagcatgttgtattttgtttgttctaaaatattatgtactgctaccttcttaaattatgtgtgattagacattttatttaagagtggttcagtttaattttaaaaagctttctttttggcaggaaataactctgaagtaagagaaactgcaatagaagttggaaaaggatgtgatttccatatttcaagtcattcaaagacagatggtatgatttttctttagcttatttgtattaatatacaacattttgtggtttgatgaatattatctatgtagtaagaggaataatttcagcatattatttattagcaggattttaaaatgctattattgctaatttaagtgataatatttaaaataatttgataagataccaaaatagtacaattaagacaggtcaatgcattatagtgtgtagtatcctttcttaaaattgctaagttagagggcaagtcttttaaaagatttaatgggatattagatagtttggccaattcaagtttttatgtaaaccaatgcactgtttcccaactttcaggcatttgcgtaccagtgtaaggattttcatcctatctttatgccacctgttacgccatcatttagtgtttttctttaaaagtctgctttgtctttgttaaaagggaagattagcaaatcttaaagaggctttttggggggattgttttttgtatttttttaattttgtttggtttttgagacaggatctcactctgtcacccaggctagagtgcagggctccctgcagcctcaacctccttggctcaagtgatcctcctgcctcagcgccccctcccccagtagctgggactacaggcacatgccaccacacctagctaatttttaacttttctgtagaggtgggatctcactatgttgcccaggctggtctcaaactcctaagatcaagtgatccacttgccctggcctcccaaagtgctgggattacaggcatgagccaccatgcctggctttaaagaacttttaaaagcatactagaactggactgagacttttttcttgactagtcagaataattaattaaaatgtaatattgtggaatatttttctatttaatgttatttaatgtggtaaccatttttgtcaccacgtaagtaatgcctctaacccttagtttcctcacttgtaagtagaagtcttaggcatcataatctctgacagcccttacaagttctgaagttacatgatttgatttcttaaaaggtaagtgttgagatattttttaaattgaaaagcagagtctatcgctttctttgtgagtacagatctagttggcaaaatcaagtaaaagagaatattcatgtacattgtcattccacctgttctttgggtttcttaaccatcctcagaacatgcagatagcatttcatagtatgactagcccagaccttgtgttatgttttttataccaaacacacatgttagggaattattttcccttttgcaaagaagtctttacataagcagaatatgtttgcaaaaaaactaaaatcttacaaattttaaaaaagaattcttgaaagatttaagtaacaagttctctatcatagattcatctttccttcagtaggaagaaagctcttccatctttgttattaggatgctcgtagcaaatgtgagatatgtgacaagtgatgacagatagtctctaattccagcataaatatgtgagaaaatattaacttttctttctcagtgctttttttttttttttttgagacagagtctcgctctatcacccaggctagagtgggtggcacgatctcggctcactgaaacctctgcttcccgggttcaagcaattctcctgcctcagcctcccaagtagctgggactataggcacgtgccaccatgcctggctaattttttgtatttttagtagagatagggttttaccatgttggccaggctggtcttgaactcctgacctcatgattcgcccacttcagcctcccaaagtgcggggattacaggcatgagccaccgtgcccagcctttcagtgcttttttagaaatagatacctgttctctttagggccctgactctcccccacctccctggatatgggcaggggatgagcgttttatatatatgcacatacatatagagatgtgtacatttctcacctctacattgaagcctaacagtgtacttaacaacagagtatctgcaaaactaaattatgagtctctttctacttaaattgtttaattttaataggttttttgtttgtttttgtttttggagacagagtctcattctgtcacaggctggagtgcagtggcacgatctcggctcactgcaacctctgcctccctggttcaagcaattctcctgcctcagcttcccgagtagctgggactataggtgcgtgccaccacacccagctaatttttgtatttttagtagagatggggtttcaccttgttggccaggatggtctcaatctctggacctcatgattcacccgcctcggcctcccaaagtgctaggattacaggcatgagccaccgcgcccggccgaattttaatagtattaaaaccaatcccagtgttaaacttacagagtaatattgacctatatacaaccacactgaccttggtcaattacttaactttttctgaacctcagtttctcatcagtaaaatggagataataatacctattttttagggtagcatgtgttatgagaactaatctttataatgtttttattacagaaacagaaagcacttcattaatggtgatatgatacagatgatgatagtttcacctcaggctggacctggatatatgaaggatccttatctgggatagaggtcatttgctgggagagaagggattgggagtataggaggtatctcatgccagtctgtgctaaatcactgacaatactgaaattaaaaatagattaaggtacacctgaaaggtagtttctctgcattttttctcagcctccataagtagcagacgtcttttagccttccagtatggttccttaccaacttgagttattttcaatttggcttgacagctacaacttttcttttattcagagtcatcaccagtgttatcgccaaggaagccttctcacccagtcatggattttttcagttcacatcttttagctgactcttcctcaccagcaacaaattctagtcatacagatgcccatgaaatacttgtgagcgattttcttgtttctgatgaaaaccttcagaagatggaaaatgtgcttgatctttggagttcaggtcttaaggtacggtacagcagttcttcaattacagttgtttagtatgtaatgtaatagttttactctcatttatactgttttgtttttttgagttaaactttctaaaaatcttttgtttcctgagatcagtttagtgtcttaagtcttgcttctcaatctttaatgtacttacgaatcatagcgggagcctgttaaactacagcttcatatgcagtaggtcttcagcagggcctaagatcgtgcttctttttttctttttttgactcttgtttgtttgtttgattttactttaagttctgggatacatgtggtgaacatgcaggtttgttacataggtatacatgtgccatggtggtttgctgcacctatcaacctgtcatctaggtttcaagccccacatgcattaggtatgtgtcctaatgctctccctccccttaccctccaccccctgacaggccccggtgtgtgatgttcccctccatgtgtccatgtgttctcatttctgtcaagctcccaggtgttgctactggttcagaaactgtactttgagttgccaggttttaagtggttgctggaacggttctacatgctccattgaatttcacagatactttgaatggctcagcctgtgtgtaactgagacatactgtgcctttaccatatcgtagttgtgactaatagaaatgtctccttttatgcaataacgaaagatccaattttagcaatggatattcattttatagccactcctatagcaactatgatgtgtaagtgataaaactataaaagttgatttttattttgatactactggcctttaagtaaaacaaagtattgcagaaatagtaagtgggttttatttatttatttatttatttatttttattattattatactttaagttttagggtacatgtacacaatgtgcaggttagttacatatgtatacatgtgccatgctggtgcgctgcacccactaactcatcatctagcattaggtatatctcccaagtgctatccctccccccatcccccccaacacaacaacagtccccagagatgtgatgtccccttcctgtgtccatgtgttctccttgttcaattcccacctatcagtgagaatatgcggtgttgggttttttgttcttgcgatagtttactgagaatgatgatttccagtttcatccatgtccctacaaaggacatgaactcatcattttttatggctgcatagtattccatggtgtatatgtgccacattttcttaatccagtctatcattgttggacatttgggttggttccaagtctttgctattgtgaataatgccgcaataaacatacgtgtgcatgtgtctttatagccgcatgatttatagtcctttgggtatataccccgtaatgggatggctgggtcaaatggtatttgtagttctagatccctgaggaatcgccacactgacttccacaatggttgaactagtttacagtcccaccaacagtgtaaaagtgttcctatttctccacatcctctccagcacctgttgtttcctgactttttaatgattgccattctaactggtgtgagatggtatctcattgtggttttgatttgcatttctctgatggccagtgatggtgagcattttttcatgtgttttttggctgcataaatgtcttcttttgagaagtgtctgttcatgtcctttgcccactttttgatggggttgtttgcttttttcttgtaaatttgtttgagttcattgtagattctggatattagccctttgtcagataagtaggttgtgaaaattttctcccgttttgtaggttgcctgttcactctgatggtagtttgttttgctgtgcagaagctctttagtttaattagatcccatttgtcaattttggcttttgttgccattgcttttggtgttttagacatgaagtccttgcccatgcctgtgtcctgaatggtaatgcctaggttttcttctagggtttttatggttttaggtctaacatttaagtctttaatccatcttgaattgatttttgtataaggtgtaaggaagggatccagtttcagctttctacatatggctagccagttttcccagcaccatttattaaatagggaatcctttcctcattgcttgtttttctcaggtttgtcaaagatcagatagttgtagataagcggcattatttctgagggctctgttctgttccattgatctatatctctgttttggtaccagtaccatgctgttttggttactgtagccttgtagtatagtttgaagtcaggtagtgtgatgcctccagctttgttcttttggctcaggattgacttggtgatgcgggctcttttttggttccatatgaactttaaagtagttttttccaattctgtgaagaaagtcattggtagcttgatggggatggcattgaatctgtaaattaccttgggcagtatggccattttcacgatactgactcttcctacccatgagcatggaatgttcttccatttgtttgtatcctcttttatttccttgagcagtggtctgtagttctccttgaagaggtccttcccatcccttgtaagttggattcctaggtattttattctctttgaagcaattatgaatgggagttcactcatgatttggctctctgtttgtctgttgttgatgtataagaatgcttgtgatttttgtacattgattttgtatcctgagactttgctgaagttgcttatcagcttaaggagattttgggctgagacaatggggttttctagatatacaatcatgtcgtctgcaaacagggagaatttgacttcctcttttcctaattgaataccctttatttccttctcctgcctgattgccctggccagaacttccaacactatgttgaataggagtggtgagagagggcatccctgtcttgtaccagttttcaaagggaatgcttccagtttttgcccattcagtatgatattggctgtgggtttgtcatagatagctcttattattttgagatacatcccatcaatacctaatttattgagagattttagcatgaagggttgttgaattttgtcaaaggccttttctgcatctattgagataatcatgtggtttttgtctttggttctgtttatatgctggattacattattgatttgtgtatattgaaccagccttgcatcccagggatgaagcccacttgatcatggtggataagctttttgatgtgctgctggattcggtttgccagtattttgttgaggatttttgcatcaatgttcatcaaggatattggtctaaaattctcttttttggttgtgtctctgcccggctttggtatcaggatgatgttggcctcataaaatgagttagggaggattccctctttttctattgattggaatagtttcagaaggaatggtaccagttcttccttgtacctctggtagaattcagctgtgaatccatctggtcctggactctttttcattggtaagctattgattattgccacaatatcagctcctgttattggtctattcagagattcaacttcttcctggtttagtcttgggagagtgtatgtgtcgaggaatttatccatttcttctagattttctagtttatttgcatagaggtgtttgtagtattctctgatggtactttgtatttctgtgggattggtggtgatatcccctttatcattttttattgcatctatttgattcttctcgcttttcttctttattagtcttgctagcagtctatcaattttgttcatcctttcaaaaaaccagctcctggattcattaattttttgaagggttttttgtgtctctatttccttcagttctgctctgattttagttatttcttgccttctgctagcttttgaatgtgtttgctcttgcttttctagttcttttaattgtgaagttagggtgtcaattttggatctttcctcctttctcttgtgggcatttagtgctataaatttccctctacacactgcattgaatgtgtcccagagatcctggtatgatgtgtctttgttctcggtggtttcaaagaacatctttatttctgccttcatttcattatgtacccagtagtcattcaggagcaggttgttcagtttccatgcagttgagcggttttgagtgagattcttaatcctgagttctattttgattgcatgtggtctgagagatagtttgttataatttctgttcttttacatttgctgaggagagctttacttccaagtatgtggtcaattttggaataggtgtggtgtggtgctgaaaaaaatgtatattctgttgatttggggtggagagttctgtagatatctattaggtctgcttggtgcagagctgagttcaattcctgggtatccttgttgactttctgtctcgttgatctgtctaatgttgacagtggggtgttaaagtctcccattattaatatgtgggagtctaagtctctttgtaggtcactcaggacttgctttatgaatctgggtgctcttgtattgggtgcatatatatttaggatagttagctcttcttgttgaattgatccctttaccattatgtaatggccttctttgtctcttttgatctttgttggtttaaagtctgttttatcagagactaggattgcaacccctgcctttttttgttttccattggcttggtagatcttcctccatccttttattttgagcctatgtgtgtctctgcccgtgagatgggtttcctgaatacagcacactgatggatcttgactctttatccaatttgccagtctgtgtcttttaattggagcatttagcccatttacatttaaagttaatattgttatgtgtgaatttgatcctgacaggatcaatgacattatgatgttagctgattattttgctcgttagttgatgcagtttcttcctagtctcgatggtctttacattttggcatgtttttgcagtgggtgttaccggttgttcctttccatgtttagcacttccttcaggagctcttttagggcaggcctggtggtgacaaaatctctcagctttgcttgtctgtaaagtattttatttctccttcacttatgaagcttagtttggctggatatgaaattctgggttgaaaattcttttctttaagaatgttgaatattggcccccactctcttctggcttgtagagtttctgctgagagatcagctgttagtctgatgggcttccctttgagggtaacccgacctttctctctggctgcccttaacattttttccttcatttcaactttggcgaatctgacaattatgtgtcttggtgttgctcttctcgaggagtatctttgtggcgttctctgtatttcctgaatctgagcgttggcctgccttgctagattagggaagttctcctggattaatatcctgcagagtgttttccaacttggttccattctccccatcactttcaggtacaccaatgagacgtagatttggtcttttcacgtagtcccatatttcttggaggctttgctcgtttctttttattcttttttctctaaacttcccttcttgcttcatttcattcatttcatcttccattgctgataccctttcttccagttgatcgcatcagctcctgaggcttctgcattcttcacgtagttctcgagccttggttttcagctccatcagctcctttaagcacttctctgtattggttattctagttatacattcttctaaatttttttcaaagttttcaacttctttgcctttggtttgaatgtcctcccgtagctcggagtaatttgatcgtctgaagccttctcagctcgtcaaagtcattctccatccagctttgttccgttgctggtgaggaactgcgatcctttggaggaggagagtcgctctgctttttagagtttccagtttttctgctctgttttttccccatctttgtggttttatctacttttggtctttgatgatggtgatgtacagatgggtttttggtgtggatgtcctttctgtttgttagttttccttctaacagacaggaccctcagctgcaggtctgttggagtacccggccgtgtgaggtgtcagtctgcctctgctggggggtgcctcccagttaggctgctcggaggtcaggggtcagggacccacttgaggcaggctgcccgttctcagatctccagctgcgtgctgggagaaccactgctctcttcaaagctgtcagacagggacatttaagtctgcagaggttactgctgtctttttgtttgtctgtgccctgcccccagaggtggagcctacagaggcaggcaggtctccttcagctgtggtgggctccacccagttcgagcttccgggctgctttgtttacctaagcaagcctgggcaatggcgggtgcccctcccccagcctcgctgccgccttgcagtttgatctcagactactgtgctagtaatcagtgagacttcgtgggcgtaggaccctctgagccaggtgagggatataatcttctgttgcgccgttttttaagcccctcggaaaagcgcagtattcgggtgggagtgacccgattttccaggtgccatctgtcacccctttctttgactaggaaagggtactccctgaccccttgcacttcctgagtaaggcaatgcctcgccctgcttcacctcgcgcacggtgcatgcacccactgtcctgcgcccactgtctggcactccctagtgagatgaacccggtacctcagatggaaatgcagaaatcacccgtcttctgcattgctcacgctgggagctgtagactggagctgttcctattcggccatcttggctcctcccccacttttttttgtttgtttttttgttttttgttttttttgctattattaaaaaactggagaaaatgacagtttttctgaaacatataatttgagaaaactaagttgcatattcacatatatagagaaattatggcccatgtgagttctgtggcatttatatttttccctcatttggaaccttaaattctagaaataattcttcagcatggttttaccattttccccccttggaacaggtttcatacttagaatagtgtaagtcaattggagtgttataccaccaaccatttaaattgtgtttagttaatatgttgtccagtttttttttaataacaaattattatttggtctttttatttgtgccagtcagtagggtgacagaacatagcagtccattataacagataataatctgtgataaatggcttgggaaaacaagtatcaactctcatggtttctttccactatcacccatttctaaataacttcccagtcagtatggcttagcctatgccatagttatgtgtttccctttattcctgatccatcttcatatggacatttaatccttgaataaacaaaggaacatagtgaatgagacctgaaatttttttaagtgacaacaagatttcatacaaaattagttaaaataggaaaaaattagcttccctagtatgatgaatgtgaactgcacagacctgtgactgttgaacttacatatgtttttcattaatgtgttccaattgttttaatgacttttgtgttgatgcttgttctgatttttttaatgtttctttatttcagtgtagttttaagaagtgatattaacgaacaaactacttaattgtcactatattaatttttcagacaaacatcatatctgaactaagtaaatggagacttaattttattgactggcaccgaatggaaatgagaaaagagaaagaaaaacatgcagcacatttaaaacaactgtgtaatcagatcaatgaattgaaggagctgcaaaaaacctttgaaatctccattgggagaaaagatgaggtcttcttttttatatttctttttaactgagattcagtaaatgtcttgctagataataaattctaagaaatgattatttacctcatacaagatacaggttctatcagaaactgacagaaaaattcatagccattggatttattcttcctattaaacatatcagcataatgtcattttaccctcaccattgacttctgtgttcttgatgttttaagagtgtttgctttgtaaactacattaaaacatcaccttgtaacccataaatgtataaaactattatgatttgtcaatttaaaaaaaatttttttttaaaaagagtatgtgctaaatgtaagtacactagtttttttctttctaatcctttcttcctaaccttaagcgaacgtgaaggaacgagcattatctacattttaaaccatccttttaggggtcattttaaggatctcacattctttttttaatctctctctttttgaaacagggtcttgctatgttgcccagagtggagagcagtggctattcataggcataatcatagctcactacaatctcaaactccggggctcaagtgaacctcctgcctcagcccctgccagggactgcaagtgcataccaccatgcttgggtttaagcatctcaaattctatctgtgatggatgtgttttcattaatgaaggctttcttcattttattgataaacacagaaaacatcttttatttcactttcctttagcttcttaagaattcgagggtaagattcaagtctgtgctaattttttgcctcctgacacagtacctggagcaaagcagatgggcaacaaatctgtgcccggctataaatggatgtccggaggggcatccacttatggataggagagtggtgttgttcagaagaggaggacttgggcagacacctcagctgcttgtctgcagaagtagcacttaagtgttttcatgaattaaagattataatttttttaaacataccttgatttcgtataaaattgaacattttatagaattttttttgaaacaatggattttaatgtcagtcattttctttgttatactcaaaattctgtcccatggtttttaagtttaatttttttattttgaagtatcacaaagaatatagatatcatatgttcagtttatgagaatgagtaaagtggatagacaggtactacgattcagcttaacacatagaatatttccagtagcttagaatgtatgcccttttcctctctggaaattatttaaagagcagttataaatatctcttggtaaatgtgcccaatttacaaaatctctttctaatgtgactatttttagaaatttatttcagttattcagttcttttataagagagaatattatcttaggattttaaagccttctgaatttttttttaagaacaagagtaataatatcactgaagaagtacatcaacatataacattaataacattagttatatataatgttattaatatgttatatgtataacattaattatatatatttacttatatatataacattttatgtatgacatatgttatatatgttattaatagttatatgtataacatgttattaataggtatatataacatatataatatatagttatatatataactataacatattaatagttacatatataactattatttgcttttataggtttgtttaatccagaaaatcattggacagtcgttgaggaacttctatatccaagatagtagtagggaccagaaagatatttaaatatctaaatattctggcccctgccctcaaatctagtgaataaagacatggtgtatataggagaactttcaaatgtataattgttttacctgaattgaatgtcagtagctaatttgcatatacataaactttttattggtgattaccatatacacataatgaagacttccttcttcttttgttccctttcattagttgatatctagtatattcatgtgagaaagttttaccatctttttaaagataataatgaggttaactgaatgaatatagtagtgatccatacctatcctctctagcattttttgatatatgagaaaatcactttaccattgctgttattttaatatcacataattgggttaattgctgtttacaggtgatttctagcttgtctcatgccataggcaagcaaaggaaaagatagagttgatgagaacattcttccactggcgaatcggccatgtcagagccagacaggatgt

SEQ ID NO: 10529 - DNA, 7441 bp, Homo sapiens
tatttttagtacagacagggtttcaccatgttgaccaagctggtcttgaactcctgacctcaggtgatctgcctgccttggcctcccaaagtgctgggattacaggcatgagccaccacatccagccggcattgctgttttccttgtggcaattttaagtcaagtcaagactgattcagggtcttcctgttgatataagggtgtgaggaagatggttgtggcaggtgctatgagaggctgacctcataaaagttgtatgaatcattcagacaacactcctgccttgttatattggtcaaagccaaccataggcctgcccgcattcaagggaagggatatgagtctacctcagcctgctcctgactcagttctgtttgcctcagaactcagctactctcccttgggattcgctgcatcccaactgcctctatcctcctcagtcatggtaatcattcactcactcattcaatcgttcaacaaatattaattgagcatctaccctgtgcctgatactatgctaggcactgaatatatagcagtaaaccaggtggcataagactgtccccagggagcttccatcctaaagaaggagagagaaaataaagacataaatgaggacactctacgtggtgtgtcaggcatgatatgtgggctcatacctgtaattccagcactctgggaggccgaggtgggaggattgcttgagcccaagagtttgagactagccaggacaacataagaagaccttgtctctatgagaaaaaaaaaatagccaggcatggtggcacatgcctgtggtcccagctactcgggaagctgaggtgggaggatcgcttgagaccaggagatggagggtgcagtgagctatgaccttgctactgcacaccagccactccagcctggatgagatagtgagatgctgtctcaaaaacaaaaacaaagcaaagtagaaaacatggataaggagtggtagagacagggttggacctgcaatttgaaatagatggttagggggtgtggaacaagccagccacatggctatctggataagggtgtccctgttagggcagggaaatgtgcgaaagccctgagcagtggggcctgtgcagagggttcaagatgcgggaggacaaggcggagcaggggaagaggtatagtcagatgacgtggggcccaggggaaagacctggggttcagtctgagtgagattaccggccagtaagggatttgggcagaggagcaacaggattcgactaaggccagcagtctgatgtaagctgtggattcgtgcacctgctttgtgtgcaaatcacctattttcctgggtaaaaccattagcattagaggctagagccgtgaagctgagcataccctttcacttaataattccatgcctgggaattcaacctggagagagaatttaataaaacagtattcttcaggagtctcaagttttcaataagaagtttttaaattttgtgtttttaacaataaccttttaaaataatggtgaacatatattccactgtctggttgattacttatatctcaataccacatttcattccagcagcagagttaagtagtattgctttaattgcaacaagctgagctaatgtgggaagaatgcagtagagtggcacagaagaatggtgagttcattgttattaccctcctagcccgtgagaacgcccaccatcccatgagttcctacatctatgccatgaggagcagttgggtttcagcacagcattctctatctttgcaaagttgttgattttaaccctgtgttttgaagttgtgctttgatttaattagcaatttcattttgatgggatagttatatcagtcataccccttctacttagttttatgtccataatattataattaaacattatttaattcaacattgaagggcagtgaaataattattttctgttttttctttttttctttttaattattatactttaagttttagggtacatgtgcacattgtgcaggttagttacatatgtatacatgtgacatgctggtgcactgcacccactaactcgtcatctagcattaggtatatctcccaatgctatccctctcctctcccccgaccccacaacagtccccagactgtgatgttccccctcctgtgtccatgtgttcccattgttcagttcccacctatgagtgagaatatgcggtgtttggttttttgttcttgcgacagtttactgagaatgatgatttccaatttcatccatgtccctacaaaggacatgaactcatcattttttatggctgcgtagtattccatggtgtatatgtgccacattttcttaatccagtctatcattgttggacatttgggttggttccaagtctttgctatcgtgaatagtgccacaataaacacacgtgtgcatgtatctttatagcagcatgatttatagtcctttgggtatatacccagtaatgggatggctgggtcaaatggtatttctagttctagatccctgaggaatcgccacactgacttccacaatggttgaaccagtttatagtcccaccaacagtgtaaaagtgttcctatttctccacatcctctccagcacctgttgtttcctgactttttaatgatcgccattccagctggtatgagatggtatctcattgtggctttgatttgcatttctctgatggccagtgatgatgagcattttttcatgtgtctgttggctgcataaatgtcttcttttgagaagtgtctgttcatatccttcgcccactttttggtggggttgtttgttttttccttgtaaatgtgtttgagttcattgtagattctggatattagccctttgtcagatgagtaggttgcaaaaattttctctcattctgtaggttgcctgttcactctgatggtagtttcttttgctgtgcagaagctctttagtttaattagatcccatttgtcaattttggcttttttttgccattgcttttggtgttttagacatgaagtccttgctcgtgcctatgtcctgaatggtaatgcctaggttttcttctagggtttttatggttttaggtctaacgtttaagtctttaatccatcttgaattgatttttgtataaggtgtaaggaagggatccagtttcagctttctacacatggctagccagttttcccagcaccatttattaaatagggaatcctttccccattgcttgtttttctcaggtttgtcaaagatcagatagttgtagatatgcggcgttatttctgagggctctgttctgttccattgatctatatctctgttttggtaccagtaccatgctgttttggtgactgtagccttgtagtatagtttgaagtcaggtagcgtgacgcctccagctttgttcttttggcttaggattgacttggcgatgtgggctcttttttggttccatatgaactttaaagtagttttttccaattctgtgaagaaagtcgatggtagcttgatggggatggcattgaatctataaattaccttgggcggtatggccattttcatgatattgattcttcctatccatgagcatggaatgttcttccatttgtttgtatcctctttaatttcattgagcagtggtttgtagttctccttgaagaggtccttcacatcccttgtaagttggattcctaggtattttattctctttgaagcaattgtgaatgggagttcactcatgatttggttctctgtttgtctgttattggtgtatgagaatgcttatgatttttgtacattgattttgtatcctgagactttgctgaagttgcttatcagcttaaggagattttgggctgagacaatggggttttctagatatacaatcatgtcatctgcaaacagggacaatttgacttcctcttttcctaattgaataccctttatttccttctcctgcctaattgccctggccagaacttccaacactatgttgaataggagtggtgagagagggcatccctgtcttgtgccagttttcaaagggaatgcttccagtttttgcccattcagtatgatattggctgtgtgtttgtcatagatagctcttattattttgagatacgtcccatcaatacctaatttattgagagtttttagcatgaagggtttttgaattttgtcaaaggccttttctgcatctattgagataatcatgtggtttttgtctttggttctgtttatatgctggattatatttattgatttgcatatattgaaccatcgttgcatcccagggatgaagcccacttgatcatggtggataagctttttgatgtgctgctggattcggtttgccagtattttattgaggatttttgcatcaatgttcatcaaggatattggtctaaaattctcttttttgtttgtgtctctgccaggctttggtatcaggatgatgctggcctcataaaatgagttagggaggattccctctttttctattgattggaatagtttcagaaggaatggtaccagttcctccttgtacctctggtagaattcggctgtgaatccatctggtcctggactctttttggttggtaagctattgattattgccacaatttcagctcctgttattggtctattcagagattcaacttcttcctggtttagtcttgggagagtgtatgtgtcaaggaatttatccatttcttctagattttctagtttatttgcgtagaggtgtttgtagtattctctgatggtagtttttatttctgtgggatcggtggtgatatcccctttatcattttttattgtgtctgtttgattcttctctctttttttctttattagtcttgctagcggtctatcaattttgttgatcctttcaaaaaaccagctcctggattcattaattttttgaagggttttttgtgtctctatttccttcagttctgctctgattttagttatttcttgccttctgctagcttttgaatgtgttttctcttgcttttctagttcttttaattgtgatgttagggtgtcaattttggatctttcctgctttctcttgtgggcatttagtgctataaatttccctctacacactgctttgaatgtgtcccagagattctggtatgttgtgtctttgttctcgttggtttcaaagaacatctttatttctgccttcatttcgttatgtacccagtagtcattcaggagcagattgttcagtttccatgtagttgagcagttttgagtgagtttcttaatcctgagttctagtttgattgcactgtggtctgagagatagtttgttataatttctgatcttttacatttgctgaggagagctttacttccaactacgtggtcaattttggaataggtgtggtgtggtgctgaaaaaaatgtatactgttgatttggggtggagagttctgtagatgtctattaggtccacttggtgcagagctgagttcaattcctgggtatccttgttgactttctgtctcattgatctgtctaatgttgacagtggggtgttaaagtctcccattattaatgtgtgggagtctaagtctctttgtagtcactcaggacttgctttatgaatctgggtgctcctgtattgggtgcatatatatttaggatagttagctcttcttgttgaattgatccctttaccattatgtaatggccttctttgtctcttttgatctttgttggtttaaagtctgttttatcagagactaggattgcaacccctgcctttttttgttttccatttgcttggtagatcttcctccatccttttattttgagcctatgtgtgtctctgcacgtgagatgggtttcctgaatacagcacactgatgggtcttgactctttatccaatttgccagtctgtgtcttgtaattggagcatttagtccatttacatttaaagttaatattgttatgtgtgaatttgaacctgtcatgatgatgttagctggttattttgcccattaattgatgcagtttcttcatagcatcgatggtctttacattttggcatgattttgcagtggctggtactggttgttcctttccatgtttagtgcttccttcaggagctcttttagggcaggcctggtggtgacaaaatctctcaacatttgcttgtctgtaaaggattttatttctccttcacttatgaagcttagtttggctggatatgaaattctgggttgaaaattcttttctttaagaatattgaatattggcccccactctcttctgtcttgtagagtttctgccgagagatccgctgttagtctgatgggcttccctttgtgggtaacccgacctttctctctggctgcccttaacattttttccttcatttcaactttggtgaatctgacaattatgtgtcttggagttgctcttctcgaggagtatctttgtggcgttctctgtatttcctgaatctgaatgttggcctaccttgctagattggggaagttctcctggataatatcctgcagagtgttttccaacttggttccattctccccatcactttcaggtacaccaatcagacgtagatttggtcttttcacatagtcccatatttcttggaggctttgttcgtttctttttattattttttctctaaacttcccttcttgcttcatttcattcatttcatcttccatcgctgataccctttcttccagttgatcacatcggctcctgaggcttctgcattcttcacgtagttctcgagccttggctttcagctccatcagctcctttaagcacttctctgtattggttattctagttatacattcgtctaaatttttttcagtttttaacttctttgcctttggtttgaatttcctcctgtagctcgtagtttgatcgtctgaagccttcttctctcaactcgtcaaagtcattctccgtccagctttgttccattgctggtgaggaactgcgatcctttggaggaggagaggtgctctgctttttagagtttccagtttttctgctctgttttttccccatctttttggttttatctacttttggtctttgatgatggtgatctccagatgcgtttttggtgtggatgtcctttctgtttgttagttttccttctaacgacaggaccctcagctgcaggtctgttggagtttgctagaggtccactccagaccctgtttgcctgggtatcagcagcggtgtctgcagaacagtggttttttgtgaaccgcgaatgctgctctctgatcgttcttctggaagttttgtctcagaggagtacccggccgtgtgaggtgtcagtctgcccctgctggggggggtgcttcccagttaggctgctcagggggtcagggtcagggacccacttgaggaggcagtctgcccgttctca

SEQ ID NO: 10530 - DNA, 8739 bp, Homo sapiens
  SITE (149): n equals a,t,g, or c
  SITE (5447): n equals a,t,g, or c
ttttatttatttatttttaattttatttttattttattatactttaagggtacatctgcacaacgtgcaggttagttacatatgtatacatgtgccatgttggtgtgctacacccagtaactcgtcatttaacattaggtatatctccntaatgtaatcccttcccccctcccccaccccataacaggccccagtgtatggtgttccccttcctgtgtccatgtgttctcattgttcaactcccacctatgagtgagaacatgcggtgtttggttttttgtccttgcgatagtttgctgagaatgatggtttccagcttcatccatgtccctacaaaggacatgaactcatcattttttatggctgcatagtattacatggtgtatatgtgccacattttcttaatccagtctatcattgttggacatttgggttggttctaagtctttgctattgtgaatagtgccacaataaacatacgtgtgcatgtgcctttatagcagcatgatttattatcctttgggtatatacccagtaatgggatggctgggtcaaatggtatttctagttctagaaccttgaggaatcaccacactgtcttccacaatggttgaactagtttacagttccaccaacagtgtaaaagtgttcctatttctccacatcctctccagcacctgttgtttcctgactttttaatgatcgccattctaactggtgtgagatggtatctcattgtggttttgatttgcatttctctgatggccagtgatgatgagcattttttcacgtgtcttttggctgcataaatgtcttcttttgagaagtgtctgttcatatcctttgcccacttgttgatggggttgtttggtttttttcttgtaaatttgtttgagttcattgtagattctggatattagccctttgtcagatgagtagattgcaaaaattttctcccattctgtaggtcgcctgttcactctgttcactctgattcactctgttcattctgttcactctgatggtagtttcttttgctgtgcagaagctctttagtttaattagatcccatttgtcaattttagcttttgttgccattgcttttggtgttttagacatgaagtccttgcccatgcctatgtcctgaatggtattgcctaggttttcttctagggtttttatggttttaggtctaacatgtaagtctttaatccatcttgaattaatttttgtataaggtgtaaggaaggaatccagtttcagctttctacatatggctagccagttttcccagcaccatttattaaatagggaatcctttccccatttcttgtttttgtcaggtttgtcaaagatcagatggttgttgatatgtggcattatttctgagggctctgttctgttccattgttctatgtatctgttttggtaccagtaccatgctgttttggttactgtagccttgtagtatagtttgaagtcaggtagcatgatgccttcagctttgttcttttggcttaggattgacttggcaatgcgggctcttttttggttccatatgaactttaaagtagatttttccaattctgtgaagaaagtcagtggtagcttgatggggatggcattgaatctataaattaccttgggtagtatggccattttcacgatattgattcttcctacccatgagcatggaacgttcttccatttgtttgtatcctcttttatttcattgagcagtggttggtagttctccttgaagaggtccttcacgttccttgtaagtgggattcctgggttttttatctctttgaagcaattgtgaatgggagttcactcatgatttggctctctgtttgtctgttattggtgtataagaatgcttgtgatttttgcacattgattttgtatcctgagactttgctgaagttgcctatcagcttaaggagattttgggctgagacaatggggttttctagatatacaatcatgtcatctgcaaacagggacaatttgacttcctcttttcctaattgaataccctttatttccttctcctgcctgattgccctggccagaacttccaatactatgttgaataggagtggtgagagagggcatccctgtcttgtgccaggtttcaaagggaatgcttccagtttttgcccattcagtatgatattggctgtgggtttgtcataaatagctcttattattttgagatatgtcccatcaatacctaatttattgagcgattttagcatgaagggttgttgaattttgtcaaaggccttttctgcatctattgagataattatatggtttttgtctttggttctgtttatatgccggattacatttattgatttgtgtatgttgaaccagccttgcatcccagggataaagcccacttgactatggtggataagctttttgatgtgctgctggattccatttgccagtattttattgaggatttttgcatcgatgttcatcagggatattggtctaaaattctctttttttgttgtgtctctgtcaggctttggtatcaggatggtgctggcctcataaaatgagttaggaaggattccctctttttctattgattggaatagtttcagaaggaatggtaccagctcctccttgtacctctggtagaatttggctgtgaatccatctggtcctggactttttttggttggtaagctattaattattgcctcaatttcagagcctattattggtctattcagagattcaacttcttcctggtttagtcttgggagggtgtatgtgttgaggaatttatccatttcttctagattttctagtttatttgcgtagaggtgtttatagtattctccgatggtagtttgtatttctgtgggatctgtggtgatatcccctttatcattttttgttgcgtctatttgattcttctctcttttcttctttattagtcttgctagtggtctatcaattttgttgatcttttcaaaaaaccagctcctggattcattgatttttttgaagggttttttgtgtctctatttccttcagttctgctctgatcttagttatttcttgccttttgctagcttttgaatgtgtttgctcttgcttctctagttctttttttttttttttaatttttttagtatttattgatcattcttgggtttttctcggagagggggatttggcagggtcataggacaatagtggagagaaggtcagcagataaacatgtgaacaaaggtctctggttttcctaggcagaggaccctgcggccttccgcagtgtttgcgtccatgggtacttgaaattaggaagtggtgatgactcttaaggagcatgctgcctttaagcatctgtttaacaaagcacatcttgcaccgcccttaatccatttaaccctgagttgacacagcacgtttcagagagcaaggggttgggggtaaggttatagattaacagcatcccaaggcagaagaatttttcttagtacagaacaaaatggagtctcctatgtctacttctttctacacagacacagtaacaatctgatctttctttcttttccccacatttcccccttttctatttgacaaaaccgccatcgtcatcatggcttgttctcaatgagctgttgggtacacctcccagacagggtggcggccgggcagaagggctcctcacttcccagacatggcggctgggcagagggtctccccaccccccgagacggggcggccgggcagaggcgctcctcagttcccagacggggtcgcggccgggcagaggcactcctcacctcccagatggggtggcggccaggtagagatgctcctcacctcccagacagggcggccgggcagaggcgctcctcacatcccagatggggcggccgggcataggtgctccccacatcccagacaatgggcagccaggcagagacgctcctcacttcctagacaggatgacggcctggaagaggcactcctcacttcccagactgggcggctgggcagaggggctcctcacatcccagatgatgggcggccaggcagagacgctcctcacttcccagacggggtggcggccgggaagaggcactcctcacttcccagactgggcggctgggcagaggggctccctcacatcccagacgatggggcgggcctggcagagacgctcctcacttcctagatggggtggtggccgggcagaggctgcaatctcagcactttgggaggccaaggcaggcggctgggaggtggaggttgtagcgagccgagatcatgccactgcactccagcttgggcagcattgagcactgagtgagcaagactctgtctgcaatcccggcacctcgggaggccgaggcaggcagatcactcgaggtcaggagttggagagcagcccggccaacatggcgaaaccccgtctccaccaaaaaatacaaaaaccagtcaggcgtggcagcgcacacctgcaatcccaggcactcagcaggctgaggcaggagaatcaggcagggaggttgcagtgagccgagatcgcggcagtacagtccagccttggcaacagagggagactgtggccaagtgggagacggagacgagggagagggggagaccgtgaaaagggagagggagagggagctctagttcttttaattgtgatgttaaggtgtcaattttagatctttcctgctttctcttgtgggcatttagtgctataaatttccctctacacactgctttaaatgtgtcccagagattctggtatattgtgtctttgttctcattggtttcaaagaacatctttatttctgccttcattttgttatgtacccagtagtcattcaggagcaggttgttcagtttccatgtagttgagtggttttgagtgagtttcttaatcctgagttctagtttgattgcactgtggtctgagagacagtttgttataatttctattcttttacatttgctgaggagtgctttacttccaactatgtggtcgattttggaataggtgtggtgtggtgctgagaagaaagtacattctattgctttggggtggagagttctgtagatgtctattaggtccgcttggtgcagagctgagttcaattcctggatatccttcttaattttctgtctcgttgatctgtctaatgttgacagtggggtgttaaagtctcccattattattgtgtgggagtctaagtctctttgtaggtctctaaggacttgctttatgaatctgggtgctcctgtattggatgcatatatatttaacatagttagctcttcttgttgaattgatgcctttaccattatgtaatggccttctttgtctcttttgatctttgttggtttaaagtctgttttatcagagactaggattgcaacccctgccttttttgttttccatntgcttagtagatcttcctccatcccttaattttgagcctatgtgtgtctctgcatgtgagatgggcttcctgaatacagcacactgatgggtcttgactctttatccaatttgccagtctgtgtcttttaattggagcatttagcccatttacatttaaggttaatattgttatgtgtgaatttgatcctgtcattatgatgttagctggttattttgctcgttagttgatgcagtttcttcctagcctcgacggtctttataatttggcatgattttgcagtggctggtaccggttgttcctttccatgtttattgcttccttcaggagctcttgtaggacaggcctggtggtgacaaaatctctcagcatttgcttgtctgtaaaggattttatttctccttcacttatgaagcttagtttggctggatgtgaaattctgggttgaaaattcttttctttaagaatgttgaatattgccccccactctcttctggtttgtagagtttctgctgagagatgagctgttagtctgatgggcttccctttgtaggtaacccgacctttctctctggctgcccttaacattttttccttcatttcaactttgatgaatctgacaattatgtgtcttggagttgctcttctcgaggagtatctttgtggcattctctgtatttcctgagtttgaatgttggcctgccttgctagattggggaagttctcctggataatatactgcagagtgttttccagcttggttccattctccccgtcactttcaggtacatcaatcagacgtagatttggtcttttcacatagtcccatgtttcttggaggctttgttcatttctttttattcttttttctctaaacttctcttctcacttcatttcattcatttgatcttccatcactgataccctttcttccagttgatcgaatcggctactgaggcttgtgcattcgtcatgtagttgtcgtgccttggttttcagctccatcaggtcctttaaggacttctctgcattggttattctagttagtcattcgtctaattttttttcaaggtttttaacttctttgccttgggttcaaacttcctcctttagctcggagtagtttgatcttctgaagtcttcttctctcaactcgtcaaagtcattttccgtccagctttgttccattgctggtgaggagctgcattgctttggaggaggagaggtgctctgatttttagagtttccagtttttctgctctgtttcttccccatctttgtggttttatctaccttttgtctttgatgatgatgatgtacagatggggttttggtgtggatgtccttcctgtttgttagttttccttctaacagacaggaccctcagctgcaggtctgttggagttcgctggaggtccactccagaccctgtttgcctgggtatcagcagcagaggctgcagaacagcggatattggtgcacagcaaatgttgctgcccgatcattcttctggaagttttgtctcagaggagtacccggctgtgtgagatgtcagtctgcccctactgggaggtgcctcccagttaggctactcgggggtcagggacccacttgaggaggcagtctgccagttctcagatctccagctgcgagctgggagaaccactactctatccaaagctgtcagacagggacatttaagtctgcagaggattctgctgccttttgtttggctatgccctgcccctagagctagagtctacagagacaggcaggcttccttgagctgcggtgggctccacccagttcgagcttcctggccgctttgtttacctactcaagcctcagcaatgtcgggcgcccctcccacagcctcgctgccgccttgcagtttgatctcagacttctgtgctagcaaagagcaaggctccatgggcgtaggaccctccaagccaggtgcgggatataatctcctggtgtgctgtttgctaagggtgtttgaaaagtgcagtgttagggtgggagtgacccgattttccaggtgctgtctgtcacccctttctttgactaggaaagggaattccctgaccctttgtgcttcccgggtgaggcgatgccttgccctgcttcggctcacgctcggtgcgctgcacccactgtcctgcacccactttccgacactccccagtgagatgaacctcgtacctcagttggaaatgcagaaatcacccgtcttctgcgttgctcatgcagggagttgtagactggagctgttcctatttggccatcttggctccacccctatttatttttattatttatttattttttgagacggagtcttgctctgtcgcccatgctggagtgcagtggcacaatctcagctcactgcaagctctgcctcctgggctcacgccattctcctgcctcagcctcccaagtagctaggactacagtcacctgccaccacccctggctaatttttttttgtatttttagtagagacggggtttcactgtgttagccactgtgtggatctcctgacctcgtgatccacccgcctctgcctcccaaagtgctgggattacaggcatgagtcaccgcgcttggccttattttatttatttttattacatgtcagcttatgctacctactagtggctttggcttggacctaccaggctgatggggaaaatgacattaaaagggggtgtttctggtttcacagtttaagagcaatttctaccatgctggatttggctatatatttaagtgagaacaaaaaaggtagttgcctaaagtaataaaggacaaagattttaaatagaaaattatcttgggaagtaatggaagaattgcaagagaatcaatgaaattagaagtgacaagcctccaatttttgctgttgataattatgatctgaatgttttaaagtgagcgttatcacactttaaaagtaccagaaggaatgcagtgagccatttatatctactgcttgtacccttcctgactttgaaaagcaagtgctcagtgtttcaaagagttgatctcagtgattgtgttttctgaagattatctatgtgtactctttgattcaagggaatgggatttgagaaagtggggagtgttgggatgacatattttgaaagctatgagttaatatatgcattaaatatattaagtcagttgtattagcatatatgattcagttttcagcgacagctctgtttcctccttcctatggcaacacataacacagtgacaggcaagtatcatgagtatccaggaatta

SEQ ID NO: 10531 - DNA, 11057 bp, Homo sapiens
catggtgtatatgtgccacattttcttaatccagtctatcattgttggacatttgggttggttccaagtctttgctattgtgaataatgccacaataaacgtacgtgtgcatgtgtctttatagcagcatgatttatagtcctttgggtatatacccagtaatgggatggctgggtcaaatggtatttctagttctagatccctgaggaattgccacactgacttccacaatggttgaactagtttacagtcccaccaacagtgtaaaagtgttcctatttctccacatcctctccagcacctgttgtttcctgactttttaatgattgccattctaactggtgtgagatggtatctcattgtggttttgatttgcatttctctgatggccagtgatgatgagcattttttcatgtgttttttggctgcataaatatcttcttttgagaagtgtctgttcatgtccttcacccactttttgatggggttgtttgtttttttcttgtaaatttgtttgagttcattgtagattctggatattagccctttgtcagatgagtaggttgcaaaaattttctcccattttgtaggttgcctgttcactctgatggtagtttcttttgctgtgcagaagctctttagtttaattagatcccatttgtcaattttgtcttttgttgccattgcttttggtgttttagacatgaagtccttgcccatgcctatgtcctgaatggtaatgcctaggttttcttctagggtttttatggttttaggtctaacgtttaagtctttaatccatcttgaattgatttttgtataaggtgtaaggaagggatccagtttcagctttctacatatggctagccagttttcccagcaccatttattaaatagggaatcctttccccattgcttgtttttctcaggtttgtcaaagatcagatagttgtagatatgtggcgttatttctgagggctctgttctgttccattgatctatatctctgttttggtaccagtaccatgctgttttggttactgtagccttgtagtatagtttgaagtcaggtagtgtgatgcctccagctttgttcttttggcttaggattgccttggcgatgcaggctcttttttggttccatatgaactttaaagtagttttttccaattctgtgaagaaaggcattggtagcttgatggggatggcattgaatctgtaaattaccttgggcagtatggccattttcaagatattgattcttcctacccatgagcatggaatgttcttccatttgtttgtatcctcttttatttccttgagcagcggtttgtagttctccttgaagaggtccttcacctcccttgtaagttggattcctaggtattttattctctttgacgcaattgtgaatgggagttcactcatgatttggctctctgtttgtctgttgttggtgtataggaatgcttgtgatttttgcacattgattttgtatcctgagactttgctgaagttgcttatcagcttaaggagattttgggctgagacaatggggttttctagatatacaatcatgtcgtctgcaaacagggacaatttgacttcctcttttcctaattgaataccctttatttccttctcctgcctaattgccctggccagaacttccaacactatgttgaataggagtggtgagagagggcatccctgtcttgtgccagttttcaaagggaatgcttccagtttttgcccattcagtatgatattggctgtgggtttgtcatagatagctcttattattttgaaatacatcccatcaatacctaatttattgagagtttttagcatgaagggttgttgaattttgtgaaaggctttttctgcatctattgagataatcatgtggtttttgttttggctcttgtttatatgctggattacatttattgatttgcgtatattgaaccagccttgcatcccagggatgaagcccacttgatcatggtggataagctttttgatgtgctgctggattcgttttgccagtattttattgaggatttttgcatcaatgttcatcaaggatattggtctaaaattctctttttttgttgtgtctctgcctggctttggtatcagaatgatgctggcctcataaaatgagttagggaggattccctctttttctgttgattggaatagtttcagaaggaatggtaccagttcctccttgtacctctgatagaattcggctgtgaatccatctggtcctggactctttttggttggtaaactattgattattgccacaatttcagctcctgttattggtctattcagagattcaacttcttcctggtttagtcttgggaaagtgtatgtgtcaaggaatttatccatttcttctagattttctagtttatttgcgtagaggtgtttgtagtattctctgatggtagtttgtatttctgtgggatcggtggtgatatcccctttatcattttttattgcgtctatttgattcttctctctttttttctttattagtcttgctagcagtctatcaattttgttgatcctttcaaaaaaccagctcctggattcattaattttttgaagtgattttgtgtctctattgcctctttttttttttttcttgagatggagttttgctcttgttgcccaggctggagtgcagtggtgcaatctcagctcactgcaacctccttttcccaggttcaagagattctgcctcagctcactgcaacctccttttcccaggttcaagcggttctcttgcctcagcctcccaagcagctgggaatacaagtgcccgccaccacacccggctaatttgagcatctttcttttttcttttttttaaagagatggagtctcgctgtcgcccaggctggagtgcagtggtcccatctcagctcacctcaacctctgccttccaggttcaagcaattctcctgcctcagcctcctgagtagctgggactacaggtgcacatcaccacactcagctattttttttttttttttttttgtattttagtagagatggggtttcaccatgttgctgaggctggtctcgaactcctgagctctggtaagctgcctgcctcggcctcccaaagtgctaggattacaggcgtgagccactgcacccggcaatttgagcatctttaattgtccttggctttgctcactttaaatatggaagacgggaaagctaaaaatcatgccaggtcacctgtggaacccaaaatgtccttctttctcttatacttaggacatattttatcttaagtcatatttctcaatgttcttgaaaaaaataaggtgagggtggtttttatttggcatttttaggcatgatgccaaacaccaaagagaaaggcctgaaattgtccacagggactcctgtgagagcctcagtcgctcatcatctctcagcgggagaaaagcggggctttcccgggttattttgaatgtgtgctgcgtgctgaccaaacaggcatggaaggaaagaaaacatgcaggacccttgcaggaaaggcaaggcgaggtggcggctgtctgcccttctgatttcctcttagacctgacatctcattggattccagcagttttcagaagtgccttccaaaagcgcagctcctccttccttcttttaaagtggcagcaacatgtccttgattaaaactgccattacgttttaattaaaagggttctttcattcacaagtcattttgagtcagtcaaaataatctcatgcaggctcccagagaaacggccccgttgcctggaacattctcccttgggtgccttccctgcgtggccctcttttatttcagcagcacagttacaagtttgtgcctgaatgctttacttcaatcacatcctgttgctgagaatggaatatcctgggtagtcacagagctcaggattcactgaaacctaacaccatcctgaggcaagaggaagcctcaggaaacaaatagatgagagagaaattgttttcttatttcattgtgtctacatgttgagactttctgatcgggtacctgtgtgagagggacatgaggcttgtatgaatctgctctgttatctcttttgaaagaacaaaatgtcctgctactacgtccaaagcaatgattaaacctagagcaagaccgtggtggggcagccagccacatttggcagagcatttcgttagcaacagaggaggaaaaaggtaacggtgagcagtaggaaatggctcagagaccagtcaaggggaagcacctaccacccaccacctggccttcttcctgaagaagccccacctccagagtggctcctccacccccacccaggctttgtggcaaagggaagggcccaggccttgcccagcagcttctgtgggggctggcagtggggccagggtctgctgtcctgaagtaattctcagtcttattcccaatttcagctgcttgtttcagctcgtgaagccacctcattagtgtgttgacaacacgtattcttaatgatctttcgtgaaaagatattcagaaaggctaaatgtgaaaaacaattcatacttgttcagctcttgatttccaatgcttgatggaggtgagtatggcagttttcagcagtgtggctgtgaatatcaccagagatcacctgttctgtttggaaggggattttcagtggtgtctcgaccaggcttggtctctgtgtccccgtgggagtcctaactgctacactagccagctggactgacacaaacccaggctctgggccttgtctgctcactgtgtttataccgagctgccgtgcctggccctgcttcactctcaccatcaggcaatgccttagtacctatttgttggccttaatccaaagcattttcatttttcagaaagcacgactctggtataaagtttcttctttctctctgcttcgcaagtctcgtaattcacatgttgaagccttaccgtccagtgtgatagtatttgagggttcagcctttttttttccttatttatttattattatactttaagttttagggtacatgtgcacattgtgcaggttagttacatatgtatacatgtgccatgctggtgtgctgcacccactaactcgtcatctagcattaggtatatctcccaatgctatccctcccccctccccccaccccacaacagtccccagagtgtgatgttccccttcctgtgtccatgtgatctcattgttcaattcccacctatgagtgagaatatgcggtgtttggttttttgttcttgcgatagtttactgagaatgatggtttccaatttcatccatgtccctacaaagggcatgaactcatcattttttatggctgcatagtattgcatggtgtatatgtgccacattttcttaatccagtctatcactgttggacatttgggttggttccaagtctttgctattgtgaataatgccgcaataaacatacgtgtgcatgtgtctttatagcagcatgatttatagtcctttgggtatatacccagtaatgggatggctgggtcaaatggtatttctagttctagatccctgaggaatcgccacactgacttccacaatggttgaactagtttacagtcccaccaacagtgtaaaagtgttcctatttctccacatcctctccagcacctgttgtttcctgactttttaatgatcaccattctaaccggtgtgagatggtatctcattgtggttttgatttgcatttctctgatggccagtgatggtgagcattttttcatgtgttttttggctgcataaatgtcttcttttgagaagtgtctgttcatgtccttcacccactttttgatggggttgtttgtttttttcttgtaaatttgtttgagttcattgtagattctggatattagccctttgtcagatgagtaggttgcaaaaattttctcccattttgtaggttgcctgttcactctgatagtagtttcttttgctgtgcagaagctctttagtttaattagatcccatttgtcaattttgtcttttgttgccattgcttttggtgttttagacatgaagtccttgcccatgcctatgtcctgaatggtaatgcctaggttttcttctagggtttttatggttttaggtctaacatttaagtatttaatccatcttgaattgatttttgtataaggtgtaaggaagggatccagtttcagctttctacatatggctagccagttttcccagcaccatttattaaatagggaatcctttccccattgcttgtttttctcaggtttgtcaaagatcagatagttgtagatatgcggcgttatttctgagggctctgttctgttccattgatctatatctctgttttggtaccagtaccatgctgttttggttactgtagccttgtaatatagtttgaagtcaggtagtgtgatgcctccagctttgttcttttggcttaggattgccttggcgatgcaggctcttttttggttccatatgaactttaaagtagttttttccaattctgtgaagaaaggcattggtagcttgatggggatggcattgaatctgtaaattaccttgggcagtatggccattttcacaatattgattcttcctacccatgagcatggaatgttcttccatttgtttgtatcctcttttatttccttgagcagcggtttgtagttcttgaagaggtccttcacatcccttgtaagttggattcctaggtattttattctctttgaagcaattgtgaatgggagttcactcatgatttggctctctgtttgtctgttgttggtgtataggaatgcttgtgatttttgcacattgattttgtatcctgagactttgctgaagttgcttatcagcttaaggagattttgggctgagacaatggggttttctagatatacaatcatgtcgtctgcaaacagggacaatttgacttcctcttttcctaattgaataccctttatttccttctcctgcctaattgccctggccagaacttccaacactatgttgaataggagtggtgagagagggcatccctgtcttgtgccagttttcaaagggaatgcttccagtttttgcccattcagtatgatattagctgtgggtctgtcatagatagctcttattattttgaaatatgtcccatcaatacctaatttattgagagtttttagcatgaaaggttgttgaattttgtcaaaggccttttctgcatctattgagataatcatgtggtttttgtctttggctctgtttatatgctggattacatttattgatttgcgtatattgaaccagccttgcatcccagggatgaagcccacttgatcatggtggataagctttttgatgtgctgctggatttggtttgccagtattttattgaggatttttgcatcaatgttcatcaaggatattggtctaaaattctcttttttggttgtgtctctgcccgactttggtatcagaatgatgctggcctcataaaatgagttagggaggattccctctttttctattgattggaatagtttcagaaggaatggtaccagttccttcttgtacctctggtagaatttggctgtgaatccatctggtcctggactctttttggttggtaagctattgattattgccacaatttcagctcctgttattggtgtattcagagattcaacttcttcctggtttagtcttgggagagtttatgtgtcaaggaatttatccatttcttctagattttctagtttatttgcgtagaggtgtttgtagtattctctgatggtagtttgtatttctgtgggatcggtggtgatatcccctttatcattttttattgcgtctatttgattcttctctctttttttctttattagtcttgctagcggtctatcaattttgttgatcctttcaaaaaaccagctcctggattcattaattttttgaagggttttttgtgtctctatttccttcagttctgctctgattttagttatttcttgccttctgctagcttttgaatgtgtttgctcttgcttttctagttcttttaattgtgatgttagggtgtcaattttggatctttcctgctttctcttgtgggcatttagtgctataaatttccctctacacactgctttgaatgcgtcccagagattctggtatgttgtgtctttattctcgttggtttcaaagaacatcttcatttctgccttcatttcgttatgtacccagtagtcattcaggagcaggttgttcagtttccatgtagttgagcagttttgagtgagattcttaatcctgagttctagtttgattgcactgtggtctgagagatagtttgttataatttctgttcttttacatttgctgaggagagctttacttccaagtatgtggtcaattttggaataggtgtggtgtagtgctgaaaaaaatgtatattctgttgatttggggtggagagttctgtagatgtctattaggtccacttggtgcagagctgagttcaattcctgggtatccttgttgactttctgtctcgttgatctgtctaatgttgacagtgggatgttaaagtctcccattattaatgtgtgggagtctaagtctctttgtaggtcactcaggacttgctttatgaatctgggtgctcctgtattgggtgcatatatatttaggatagttagctcttcttgttgaattgatccctttaccattatgtaatgctttgtctcttttgatctttgttggtttaaagtctgttttatcagagactaggattgcaacccctgcctttttttgttttccatttgcttggtagatcttcctccatccttttattttgagcctatgtgtgtctctgcacgtgagatgggattcctgaatacagcacactgatgggtcttgactctttatccaatttgccagtctgtgtcttttaattggagcatttagtccatttacatttaaagttaatagtgttatgtgtgaatttgaccctgtcattatgatgttagctggttattttgctcgttagttgatgcagtttcttcctagtcccgatggtctttacattttggcatgattttgcagcggttggtaccagttgttcctttccatgtttagcgcttccttcaggagctcttttagggcaggcctggtgtgacaaaatctctcagcatttgcttgtctgtaaagtattttatttctccttcacttatgaagcttagtttggctggatatgaaattctgggttgaaaattcttttctttaagaatgttgaatattggcccccactctcttctggcttgtagggtttctgccgagagatccgctgttagtctgatgggcttccctttgaaggtaacccgacctttctctctgcctgcccttaacattttttccttcatttcaacttcggtgaatctgacaattatgtgtcttggagttgctcttctcgaggagtatctttgtggcgttctctgtatttcctgaatctgaacgttggcctcccttgctagattggggaaattctcctggataatatcctgcagagtgttttccaacttggttccactctccccatcactttcaggtacaccaatcagacgtagatttggtcttttcacatagtcccatatttcttggaggctttgctcatttctttttattcttttttctctaaactttccttctcacttcatttcattcatttcatcttccattgctgataccctttcttccagttgatcgcatcggctcctgaggcttctgcattcttcacgtagttctcgagccttggttttcagctccatcagctcctttaagcacttctctgtattggttattctagttatacattcttctaaattttttttcaaagttttcaacttctttgcctttggtttgagtgtcctcccgtagctcagagtaatttgatcgtctgaagccttcttctctcagctcgtcaaagtcattctccgtccacctttgttccgttgctggtgaggagctgcgttcctttggaggaggagaggtgctctgatttttagagtttccagtttttctgttctgttttttccccatctttgtggttttatctacttttggtctttgatgatggtgatgtacagatgggtttttggtgtggatgtcctttctgtttgttagttttccttctaacagacaggaccctcagctgcaggtctgttggagtaccctgcagtgtgaggtgtcagtgtgcccctgctggagggtgcctcccagttaggctgctcgggggtcaggggtcagggacccacttgaggaggcagtctgcctgttctcagatctccagctgcgtcctgggagaaccactgctctcttcaaagctgtcagacagggacatttaagtctgcagaggttactgctgtcttttagtttgtctgtgccctgcccccagaggtggagcctacagaggcaggcaggcctccttgagctgtggtgggctccacccagttcgagcttcccggctgctttgtttacctaagcaagcctgggcaatggcgggcgcccctcccccagcctcgctgccgccttgcagtttgatctcagactgctgtgctagcaatcagggagactccgtggggtaggaccctccaagccaggtgcgggatataatctcgtggtgcgccattttttaagcccgtcggaaaagcgcagtattcgggtgggagtgacccgattttccaggtgctgtccgtcacccctttctttgactcagaaagggaactccctgaccccttgcgcttcccaggtgaggcaatgcctcgccctgcttcggctcgcgcacggtgcacgcacccactgacctgcgccgactgtctggcactccctagtgagatgaacctggtacctcagatggaaatgcagaaatcacccgtcttctgcgtcactcaggctgggagctgtagaccggagctgttcctattcggccatcttggctcctccctc

SEQ ID NO: 10532 - DNA, 24452 bp, Homo sapiens
attcttttatccgtaaacttcttttttttttttttttttttattatactctaagttttagggtacatgtgcacattgtgcaggttagttacatatgtatacatgtgccatgctggtgcgctgcacccactaatgtgtcatctagcattaggtatatctcccaatgctatccctcccccctcccccgaccccaccacagtccccagagtgtgatattccccttcctgtgtccatgtgatctcattgttcagttcccacctatgagtgagaatatgcggtgtttggttttttgttcttgcgatagtttactgagaatgatggtttccaatttcatccatgtccctacaaaggatatgaactcatcattttttatggctgcatagtattccatggtgtatatatgccacattttcttaatccagtctatcattgttggacatttgggttggttccaagtctttgctattgtgaatagtgccgcaataaacatacgtgtgcatgtgtctttatagcagcatgatttatactcatttgggtatatacccagtaatgggatggctgggtcaaatggtatttctagttctagatccctgaggaatcgccacactgacttccacaatggttgaactagtttacagtcccaccaacagtgtaaaagtgttcctatttctccgcatcctctccagcacctgttgtttcctgactttttaatgattgccattctaactggtgtgagatgatatctcatagtggttttgatttgcatttctctgatggccagtgatgatgagcatttcttcatgtgttttttggctgcataaatgtcttcttttgagaagtctctgttcatgtccttcgcccactttttgatggggttgtttgtttttttcttgtaaatttgtttgagttcattgtagattctggatattagccctttgtcagatgagtaggttgcgaaaattttctcccatgttgtaggttgcctgttcactctgatggtagtttcttttgctgtgcagaagctctttagtttaatgagatcccatttgtcaattttggcttttgttgccattgcttttggtgttttggacatgaagtccttgcccacgcctatgtcctgaatggtaatgcctaggttttcttctagggtttttatggttttaggtttaacgtttaaatctttaatccatcttgaattgatttttgtataaggtgtaaggaagggatccagtttcagctttctacatatggctagccagttttcccagcaccatttattaaatagggaatcctttccccattgcttgtttttctcaggtttgtcaaagatcagatagttgtagatatgcggcattatttctgagggctctgttctgttccattgatctatatctctgttttggtaccagtaccatgctgttttggttactgtagccttgtagtatagtttgaagtcaggtagtgtgatgcctccagctttgttcttttggcttaggattgacttggcgatgcgggctcttttttggttccatatgaactttaaagtagttttttccaattctgtgaagaaagtcattggtagcttgatggggatggcattgaatctgtaaattaccttgggcagtatggccattttcacgatattgattcttcctacccatgagcatggaatgttcttccatttgtttgtgtcctcttttatttccttgagcagtggtttgtagttctccttgaagaggtccttcacatcccttataagttggattcctaggtattttattctctttgaagcaattgtgaatgggagttcacccatgatttggctctctgtttgtctgttgttggtgtataagaatgcttgtgatttttgtacattgattttgtatcctgagactttgctgaagttgcttatcagcttaaggagattttgggctgagacgatggggttttctagataaacaatcatgtcgtctgcaaacagggacaatttgacttcctcttttcctaattgaataccctttatttccttctcctgcctgattgccctggccagaacttccaatactatgttgaataggagcggtgagagagggcatccctgtcttgtgccagttttcaaagggaatgcttccagtttttgcccattcagtatgatattggctgtgggtttgtcatagatagctcttattattttgaaatacgtcccatcaatacctaatttattgagagtttttagcatgaagggttgttgaattttgtcaaaggctttttctgcatctattgagataatcatgtggtttttgtctttggctctgtttatatgctggattacatttattgatttgcgtatattgaaccagccttgcatcccagggatgaagcccacttgatcatggtggataagctttttgatgtgctgctggattcggtttgccagtattttattgaggatttttgcatcaatgttcatcaaggatattggtctaaaattctcttttttggttgtgtctctgcccggctttggtatcagaatgatgctggcctcataaaatgagttagggaggattccctctttttctattgattggaatagtttcagaaggaatggtaccagttcctccttgtacctctggtagaattcggctgtgaatccatctggtcctggactctttttggttggtaaactattgattattgccacaatttcagagcctgttattggtctattcagagattcaacttcttcctggtttagtcttgggagagtgtatgtgtcgaggaatgtatccatttcttctagattttctagtttatttgcgtagaggtgtttgtagtattctctgatggtagtttgtatttctgtgggatcggtggtgatatcccctttatcattttttattgtgtctatttgattcttctctctttttttctttattagtcttgctagcggtctatcaattttgttgatcctttgaaaaaaccagctcctggattcattgattttttgaagggttttttgtgtctctatttccttcagttctgctctgattttagttatttcttgccttctgctagcttttgaatgtgtttgctcttgcttttctagttcttttaattgtgatgttaggtgtcaattttggatctttcctgctttctcttgtaggcatttagtgctataaatttccctctacacactgctttgaatgcgtcccagagattctggtatgtggtgtctttgttctcattggtttcaaagaacatctttatttctgccttcatttcgttatgtacccagtagtcattcaggagcaggttgttcagtttccatgtagttgagtggctttgagtgagattcttaatcctgagttctagtttgattgcactgtggtctgagagatagtttgttataatttctgttcttttacatttgctgaggagagctttacttccaactatgtggtcaattttggaataggtgtggtgtggtgctgaaaaaaatgtatattctgttgatttggggtggagagttctgtagatgtctattaggtctgcttggtgcagagctgagttcaattcctgggtatccttgttgactttctgtctcgttgatctgtctaatgttgacagtggggtgttaaagtctcccattattaatgtgtgggagtctaagtctctttgtaggtcactgaggacttgctttatgaatctgggtgctcctgtattgggtgcataaatatttaggatagttagctcctcttgttgaattgatccctttaccattatgtaatggccttctttgtctcttttgatctttgttgatttaaagtctgttttatcagagactaggattgcagcccctgcctttttttgttttccattggcttggtagatcttcctccatccttttattttgagcctatgtgtgtctctgcacgtgagatgggtttcctgaatacagcacactgatgggtcttgactctatccaacttgccagtctgtgtcttttaattgcagaatttagtccatttatatttaaagttaatattgttatgtgtgaatttgatcctgtcattatgatgttagctggtgattttgctcattagttgatgcagtttcttcctagtctcgatggtctttacattttggcatgattttgcagtggctggtaccggttgttcctttccatgtttagcgcttccttcaggagctcttttagggcaggcctggtggtgacaaaatctctcagcatttgcttgtctataaagtattttatttctccttcacttatgaagcttagtttggctggatatgaaattctgggttgaaaattcttttctttaagaatgttgaatattggcccccactctcttctggcttgtagggtttctgccgagagatccgctgttagtctgatgggctttcctttgagggtaacctgacctttctctctggctgcccttaacattttttccttcatttcaactttggtgaatctgacaattatgtgtcttggagttgctcttctcgaggagtatctttgtggcgttctctgtatttcctgaatctgaacgttggcctgccttgctagattggggaagttctcctggataatatcctgcagagtgttttccaacttggttccattctccacatcactttcaggtacaccaatcagacgtagatttggtcttttcacatagtcccatatttcttggaggctttgctcatttctttttattcttttttctctaaacttcccttctcgcttcatttcattcatttcatcttccattgctgataccctttcttccagttgatcgcatcggctcctgaggcttctgcattcttcacgtagttctcgagccttggttttcagctccatcagctcctttaagcacttctctgtattggttattctagttatacattcttctaaatttttttcaaagttttgaacttctttgcctttggtttgaatgtcctcccgtagctcagagtaatttgatcgtctgaagccttcttctctcagctcgtcaaaatcattctccatccagctttgttctgttgctggtgaggaactgcgttcctttggaggaggagaggcgctctgcgttttagagtttccagtttttctgttctgttttttccccatctttgtggttttatctacttttggtctttgatgatggtgatgtacagatgggttttcggtgtagatgtcctttctggttgttagttttccttctaacagacaggaccctcagctgcaggtctgttggaataccctgctgtgtgaggtgtcagtgtgcccctgcttgggggtgcctcccagttaggctgctcgggggtcaggggtcagggactcacttgaggaggcagtctgcccgttctcagatctccagctgcgtgctgggagaaccactgctctcttcaaagctgtcagacagggacacttaagtctgcagaggttactgctgtctttttgtttgtctgtgccctgcccccagaggtggagcctacagaggcaggcaggcctccttgagctgtggtgggctccacccagttcgagcttcctggctgctttgtttacctaatcaagcctgggcaatggccggcgcccctcccccagcctcgttgctgccttgtagtttgatctcagactgctgtgctagcaatcagcgagactccgtgggcgtaggaccctctgagccaggtgtgggatataatctcatggtgcgccgtttcttaagccggtctgaaaagcgcaatattcgggtgggagtgacccgattttccaggtgcgtctgtcacccctttctttgactcggaaagggaactccctgaccccttgcgcttcccaggtgaggcaatgcctcgccctgcttcggctcgcgcacggtgcgcacacacactggcctgcgcccactgtctggcactccctagtgagatgaacccggtaaggtacctcagatggaaatgcagaaatcacccgtcttctgcgtcgctcacgctgggagctgtagaccggagctgttcctattcggccatcttggctcctcctcctggtcttgaactcttgacttcaggtgatctacccccctcggcctcccaaagtgctgggattacaggcgtaagccaccatgcctggctaatttatattttccctctattttgcttggacagattgactaaacatttatcaattttatcagtcttttcaaaaaattagcttttggttttattggttttctctgttgtttttcttttcagcttctttgatttatgcactttatcattctcttccttttgctttttggaggatataatttactctttttctagttgtgctttttgtttgttttttaagagatggtgtctcattttattgcctaggctggagtacaagtgtgatcatagctcactgctgcttcaaacttttaggctcaagggatcttcctgtctcagcctcccaagtagctgggactacaggtatacaccactgtgcctggctaatttttttattttttgtagaattgggtctcactgtcttgcccaggctggtttcaagctcctgggctcaagcagccctcccatcttgatctcccagagtgctgggattataggtgtgagccaccatgcccagcctattccagtttttaaggtgaaagtttaaataattgatttgagatatttctttttttttttgagatagaattttgttcttattgcccaggctggagtgcaatggcacgatctcggctcactgcaacctccatctcctgggttcaagcgattctcctgcctcagcctcccgtgtagctgggattacaggcatgtgccaccatgcctggctaattttgtatttttaggagacacggggtttctccatgttggtcaggatggttgagatatttcttttttaaaaaaataaaagcatgtctcagtttccctttatcagtttccctctaaatattgcattagcagaatcccacagattttgctgttttcatttccattttattaaaatattttctaatttcccttataattttatctttgattcatgtgatttagaaatttttgtttaatatccagatattaggtcaggaagagactttgtctggtttcatctttaaaagttgctaaggtttgttccatagcccagaaggtcttttaatgttctatgtgcactaacagaatgtgtacttggctataattgggcagagtgttgttttttatttttatgttttttgagacaaggtcttactttgtttcccaggctggaatgcagtggcacaaacatggtttgctgcagccttaacctcctgggctcaagcgtaagtagcctaggtagctgggactacaggtgcatgccaccaaacccacctgatttttgtattttttttgtagagacagggttttgccctgttgcccaagctggtctcgaactcttgggctcaagcaattctcccatcttggcctctcaaagtgctgggattacagacatgagccactgcacctggccttattctgcttgttctatttattactcttgatcttagccaaaaggccgagaagcgatgtttgttctatttattattgaaaagagaggcactgaagtctacaagtataattatggatttgtatatgtctcctttcaattttatctgtttttgcttcatgtcttttgatgatctgttattagatgcatatatatttaggattgttatctcttctttgggaattgactcttttatcattatgtagttttcttttctttttttttctttctcttttttttgagatggtctgactctgttgcccaggctggagttcaggggcatgatcttggcaaactgcaacctctgcctcccaggctcaagccatcctcccacctcagcctcctgagcagctgggactacaggcacatgctatcatgcccggctaatttttgtattttttttttttgtagagacagggtttcaccatgttgcccaggctggtcttgaactcctgggctcaagcaatctacacacttcagcctcccagagtgctaggattacaggcgtgagccaccatgcccagccagtatttcttatttatttatctaatttttatataaccaatctagctttcttttgattaatgtttccatggtatgtctccatgtttggagtatgtttccatccttttattttcattctattctattctattctatactgtccctaggtattatattctatatttaaagtagttttctggtagacagcatatagttgggttttgtatttgtatttattgttattattattattattatttgagacagagtttcactcttgctgcccggactagagtgcagtggcgcgatcatggctgactgcaacctctgcctcccgggttcaagtgattctcctgcctcagcctcctgagtagctgggattacaggcatgtgccaccacgctcagctaattttgtatttttttttttttttgagacagtgtctcactctgtcgctcaggctggagtgcagtggcgtgatctcggctcactgcaagctccgccttgcaggttcacgccattctcctgcctcagcctcccgaatagctgggactacaggcgcccgccaccatgcccggctaattttttgcatttttagtagagacagggtttcaccgtgttagccaggatggtctcgatctcctgacctcgtgatccgtccacctcggcctcccaaagtgctgggatttcgggcatgagccaccacgcctggcctagttttgtatttttagtagagatgaggtttctccatgttggtcaggctggtctggaatttccgacttcaggtgatccacccgcctcagcctcccaaagtgctgggattacaggcgtgagccatctcgcccggccctgtattttaattttaatccaatatgataatcattgtcatttaattggtgtgtttataccacttaaatgtaatgtaattattgtattggactcacatctgccatcttattatttgttgtctgtcccctcctttattgtagttttcgtttttgtttttttgtgtctctttttcccatcttctttttaattatgtgaaatatttttagagttttattttaattttcctgttgagtatttggcgctatgtcttcttttatttttttttagtgcttttttttttagtgcttgctctaggaattacagtatacatatcaattatttcacagccttcttagagttaatagtttaccacttcaaataaaatgcaaaaaccttataacatagttcactaactcttgccctctgttatagttatcataagtatatatctacacattgaaatctctaccacataatgttattatttttgctatcaacagttttatatatatatttgcacaggtatgatagattatcaggttggattatttttaaactataaaaccaaactctatactgtctataagaaatccactttataaaaggagaaaaatattcttttatatttacccagatactacttttgtttttccttcagttgcgaagttctgagattctctctggtatcatttcccttcagacttaagcatttcttttagagtttttatatttacccatatacttccttaagttttaaagttctgactctctctcttatgcatttttttagaacagttttgctgctgataaatcctcttagttttctgtcatctgagaatgtgtttatttcaccatcttcctgaagggtattttcactggatttatacaaatatacatataaatatttatacaagtataaatatttatacaagtataagtataaatatttatacaagtatgaatatttatacaagtataaatataaatatacaaataatattaagcaaaaaaatgcaaaaatacaagctatatagaagatgcatacaaatttatttcacttacataagttaaacaagtaaaattaaataatgttttatttagctgaatacacatgtatggtaaaaatgtaaagcaaaatgaagaagtgataaacatacaattcaaaatagtggttattcatatccctagaaggaaggcagaagggacacagggaagaggcttaaagatagtggatggtgggtacatggggaataattaatattacatatattttaaactcacaagacagcattcctatgattatagatagttaatattcatttagagttccccacattttgaccatttatgttgtttctcttcctttcctgcatttccttgcttttatctaggattattttccttattgttaagaaactcatttttaggccaggcgcggcacctcacacctgtaatcccaatactttgggaggccgaggtgggccgatcacttgaggtcaggagttcaagaccagcctgatacatgctgaaaccccatctctaccaaaatatgcaaaattagctgggcatggtggtgcacacctgtggtcgcagctactcgggaggctgaggtgggagaatagcttgaacctggggggtggaagttgcagtgagccaaaattgtgctgctgcactccagcctgggtgacagagcaagactctgtttcaaaaaaaaaaaaactaatttttagtagtttttaagtaaagtctgctgtgataaattagttattatttgtctgaaaatatattttgtctttttgtttttaaggacatttgctctggacatagatttctagataagcagttaatttcttttcctactctgaaggttgcataccattgtattctggcttccatcttttctgctgagaagtcaggtgaaatcttagtattgctcttaatgtatctcttctctatttttgagattcctttacattggtttttataaattttactatgagatgtgtgtagttttctttgtacatattcctgcatttgggttcatagtgcttcttgcaccgtggcttgatatcttttaccagttttggaatattcatggacattatactttcagttgtgtcttttgatccattctcctcttcttctaggtctctaattacatgattgttaatgcttttcactgtttctcacacttttatggcatttttgtatcattttatctccccatggttgtactcattcttttcgtctgacatctttgtttgctaatcctttctttatctattaaaacctgttaacaatttttacaaggtaaaagcttttaaaagctgctgttaaactcacctattgagttcttgattttagttagcgtgctttttagttctgaaatttatatttgtttctttttttcatattatagttgtcttatgaaattctcccacttgcctcatattttcttgaagataatggcaattctttaacatccttatctgataactccaaaatctagattacccatggcagagtaatccagagtatgccctgtgtatgggctgcatatggcctgtagcttgtttttgtaaggtctgtgggcaaagaatgttttttatatattaaagattgtaaaaatgagaatatgcaacagaggtggtacatatcctgtaaaacctaatatatttactgtctggccctttatagaaaaagtttgtcagctcctgacttttaggtctgtttctattgtctcttttttctcttggtcttatttctaaatatgcctggaagtagtattttagcattagtgttcacttactacagtttactaagtctagtaaagattttttaaatgaggtgtaacatccacaaagtgtacagtctggtgagttttcagttatgcatgtactcacctagctgtgatatacataaaaatataaaacatttacagcatcccagaagactcctttgaactccctcaaaacatgtattccctgccaggccaggtgcgacggctcacgcctgtaatcccagcactttgggaggccgaggcaggcagatcacgaggtcaggagattgagatcatcctggctaacacggtgaaacctcgtctctactaagaaatacaaaaattagccaggcgtggtggtgggcacctgtagtcccagttactcaggaggctgaggaaggagattcgcttgaaccccggaggtggagcttgcagtgacccaagatcacaccactgcactccagcctgggcgacacagcgagactccatctcagaataaataaataaataaataaataaataaataaataaataaataaataaatgccctgccaaagacagccacttttctgacttttatcaccttagattcattttgcttgttcttaaactttatgtaaatggaattataccatatttcctgttttatgttcagcttttcccagtgttacatctgtggcattcatccatgttattgcacataacagtagtttatcctttttattactgtgtaatattccattgtataagtatttcagtttattccttctgtagttggtagacatctgggttttatctcttatattttagaactataatctatctgaagttgttatatatcaagtttcatgtctttccacaaggatatcccattgacccagggccacttgtcctttccccgctgcattgtggtgtgtctttgttacaaatcaggtggctggctgggcacagtggctcacacctgtaatcctagcactttgggagaccaaggtgggtggatcacaaggtcaggagttcaagaccagcctggccaatatggtgaaaccctgtctctactaaaaatacaaaaattagccaggcatggtggcatatgcctgtaatcccagctacttgggaggctgaggcaggagaattgcttgaacccgggaggtggaggttgcagtgagccaagatcgcatcactgcactccagcctgagcaacagagcaagattccatctcagaaatcaatcaatcaatcaggtggccatttatgtgagcgtctgttctaggatctccattctgtcccattgttctaccatccaccatgtcaatgctaccctgtcacaatgactgagactttttccttactgtattctcacgtagagcccagtagaataattacagggcttggagtcccatttcttcagggaatataggtggttggaattctgacaccagataaatcaaatatgctggaaaaagaattcctattttaggcaaaagctttattggaagtttgcggcatcctttccgcattgttcattgctgttcagagtgttgctgctgtggtgctataaatgctcccagcagctctcaggttttctttccttccagctagcctccccctaacttcccactccagccaaaaaaagatgcactgtataagtctctgatgagggataaaaatcctttaaagtgtattattaatcttgagctttcagcaaaaaaaaaaaaaaaaaaaaaaattagttttgatttgcttctgattctcaggtttttctttatgttggaatgtaatacttctttcaattttattttatcttatttttttgagacagagtcttggtctgtcacccaggctgaagtgcagtggcgcaatctcatctcatttcaacctctgcctcccgggtttgagcgattctcctgccttagcctcccgactagctgggattacaggcatgtgccaccactcagtgctaattttttgtatgtttagtagagatgaggtttcaccatgttggctaggctggttttgaactcctgacctcaagtgatctgcctccctcagcctcccaaagtgctgggattacgggcatgagccactgtgtccagcccccattttatattttagtatttttttctctctctcttttttaccataagcatctgttaaacttttaaatcttccttaattataatattttaaagaatattctaattaaaacaggctaagtacggtggctcatgcctctaatcccagcactttgggaggctgaggcaggcagatcacttcagcccaggagttcaagaccagcctgggcaacatgacaaacctctgtctccaaaagttacaaaaaaaattagcagggtgtggtggtgcatgcttgtagtcccagctacttcggaagcctgaattgggaggatcgcttgagctcggggaggtcaaggctgactgcagtgagccatgattgggcccctgcactccagcctgggcgacagagtgagaccctgtctcctgctttttttttggagatagggtctcgctctgtttcccaggctggagtgcagtgacatgatctcggctcactgcagccttggctcatgcaacctctgcctcccacgttcaagcgattctcctgcctcagcctcctgagttgctgggttgctgggattacaggcatgcgccaccacagccaactaattttttttttttttttttttaagtagagagccagggtttcaccatgttggtctggctggtctcaaactcctgacctcaagtgatccatctgccttggcctcccaatatgctgggattacaggtgtgagccacctcgcccagccaagagtattttaattaaagcaaaagttaaggatattcttgtgtagaacagggattttttttttttaatgtgatgtgtgcttgtcaattcaggttgaatatgaatgggagaagaaatttttattataattagtttttaaatgactcatcttaaaagaaccatttaagccaaaatagtttttaaaggtttaaatgtatcaattaaaatatttttctttttaggaaaaaagaaaaggagattgaagtttgtggagggccgagggcggaggattgaccctggctccaagttcacaaaggcctcagttctttattaaagtcatgagtcaaaacctgcatctagagctacgtcttagagttagtcacatggacgacagttccctgtatctttttctttttcttttcttttttttttttttgagacagaattttgctctttcacccaggctggagtgaagtggcacagtcttagctcactgcaacctctgccccctgtgttcaagcgattctcctgcctcagcgtctggagtagctgggattataggcacctgccactatgcctggctaatttttgtaattttagtagagatggggttttgccatgttggtcaggctgctctcgaactcctgacctgaggttacccacccgcctcggcctcccaaagtggtaggattataggcgtgagccaccgcgcccggctggcccctgtatctttttccttccaaatacacagctgtgtagaaggacagttatctctggtacaccagagtcattgtagcacattttatttactgagagaaatattttgccccagcattcagttgggtgaaaaatcagggaagatctttataaaacagaaatggcataggttttctgggatagttgtagataagaggtatttattcttcctaaataatagatatatggttatcataaggaaatatgatgaaaaattgttcataacagtaacatttattaaaatgcttcctaggtgccaggagttatgacaagttccttatgtaattatctcactgaacaatcacttgttcaagattttggtctgacctgagacctcatgtacttgttcattgtatttccaaaatacactttcaacttttttattgtgtcactaaaatcctgccatttttccattcattgttgctaataatacttctacatttcaacatttagtttcaacatgtatagctcttaaatcttgtaattagcaataatttgccattggaactagaactagcgacatcgtgaggtcaacatgtttttttttttttttttttttgcaaatcctgcccttcaccaaagggcagtccattctttacatggcaaaaatacatggaaatgttttacgtgttataaacaaacatggcagcagcccagctgttggaagaatcttcatttacagaggccacaatgactcggcactctactgcttcttgagacatgggaaagtggcttttgcctggaagaacacgagtggttgcagttttctaacaaatgcttgataagtaacattctcttgagtaacctaatggtaataagttgaaaagagagaattaggccgggcacgatggctcgcacctgtaatcccagcactttgggaggccgaggtgggcggatcacctgaggtcgggagttcgagaccagcctgaccaacatggagaaaccctgtttctactgaaaatacaaaattagctgggtgcggtggcgcatgcctgtaatcccagctgctcgggaggctgaagcaggagaatctcttgaacccaggaggcggaggttgccatgagccaagatcatgccattgcactccagcctgggcaacaagagcaaaactccgtctcaaaaaaaaaaaaaaaaaaaaggaaacagagaattaaagctgataagctgatatttgtattcatctcatataaaatctttcaagcacacctcatgtcttccttctcctttgaccaccccgttctaatgagcatttcccctcctgcctcataggaactgcctcctgagcgtggagcctgccattagcaccaagcacctcccttaccagagcttccagctcttcggctttgacttcatggtcgatgaggagctgaaggtgtggctcattgaggtcaacggtgcccctgcatgtgctcagtaagcctgcacgtcattgtgtttttacaagtgggaagttggttctgcagttgggatagtctgtgggtacaagtgtagtcactttgactgctgtgagggaggatgccacagtgataggagacccttgggaggactctatctggcagggggctttgctgagtcacttcctttcctatttccccgtgtataggccagataggcccagtgtggtagctcatgcttgtaatcccagcactttgggaggccaagacaggtagactgtcaggtagactgtctgagcccaggagttcaagaccagcctgggcagcctggcaaaaccccatctctacaaaaaatacagaaattagtcaggcatggtgctgtgtgcctatagtcccagctgctcgggaggctgaggtgggaggatcacttgagcctgggaggttgaggctgcagtgagccatgactgcaccactgcattgcagcctgggcgacagagagaccctgtctcaaaagtaaaaaatgtaagcagctagcctgtgctcaggtgggtgggagatgccatgagagtgttaaagttcattactgccagagagacccgtatgacaagctgagtaagcaggatcctatgatgtggcgacccagaagttcagagcctcctgaggcaggaaggagtcagagaaggcatcttagacatggggggtctggagctggggtgcaagaaaagagggttccgctgcaccaaaggttggtggggagagtcttccaaaagaggtgcagcgtcctgtgggctctcaccctgtcccgggctctgcaggtctgggagatgcccagaggaacagaagctcctgagaacctgctctccggaacttctgcttctctcgggagaaggctggttgtagcatgagcgtcatggagtcattaaggaggaaggaaggtaagagaggaccttctgtggaaggccttacgtgtcagggaaagtcactcggactcaattctcttgtgctgagggttcttctgaagatcctctttcatgatgtcaagaccctttcgtggttcccatctacatcttgaagaaattgagtgatttttcaaaatgtttaagagaaagtcccgtacctgcaagggacgatgtcaacacaccaaagttgttctttacttagaagctaggcctttgccattgcctgatggttacgacaggcatgattgcatgattccatcttgttcatcagtctctgcagccgataagtgcttatcaggtgctgcctacctggccaggctctgtatgaggccatgggttcacagtggggagcaaagagagacacaggccctacctttcgtggggagagactgtgagcagacagataccaggcagatgtcaattacaagcgaggacaagtgcttcaatggagaacaaaggatgttgaaaggtaacgtaactgagccaagggcccacgatgggaagtgatgttggaactgagatctgaaggccaaacgcaagttagatgggctaagggcggaataaggcagggatccgcaccttccctcaccaaatcaacagtggtgtgcccagtctcacccactgtcctttcctatcaggggtttgtccctccatggtgctctagacctttccctcctcccgctcctgtcttctcatctggcagttaacattgtcacctttttccctctctgatgcataattcttgtcagcatatgcagtcccagcagattttcccaactattcaaaaagatgtcctcccctgatgccacatcctgttccaatgatcacgccttctccagttcccttcacagccaagcttctggagagcagcttctgcacaagctgtcttctattcctctgttcccatccatgttccagtccattccaggctggctcccatcctgattgcctcacagaaactgttctttgcaggtccccagccaagtccttattgccacctccagcagcctctttctgtccccacccccttggacctgtcagcagcattcgaggcaaccgacagcacttgctgagctgctctcctgtcatggctggacacgtggtgctgggcaggcttgcctggtgaggtgtgggcaagctggactccgtcttcttcatccagtgcctctggtcttaggcctgggtgtttgtctcctctctgtgtatgtgatctcatccaacttcatgattttgaaattaccaaattacatcacagcccagagatgcagactagtatctgcacctgccttccctgccagaatgtctcccgtctgcctccagacttacccatcttggtcggtcaccaccccctgctccccccagagactaagctcgaacctgacagtgatcctgcctctgccttcccttcccctcaagtcctgcccatcagggccctgtgggttgtacctctagcctccggagtcctttgccctccatttgcactgtcacccctgcacagggtgtcttccaccatagtgaaggttttggcatggagccttctaactggggtgcacttctgctcttgccccagtgaaatccatcctcccagagcagccagtgtgtaaagtcgacaccagaccatgccattctccagacttgccattgcacctaggacacaaaccagactcctccctccacctccaaggccgctgccttacccacctctccagcttcatcccaagtcaccatttcccttgattgctcttatctgcagtgggcctttgtgctttctgttacctgtgtgtggaatccccaccaccattaccaccaccaccaccagccttaccgtggctggcttcttctttaccaaaacatcttgaggaagctttctctgaacagtcctagctctgattttctctaggcagagcctttgcagtttccttcattgcactaactgccatcagattaactcatcagaagaaactgtctgtgggtgtgtgtgtgtctgtgtgtgtgtgtgtgtgtgtgtatccgccccttcttctttatttctaccctgtcatccattctctgtctgccttctattcattgggtcttggcttagctgccactggaaagtcttcccctgtcactggggagtcttcctctgtcactggggagtcttcctctgtcactggggagtcttcccgtgtcactggggagtcttctccagtgtcccttcaattatgctgagttggtccttttcctgggtagggcctgcccctgtctgtaatgcaaggtggctcttacatgctcttgaaatgcctgccttccctgccagttgtgtgccttgttcacctgcaaggccttccataagtatttgctgagggaatgctttatcttcgtgcaaaggcttctgaagcatctgtatatacagtggcaaccagtttttttttttctttatttttttgacattttgttattattatactttaagttctagggtacatgtgcacaatgtgtaggtttgttacatatgtatacatgtgccatgttggtgtgctgtacccattaactcatcatttacattaggtataactcctaatgttatccttcccccatcccccaaccccacaacaggccctggtgtgtgatgttccccatcctacgtccaagtggtctcattgttcagttcccacctatgagtgagaacatgcagtgttttgttttctatccctgtgatagtttgctcagaatgatggtttccagcttcatccatgtccctacaaaggacatgaactcgtcctttcttatggctgcatagtattccatggtatatatgtgccacattttcttaatccagtctatcattgatggacatttgggttggttccaagtctttgctattgtgaatagtgctacaataaacatacatgtgcatgtgtctttatagcagcatgatttataatcctttgggtatatacccagtaatgggatggctgggtcaaatggtatttctagttctagatcgttgaggaatcgccacactgtcttctgcaatggttgaactagtttacagccccaccaacagtgtaaaagtgttcctatttctccacatcctctccagcacctgttgcttcctgactttttaatgatcaccattctaactggtgtgagatggtatctcattgtggttttgatttgcatttctctgatggccagtgatgagcattttttcatgtgtcttttggctgcataaatgtcttcttttgagaagcgtctgttcatatcctttgcccactttttgatggggttgtttgattttttcttgtaaatttgtttaagttctttgtagattctggatatcagccctttgtcagatgggtagattgtaaaaattttctcccattctgtaggttgcctgtttgctgatggtagtttcttttgctgtgcagaagctctttagtttaattagatcccatttgtcaatttttgcttttgttgccattgcttttggtgttttagacatgaagtcctttcccatgcctatgtcctgaatggtattgcctaggttttcttctagggtttttatggttttacatctaacatttaagtcattaatgcgtcctgaattaatttttgtataaggtgtaaggaagggatccagtttcagctttctatgtatggctagccagttttcccagcaccatttattaaatagggaatcctttcctcatttcttgtttttatcaggtttgtcaaacatcaggtggttgtagatgtgtgacattatttctgagggctctgttctgttccattggtctatatctctgttttggtaccagtaccatgctgttttggttactgtagccttgtagtatagtttgaagtcaggtagggtgatgcctccagctttgttcttttggcttaggattgtcttggcaatgcgggctcttttttggttccatatgaactttaaagtagttttttccaattctgtgaagaaagtcattggtagcttgatggggatggcattgaatctataaattaccttgggtagtatggccattttcacaacattgattcttcctatccatgagcatggaatggtcttccatttgtttgtgtcctcttttatttcgttgagcagcggtttgtagttctccttgaagaggtcctttacatcccttgtaagttggattattggtattttattctctctgaagcagttgtgaatgggagttcactcatgatttggctgtttgtctgttattggtttataggaatgcttgtgatttttgcacatcaattttgtatcctgagactttgctgaagttgcttatcagcttaaggagattttgggctgagatgatggggttttctaaatatacaatcatgtcatcggcaaacagggacaatttgacttccttttttcctaattgaataccctttatttctttctcctgcctgattgccctggccagaacttccaacactatgttgaataggagtggtgagagagggcatccctgtcttgtgccagttttcaaagggaatgcttccagtttttgcccattcagtatgatattggctgtgggtttgtcatagatagctcttattattttgagatatgtcccatcaatacctagtttattgagagtttttagcatgaaggttgttgaattttgtcaaaggccttttctgcatctattgagataatcatgtggtttttgtctttggttctgtttatatgatggattacgtttattgatttgcatatgttgaaccagccttgcatcccagggatgaagcccacttgatcatggtggataagctttttgatgtgctgctggatttagtttgccagtattttgttgaggatttttgcatcgatgttcatcagggatattggtctaaaattgtcttttttttgttgtgtctctgccaggctttggtgtcaggatgatgctggcctcataaaatgagttagggaggagtccctctttttctgttgattggaatagtttcagaaggaatggtaccagctcctctttgtacctctggtagaatttggctgtgaatccatctggtcctggactttttttggttggtaggctattaattattgcctcaatttcagagccagttattggtctattcagggattcaacttcttccttgtttagtcttgggagggtgtatgtgtccaggaatttatccatttcttctagattttctagtttatttgtgtagaggtgtttatagtattttctgatggtagtttgtctttctgtgggatcagtggtgataacccctttatcattttttattgcgtctatttgattcttctctcttttcttctttattagtcttgctagcggtctatcagttttgttgatcttttcaaaaaaccagctcctggattcattgattttttgaagggttttttgtgtctctatctccttcagttctgctctgatcttagttatttcttgccttctgctagcttttgaatgtgtttgctcttgcttctctagttcttttaattgtgaagttagggtatcaattttagatctttcctgctttctcttgtgggcatttagtgctataaatttctgtctacccactgctttaaatgtgtcccagagattctggtatgttgtggctttgttctcattggtttcaaagaacatctttatttctgccttcacttcgttatgtacccagtagttattcaggagcaggttgttctgtttccatgtagttgagcggttttgagtgagtttcttaatcctgatttctagtttgattgcactgtggtctgggagacagtttgttataatttctgttcttttacatttgctgaggagtgctttacttccaattatgtggtcgctttacttccaattatgtggtcaattttggaataagtgagatatgtggtgctgagaaggatgtagattctgttgatttggggtggagagttctgtagatgtctattaggtctgcttggtgcagagctgagttcaattcctggatatccttgttaacttttagtctcattgatctgtctaatgttgacagtgggatgttgaagtctcccactattattgtgtaggagtctaagtctctttgtaagtctctaaggacttgctttatgaatctgggtgcgcctgtattgggtgcatatatatttaggatagttagctcttttgttgaattgatccctttatcattatgtaatggccttctttgtctcttttgatctttgttgatttaaagtctgttttatcagagactaggattgcaacccctgctttttttgttttccatttgcttggtagatcttcttccatcccttttattttgagcctatgtgtgtctctgcacgtgaggtgggtctcctgaatagagcacactgatgggtcttgactgtttatccaatttgccagtctgtgtcttttaattggagcatttagcccatttacacttaaggttaatattgttatatgtgaatttgatcctgtcattatgatgttagctggttattttgcccgttagttgatgcagtttcttcctagcatctatggtctttacagtttggcatgtttttgcagtggctggtaccagttgttcctttccatgtttagtgcttccttcaggagctcttgtaaggcaggcctggtggtgacaaaatttcttagcatttgcttgtctgtagaggattttatttctcctttacttttgaagcttagtttggctggatatgaaattctgggttgaaaattcttttctttaagaatgttgaatattggcccccactctcttctggcttgtagagtttctgccgagagatccgctattagtctgataggcttccctttgtgggtaacccgacctttctctctggctg

SEQ ID NO: 10533 - DNA, 5846 bp, Homo sapiens
ttttctatcccattctcactctctttttttttttttttttttattatactttaagttttagggtacatgtgcacattgtgcaggttagttacatatgtatacatgtgccatgctggtgcgctgcacccactaacgtgtcaactagcattaagtatatctcccaatgttatccctcccccctccccccaccccaccacagtccccagagtgtgatattccccttcctgtgtccatgtgatctcattgttcaattcccacctatgagtgagaatatgcggtgtttggttttttgttcttgcgatagtttactgagaatgatggtttccaatttcatccatgtccctacaaaggacatgaactcgtcattttttatggctgcatagtattccatggtgtatatgtgccacattttcttaatccagtctatcattgttggatatttgggttggttccaagtctttgctattgtgaatagtgccgcaataaacatacgtgtgcatgtgtctttatagcagcatgatttatagtcctttgggtatatacccagtaatgggatggctgggtcaaatggtatttctagttctagatccctgaggaatcgccacactgacttccacaatggttgaactagtttacagtcccaccaacagtgtaaaagtgttcctatttctccacatcctctccagcacctgttgtttcctgactttttaatgattgccattctaactggtgtgagatgatatctcatagtggttttgatttgcatttctctgatggccagtgatgatgagcattttttcatgtgttttttggctgcataaatgtcttcttttgagaagtgtctgttcatgtcctttgcccactttttgatggggttgtttgtttttttcttgtaaatttgtttgagttcattgtagattctggatattagccctttgtcagatgagtaggttgcgaaaattttctcccatgttgtaggttgcctgttcactctgatggtagtttcttttgctgtgcagaagctctttagtttaattagatcccatttgtcaattttggcttttgttgccattgcttttggtgttttggacatgaagtccttgcccacgcctatgtcctgaatggtaatgcctaggttttcttctagggtttttatggttttaggtctaacgtttaaatctttaatccatcttgaattgatttttgtataaggtgtaaggaagggatccagtttcagctttctacatatggctagccagttttcccagcaccatttattaaatagggaatcctttccccattgcttgtttttctcaggtttgtcaaagatcagatagttgtagatatgtggcattatttctgagggctctgttctgttccattgatctatatctctgttttggtaccagtaccatgctgttttggttactgtagccttgtagtatagtttgaagtcaggtagtgtgatgcctccagctttgttcttttggcttaggattgacttggcgatgcgggctcttttttggttccatatgaactttaaagtagttttttccaattctgtgaagaaagtcattggtagcttgatggggatggcattgaatctgtaaattaccttgggcagtatggccattttcacgatattgattcttcctacccatgagcatggaatgttcttccatttgtttgtgtcctcttttatttccttgagcagtggtttgtagttctccttgaagaggtccttcacatcccttgtaagttggattcctaggtattttattctctttgaagcaattgtgaatgggagttcactcatgatttggctctctgtttgtctgttgttggtgtataagaatgcttgtgatttttgtacattgattttgtatcctgagactttgctgaagttgcttatcagcttaaggagattttgggctgagatgatggggttttctagataaacaatcatgtcgtctgcaaacagggacaatttgacttcctcttttcctaattgaataccctttatttccttctcctgcctgattgccctggccagaacttccaacactatgttgaataggagcggtgagagagggcatccctgtcttgtgccagttttcaaagggaatgcttccagtttttgcccattcagtatgatattggctgtgggtttgtcatagatagctcttattattttgaaatacgtcccatcaatacctaatttattgagagtttttagcatgaagcttgttgaattttgtcaaaggctttttctgcatctattgagataatcatgtggtttttgtctttggctctgtttatatgctggattacatttattgatttgcgtatattgaaccagccttgcatcccagggatgaagcccacttgatcatgatggataagctttttgatgtgctgctggattcggtttgccagtattttattgaggatttttgcatcaatgttcatcaaggatattggtctaaaattctcttttttggttgtgtctctgcccggctttggtatcagaatgatgctggcctcataaaatgagttagggaggattccctctttttctattgattggaatagtttcagaaggaatggtaccagttcctccttgtacctctggtagaattcggctgtgaatccatctggtcctggactctttttggttggtaaactattgattattgccacaatttcagagcctcttattggtctattcagagattcaacttcttcctgttttagtcttgggagagtgtatgtgtcgaggaatgtatccatttcttctagattttctagtttatttgcgtagaggtgtttgtagtattctcttatggtagtttgcatttctgtgcgatcagtggtgatatcccctttatcattttttattgtgtctatttgattcttctctctttttttctttattagtcttgctagcggtctatcaattttgttgatcctttcaaaaaaccagctcctggattctttgattttttgaagggttttttgtgtctctatttccttcagttctgctctgattttagttatttcttgccttctgctagcttttgaatgtgtttgctcttgcttttctagttcttttaattgtgatgttagggtgtcaattttggatctttcctgctttctcttgtgggcatttagtgctataaatttccctctacacactgctttgaatgcgtcccagagattctggtatgtggtgtctttgttctcgttggtttcaaagaacatctttatttctgccttcatttcgttatgtacccagtagtcattcaggagcaggttgttcagtttccatgtagttgagcggctttgagtgagattcttaatcctgagttctagtttgattgcactgtggtctgagagatagtttgttataatttctgttcttttacatttgctgaggagagctttacttccaactatgtggtcaattttggaataggtgtggtgtggtgctgaaaaaaatgtatattctgttgatttggggtggagagttctgtagatgtctattaggtctgcttggtgcagagctgagttcaattcctgggtatccttgttgactttctgtctcgttgatctgtctaatgttgacagtggggtgttaaagtctcccattattaatgtgtgggagtctaagtctctttgtaggtcactcaggacttgctttatgaatctgggtgctcctgtattgggtgcataaatatttaggatagttagctcctcttgttgaattgatccctttagcattatgtaatggccttctttgtctcttttgatctttgttggtttaaagtctgttttatcagagactagaattgcaacccctgcctttttttgttttccattggcttggtggatcttcctccatccttttattttgagcctatgtgtgtctctgcacgtgagatgggtttcctgaatacagcacactgatgggtcttgactgtttatccaacttgccagtctgtgtcttttaattgcagaatttagtccatttatatttaaagttaatattgttatgtgtgaatttgatcctgtcattatgatgttagctggtgattttgctcattagttgatgcagtttcttcctagtctcgatggtctttacattttggcatgattttgcagcggctggtaccggttgttcctttccatgtttagcgcttccttcaggagctcttttagggcaggcctggtggtgacaaaatctctcagcatttgcttgtctataaagtattttatttctccttcacttatgaagcttagtttggctggatatgaaattctgggttgaaaattcttttctttaagaatgttgaatattggcccccactctcttctggcttgtagggtttctgccgagagatccgctgttagtctgatgggctttcgtttgagggtaacccgacctttccctctggctgcccttaacattttttccttcatttcaactttggtgaatctgacaattatgtgtcttggagttgctcttctcgaggagtatctttgtggcgttctctgtatttcctgaatctgaacattggcctgccttgctagattggggaagttctcctggataatatcctgcagagtgttttccaacttggttccattctccacatcactttcaggtacaccaatcatacgtagatttggtcttttcacatagtcccatatttcttggaggctttgctcatttctttttattcttttttctctaaacttcccttctcgcttcatttcattcatttcatcttccattgctgataccctttcttccagttgatcgcatcggctcctgaggcttctgcattcttcacgtagttctcgagccttgcttttcagctccatcagctcctttaagcacttctctgtattggttattctagttatacattcttctaaattttttcaaagttttcaacttctttgcctttggtttgaatgtcttcccgtagctcagagtaatttgatcgtctgaagccttcttctctcagctcgtcaaaatcattctccatccagctttgttccgttgctggtgaggaactgtgttcctttggaggaggagaggcgctctgcgttttagagtttccagtttttctgttctgttttttccccatctttgtggttttatctacttttggtctttgatgatggtgatgtacagatgggttttcggtgtagatgtcctttctggttgttagttttccttctaacagacaggaccctcagctgcaggtctgttggaataccctgtgtgaggtgtcagtgtgcccctgctggggggtgcctcccagttaggctgctcgggggtcaggggtcagggacccacttgaggaggcagtctgcccgttctcagatctccagctgcgtgctgggagaaccactgctctcttcaaagctgtcagacagggacacttaagtctgcagaggttactgctgtctgtttgtttgtctgtgccctgcccccagaggtggagcctacagaggcaggcaggcctccttgagttgtggtgggctccacccagttcgagcttccaggctgctttgtttacctaagcaagcctgggcaatggcgggcgcccctcccccagcctcattgccgccttgcagtttgatctcagactgctgtgttagcaatcagcgagattccgtgggcgtaggaccctctgagccaggtgtgggatatagtctcgtggtgcgccgtttcttaagccggtctgaaaagcgcaatattcaggtgggagtgacccgattttccaggtgcgtccgtcacccctttctttgactcggaaagggaactccctgacccc

SEQ ID NO: 10534 - DNA, 4916 bp, Homo sapiens
ttaaaatttttttatttttattatactttaagttctagggtacatgtgcacaacatgcaggtttgttacatatgtatacatgtgccatgttggtgtgctgcacccattaactcatcatttacattaggtttatctcctaatgctaaccctccccccttcccccaccccatgacaggccccggtgtgtggtgtacccccttctgtgtccaagtgttctcattgttcaattcccacctatgagtgagaacatgcggtgtttggttttttgtccttgtgatagtttgcggagaatgatggtttccagcttcatccatgtccctacaaaggacatgaactcatccttttttatggctgcatagtattcgatggtatatatgtgccacattttcttaatccagtctatcattgatggacatttgggttggttccaagtctttgctattgtgaatagtgccgcaataagcatacgtgtgaatgtgtctttatagcagcatgatttataatcctttgggtatatacccagtaatgggatggctgggtcaaatggtatttctaggtctagactcttgaggagtcgccacactgtcttccacaatggttgaactagtttacagtcccaccaacagtgtaaaagtgttcctatttctccacatcctctccagcacctgttgtttcttgactttttaatgatcgccattctaactggtgtgagatggtatctcattgtggttttgatttgcatttctctgatggccagtgatgatgagcattttttcatgtgtctgttgggtgcataaatgtcttcttttgagaagtgtctgttcatgtcctttgcccactttttgatggggttgtttgtttttttcttgtaagtttgtttgagttctttgtagattctgaatattagccctttgtcagatgagtagattgcaaaaattttctcccattctgtaggttacctgttcactctgatggtagtttcttttgctgtgcagaagctctttagtttaattagatcccatttgtcaattttggcttctgttgccattgcttttggtgttttagatgtgaagtccttgcccatgcctatgtcctgaatggtattgcctaggttttcttctagggtttttatggttttaggtctaacatttaagtctttcatccatcttgaattaatttttgtataaggtgtaaggaagggatccagtttcagctttctccgtatggctagccagttttcccagcaccatttattaaatagggaatcctttccccatttcttgtttttgtcaggtttgtcaaagatcagatggttgatgtatggtattatttctgagggctctgttcttttccattggtctatatctctgttttggtaccagtaccatgctgttttggttactacagccttgtagtatagtttgaagtcaggtagtgtgatgcctccagctttgttctttgggcttaggattgtcttggcaatgcgggcccttttttggttccatatgaactttaaagtagtttttttccaattctgtgaagaaagtcattggtagcttgatggggatggcattgaatctataaattaccttgggcagtatggccattttcacaatgttgattcttcctacccgtgagcatggaacgttcttccatttgtttgtgtcctcttttatttcattgagcagtggtttgtagttctctttgaagaggtccttcacatacctaagttggattcctaggtattctgttatctttgcagcaattgtgagttcactcatgatttggctctctgtttgtctgttattggtgtataagaatggttgtgatttttgcacattgattttgtattctgagactttgctgaagttgcttatcagcttaaggagattttagactgagacgatggggttttctaaatatacaatcatgtcatctgcaaacagggacaatttgacttcctcttttcctaattgaataccctttatttctttttcctgcctgattgcgcttgccagaacttccaacactatgttgaataggagtggtgagagaaggcatccctgtcttgtgctggttttcaaagggaatgcttccagtttttgccccttcagcatgatattggctgtgggtttgtcaaaaatagctcttattattttgcaatacatcccatcaatacctaatttattgaaaatttttagcatgaagggctgttgacgtttgtcaaaggccttttctgcatctattgagataatcatgtggcttttgtctttggttctttttatatgctggattacgtttattgatttgcatacattgaaccagccttgcatcccagggatgaagcccacttgatcatggtggataagctttttgatgtgctgctggattctgtttgccagtattttattgaagatttttgcatcaatattcatcagggatattggcctaaaattctctttttttgttgtgtctgccaggctttggtatcaggatgatgctggtctcataaaatgaattagggaggattccctcttttctattgattggaatagtttcagaaggaatggtaccagctcctccttgtacatctggtagaattcagctgtgagtctctctggtcctggactttttttggttggtaggctattaattattgcctcaatttgagagcctgttattggtctgttcagggattcaacttcatcctggtttagtcttgggatggtgtatgtgtccaggaatgtatccatttcttctagattttctagtttatttgcgtagaggtgtttatagtattctctgatggtagtttgtatttctgtgggatcagtggtgatatcccctttctcatgttttatggcatctatatgattcttctctcttttcttctttattagtcttgctagtggtctattaattttttgatcttttcaaaaaaaccagctcctggattcattgattttttttgaagggttttttgtgtctctatctccttcagttctgctctgctcttagttatttcttgtcttctgctagcttttgaatgtgtttgctcttggttctctagttcttttaattgtgatgttagggtgtcaattttagatctttcctgctttctcttgtgggcatttagtgctataaatttccctctacagagtgctttaaatgtgtcccagacattctggtatgttgtgtctttgttctcattggtttcaaagaacatctttagttctgccttcatttcgttatgtacccagtagtcattcaggagcaggttgttcagtttccacatagatgagtggatttgagtgagtttcttaatcctgagttctagtttgattgcactgtggtctgagagacagtttgttataatttctattcttttacatttgctgaggagtgctttacttccaacgatgtggtcaattttggaataagtgtgatgtggtgctgagaagaatgtatattctgttaatttgggatggagagttctgtagatgtctattaggtccactgggtgcagagctgagttcaattcctggatatccttgttaactttctgtcttgttgatctgtctaatgttgacattgtggtgttaaagtctcccattattattgtatgggagtctaagtctctttgtaggtctccaaggacttgctttatgaagctaggtgctcctgtattgggtgcatatatgtgtaggatagttagctcttcttgttgaattgatccctttaccattatgtaatggccttctttgtctcttttgatccttgttggtttaaagtctgttttatcagagactaggattgcaatccctgccttttttgttttccatttgcttggtagatcttcctccatccttttattttgagcctatgtgagtctctgcacgtgagatgggtctcctgaatacagcacactgatgggtctcgactctttatcccatttgacagtctgtatcttttaattggagtatttagcccatttacatttaaggttaatattgttatgtgtgaatttgatcctgtcactttgatgttagctggttattttgctctttagttgatgcagtttcttcctagcctcgatgttctttacaatttggcatgtttttgcagtggctggtaccggttgttcctttccatgtttagtgcttccttcaggagctcttgtagggcaggcctggtggtgacaaaatctctcagcatttgcttgtctataaaggattttatttctccttcacttatgaagcttagttggatatgaaattctgggttgaaaattcttttctttaagaatgttgaatatttgcccctactctcttctggcttgtagagtttctgccaagagatccgctgttagtctgatgggcttccctttgtgggtaacccgacctttctctctggctgcccttaacgttttttccttcatttcaactttggtgaatctgacaattatgtgtcttggagttgctcttctcgaggaatatctttgtggcattctctgtatctcctgaatttgaatgttggcctgccttgctaggttggggaagttctcctggataattcctgcagagtgttttccaacttggttccattctctctgtcactttcaggtacaccaatcagatgtagatctcatctggtcttttcacatagtcccatatttcttggaggctttgttcatttctttttactcttttttctctaaacttctcttctcgcttcatttcgttcatttgattttcaatcactgataccctttcttccagttgattgaattcgctactgaagcttgtgcgttcatcacgtagttcttttgccatgttttttagctccatcaggtcatttaaggacttctctacattggttattctagttatccattcgtctaatcttttttcaaggtt

SEQ ID NO: 10535 - DNA, 5916 bp, Homo sapiens
cattaggtatttctcctaatgctatccctcccctagccccccaccccccgacaggcctggtgtgtgatgttcccctccttgtgtccaggtgttctcattgttcaactcccacttataagtgagaacatgtcatgtttggttttctgttcttgtgatagtttactgagaatggtggtttctggcttcatccatgtccctgcaaaggacatgaactcatccttttttatgactgcatagtattccatggtgtatatgtgccacattttctttatccagtctatcattgatggacatttgggttggttccaaatctgctattgtgagcatgccacaataaacatacgtgtggatgtgtctttatagcagcatgatttataatcctttgggtatatacccagtaatgggattactgagtcagatggtatttctagttctagatccctgaggaatcaccacactgacttccacaatggttgaactagtttacagtcccaccaacagtgtaaaagtgttcctatttctccgcatcctctccagcacctgttgtttcctgactttttaatgattgccattctaactggtgtgagatgatatctcatagtggttttgatttgcatttctctgatggccagtgatgatgagcatttcttcatgtgttttttggctgcataaatgtcttcttttgagaagtgtctgttcatgtccttcgcccactttttgatggggttgtttgtttttttcttgtaaatttgtttgagttcattgtagattctggatattagccctttgtcagatgagtaggttgcgaaaattttctcccatgttgtaggttgcctgttcactctgatggtagtttcttttgctgtgcagaagctctttagtttaattagatcccatttgtcaattttgtcttttgttgccattgcttttggtgttttggacatgaagtccttgcccacgcctatgtcctgaatggtaatgcctaggttttcttctagggtttttatggttttaggtttaacgtttaaatctttaatccatcttgaattgatttttgtataaggtgtaaggaagggatccagtttcagctttctacatatggctagccagttttcccagcaccatttattaaatagggaatcctttccccattgcttgtttttctcaggtttgtcaaagatcagatagttgtagatatgcggcattatttctgagggctctgttctgttccattgatctatatctctgttttggtaccagtaccatgctgttttggttactgtagccttgtagtatagtttgaagtcaggtagtgtgatgcctccagctttgttcttttggcttaggattgacttggcaatgcgggctcttttttggttccatatgaactttaaagtagttttttccaattctgtgaagaaagtcattggtagcttgatggggatggcattgaatctgtaaattaccttgggcagtatggccattttcacgatattgattcttcctacccatgagcatggaatgttcttccatttgtttgtgtcctcttttatttccttgagcagtggtttgtagttctccttgaagaggtccttcacatcccttgtaagttggattcctaggtattttattctctttgaagcaattacgaatgggagttcacccatgatttggctctctgtttgtctgttgttggtgtataagaatgcttgtgatttttgtacattgattttgtatcctgagactttgctgaagttgcttatcagcttaaggagattttgggctgagacgatggggttttctagatatacaatcatgtcgtctgcaaacagggacaatttgacttcctcttttcctaattgaataccctttatttccttctcctgcctgattgccctggccagaacttccaacactatgttgaataggagcggtgagagagggcatccctgtcttgtgccggttttcaaagggaatgcttccagtttttgcccattcagtatgatattggctgtgggtttgtcatagatagctcttattattttgaaatacgtcccatcaatacctaatttattgagagtttttagcatgaagggttgttgaattttgtcaaaggctttttctgcatctattgagataatcatgtggtttttgtcattggctctgtttatatgctggattacatttattgatttgcgtatattgaaccagccttgcatcccagggatgaagcccacttgatcatggtggataagctttttgatgtgctgctggattcggtttgccagtattttattgaggatttttgcatcaatgttcatcaaggatattggtctaaaattctcttttttggttgtgtctctgcccggctttggtatcagaatgatgctggcctcataaaatgagttagggaggattccctctttttctattgattggaatagtttcagaaggaatggtaccagttcctccatgtacctctggtagaattcggctgtgaatccatctggtcctggactctttttggttggtaaactattgattattgccacaatttcagagcctgttattggtctattcagagattcaacttcttcctggtttagtcttgggagagtgtatgtgtcgaggaatgtatccatttcttctagattttctagtttatttgcgtagaggtgtttgtagtattctctgatggtagtttgtatttctgtgggatcggtggtgatatcccctttatcattttttattgtgtctatttgattcttctctctttttttctttattagtcttgctagcggtctatcaattttgttgatcctttcaaaaaaccagctcctggattcattgattttttgaagggttttttgtgtctctatttccttcagttctgctctgattttagttatttcttgccttctgctagcttttgaatgtgtttgctcttgcttttctagttcttttaattgtgatgttagggtgtcaattttggatctttcctgctttctcttgtaggcatttagtgctataaatttccctctacacactgctttgaatgcgtcccagagattctggtatgtggtgtctttgttctcgttggtttcaaagaacatctttatttctgccttcatttcgttatgtacccagtagtcattcaggagcaggttgttcagtttccatgtagttgagcggctttgagtgagattcttaatcctgagttctagtttgattgcactgtggtctgagagatagtttgttataatttctgttcttttacatttgctgaggagagctttacttccaactatgtggtcaattttggaataggtgtggtgtggtgctgaaaaaaaggtatattctgttgatttggggtggagagttctgtagatgtctattaggtctgcttggtgcagagctgagttcaattcctgggtatccttgttgactttctgtctcgttgatctgtctaatgttgacagtggggtgttaaagtctcccattattaatgtgtgggagtctaagtctctttgtaggtcactgaggacttgctttatgaatctgggtgctcctgtattgggtgcataaatatttaggatagttagctcctcttgttgaattgatccctttaccattatgtaatggccttctttgtctcttttgatctttgttggtttaaagtctgttttatcagagactaggattgcaacccctgcctttttttgttttccattggcttggtagatcttcctccatccttttattttgagcctatgtgtgtctctgcacgtgagatgggtttcctgaatacagcacactgatgggtcttgactctttatccaacttgccagtctgtgtcttttaattgcagaatttagtccatttatatttaaagttaatattgttatgtgtgaatttgatcctgtcattatgatgttagctggtgattttgctcattagttgatgcagtttcttcctagtctcgatggtctttacattttggcatgattttgcagcggctggtaccggttgttcctttccatgtttagcgcttccttcaggagctcttttagggcaggcctggtggtgacaaaatctctcaacatttgcttgtctataaagtattttatttctccttcacttatgaagcttagtttggctggatatgaaattctgggttgaaaattcttttctttaagaatgttgaatattggcccccactctcttctggcttgtagggtttctgccgagagatccgctgttagtctgatgggcttccctttgagggtaacccgacctttctctctggctgcccttaacattttttccttcatttcaactttggtgaatctgacaattatgtgtcttggagttgctcttctcgaggagtatctttgtggcgttctctgtatttcctgaatctgaacgttggcctgccttgctagattggggaagttctcctggataatatcctgcagagtgttttccaacttggttccattctccacatcactttcaggtacaccaatcagacgtagatttggtcttttcacatagtcccatatttcttggaggctttgctcatttctttttattcttttttctctaaacttcccttctcgcttcatttcattcatttcatcttccattgctgataccctttcttccagttgatcgcatcggctcctgaggcttctgcattcttcacgtagttctcgagccttggttttcagctccatcagctcctttaagcacttctctgtattggatattctagttatacattcttctaaatttttttcaaagttttcaacttctttgcctttggtttgaatgtcctcccgtagctcagagtaatttgatcgtctgaagccttcttctctcagctcgtcaaaatcattctccatccagctttgttctgttgctggtgaggaactgcgttcctttggaggaggagaggcgctctgcgttttagagtttccagtttttctgttctgttttttccccatctttgtggttttatctacttttggtctttgatgatggtgatgtacagatgggttttcggtgtagatgtcctttctggttgttagttttccttctaacagacaggaccctcagctgcaggtctgttggaataccctgccgtgtgaggtgtcagtgtgcccctgctggggggtgcctcccagttaggctgctcgggggtcaggagtcagggacccacttgaggaggcagtctgtctgcccgttctcagatctccagctgcgtgctgggagaaccactgctctcttcaaagctgtcagacagggacacttaagtctgcagaggttactgctgtctttttgtttgtctgtgccctgcccccagaggtggagcctacagaggcaggcaggcctccttgagctgtggtgggctccacccagttcgagcttcccggctgctttgtttacctaagcaagcctgggcaatggcgggcgcccctcccccagcctcgttgccgccttgcagtttgatctcagactgctgtgctagcaatcagcgagattccgtgggcgtaggaccctccgagccaggtgtgggatatagtctcgtggtgcgccgtttcttaagccggtctgaaaagcgcaatattcgggtgggagtgacccgattttccaggtgcgaccgtcacccctttctttgactcagaaagggaactccctgaccccttgcgcttcccaggtgaggcaatgcctcgccctgcttcggctcgcgcacggtgcgcacacacactggcctgcgcccactgtctggcactccctagtgagatgaacccggtacctcagatggaaatgcagaaatcaccgtcttctgcgtcgctcacgctgggagctgtagaccggagctgttcctattcggccatcttggctcctcccccg

SEQ ID NO: 10536 - DNA, 6029 bp, Homo sapiens
cttttttttttttttattatactttaagttttagggtacatgtgcacattgtgcaggttagttacatatgtatacatttgccatgctggtgcactgcacccactaactcgtcatctagcattacgtatatctcccagtgctatccctcccccctccccccaccccaccacagtccccagagtgtgatattccccttcctgtgtccatgtgatctcattgttcaattcccacctatgagtgagaatatgcggtgtttggttttttgttcttgcgatagtttactgagaatgatgatttccaatttcatccatgtccctacaaaggacatgaactcatcattttttatggctgcatagtattccatggtgtatatgtgccacattttcttaatccagtctatcattgttggacatttgggttggatccaagtctttgctattgtgaataatgccacagtaaacatacgtgtgcatgtgtgtttatagcagcatgatttatggtcctttgggtatatacccagtaatgggatggctgggtcaaatggtatttctagttctagatccctgaggaatcgccacactgacttccacaatggttgaactagtttacagtcccaccaacagtgtaaaagtgttcctatttctccacatcctctccagcacctgttgtttcctgactttttaatgattgccattctacctggtgtgagatggtatctcattgtggttttgatttgcatttgtctgatggccagtgatgatgagcattttttcatgtgttttttggctgcataaatgtcttcttttgagaagtgtctgttcatatccttcgcccactttttgatggggttgtttgtttttttcttgtaaatttgtttgagttcattgcagattctggatattagccctttgtcagatgagtaggttgcgaaaattttctcccattttgtaggttgcccgttcactctgatggtagtttcttttgctgtgcagaagctctttagtttaattagatcccatatgtcaattttgtcttttgttgccattgcttttggtgttttggacatgaagtccttgcccatgcctatgtcctgaatggtactgcctaggttttcttctagggtttttatggttttgggtctaatgtttaagtctttaatccatcttgaattaatttttgtataaggtgtaaggaagggatccagtttcagctttctacatatggctagccagttttcccagcaccatttattaaatagggaatcctttccccattgcttgtttttctcaggtttgtcaaagatcagatagttgtagatatgtggcgttatttctgagggctctgttctgttccattgatctatatctctgttttggtaccagtaccgtgctgttttggttactgtagccttgtagtatagtttgaagtcaggtagtgtgatgcctccagctttgttcttttggcttaggatcgccttggcgatgcgggctcttttttggttccatatgaactttaaagtagttttttccaattctgtgaagaaagtcattggtagctttatggggatggcactgaatctgtaaattaccttgggcagtatggccattttcacgatactgattcttcctacccatgagcatggaatgttcttccatttgtttgtatcctcttttatttccttgagcagtggtttgtagttctccttgaagaggtccttcacatcccttgtaagttggattcctaggtattttattctctttgaagcaattgtgaatgggagttcactcatgatttggctctctgtttgtctgttattggtgtataagaatgcttgtgatttttgtacattgattttgtatcctgagactttgctgaagttgcttatcagcttaaggagattttggtctgagacaatggggttttctagatatacaatcatgtcgtctgcaaacagggacaatttgacttcctcttttcctgattgaataccctttatttccttctcctgcctaattgccctggccagaacttccaacactatgttgaataggagtggtgagagagggcatccctgtcttgtgccagttttcaaagggaatgcttccagtttttgcccattcagtatgatattggctgtgggtttgtcatagatagctcttattattttgaaatatgtcccatcaatacctaatttattgagagtttttagcatgaagggttgttgaattttgtcaaaggctttttctgcatctattgagataatcatgtggtttttgtctttggctctgtttatatgctggattacatttattgatttgcgtatattgaaccagccttgcatcccagggatgaagcccacttgatcatggtggataagctttttgatgtgctgctggattcggtttgccagtattttattgaggatttttgcatcaatgttcatcaaggatattagtctaaaattctcttttttggttgtgtctctgcccggctttggtatcagaatgatgctggcctcataaaatgagttagggaggattccctctttttctattgattggaatagtttcagaaggaatggtaccagttcctccttgtacctctggtaggattcggctgtgaatccatctggtcctggactctttttggttggcaaactattgattattgccacaatttcagctcctgttattggtctattcagagattcaacttcttcctggtttagtcttgggagagtgtatgtgtcgaggaatttatccatttcttctagattttctagtttatttgcgtagaggtgtttgtagtattctctgatggtagtttgtatttctgtgggattggtggcgatatcccctttatcattttttattgtgtctatttgattcttctctctttttttctttattagtcttgctagcggtctatcaattttgttgatcctttcaaaaaaccagctcctggattcattaattttttgaagggttttttgtgtctctatttccttcagttctgctctgattttagttatttcttgccttctgctagcttttgaatgtgtttgctcttgcttttctagttcttttaattgtgatgttagggtgtcaattttggatctttcctgctttctcttgtgggcatttagtgctataaatttccctctacacactgctttgaatgcgtcccagagattctggtatgttgtgtctttgttctcattggtttcaaagaacatctttatttctgccttcatttcgttatgtatccagtagtcattcaggagcaggttgttcagtttccatgtagttgagcggttttgagtgagattcttaatcctgagttctagtttgattgcactgtggtctgagagatagtttgttataatctctgttcttttacatttgctgaggagagctttacttccaagtatgtggtcaattttggaataggtgtggtgtggtgctgaaaaaaatgtatattctgttgatttggggtggagagttctgtagatgtctattaggtccccttggtgcagagctgagttcaattcctgggtatccttgttgactttctgtcttgttgatctgtctaatgttgacagtggggtgatcaattctcccattattaatgtgtgggagtctaagtctctttgtaggtcactcaggacttgctttatgaatctgggtgctcctgtattgggtgcatatatatttaggatagttagctcttcttgttgaattgatccctttaccattatgtaatggccttctttgtctcttttgatctttgttggtttaaagtctgttttatcagagactaggattgcaacccctgcctttttttgttttccctttgcttggtagatcttcctccatccttttattttgagcctatgtgtgtctctgcatgtgagatgggtttcctgaatacagcacactgatgggtcttgactctttatccaatttgccagtctgtgtcttttaattggagcatttagtccatttacatttaaagttaatattgttatgtttgaatttgatcctgtcattatgatgttagctggtgattttgctcgttagttgatgcagtttcttcctagtctcgatggtctttacattttggcatgattttgcagcggctggtactggttgttcctttccatgtttagcgcttccttcaggagctcttttagggcaggcctggtggtgacaaaatgtctcagcatttgcttgtctgtaaagtattttatttctccttcacttatgaagcttagtttggctggatatgaaattctgggttgaaaattcttttctttaagaatgttgaatattggcccccactctcttctggcttgtagggtttctgccgagagatccgctgttagtctgatgggcttccctttgagggtaacccgacctttctctctggctgcccttaacattttttccttcatttcaactttggtgaatctgacaattatgtgtcttggagttgctcttctcgaggagtatctttgtggcgttctctgtatttcctgaatctgaacgttggcctgccttgctagattggggaagttctcctggataatatcctgcagagtgttttccaacttggttccattctccctatcactttcaggtacaccaatcagacgtagatttggtcttttcacatagtcccatatttcttggaggctttgctcatttctttttattcctttttctctaaacttcccttctcgcttcatttcattcatttcatcttccatcactgataccctttcttccagttgatcgcatcggctcctgaggcttctgcattcttcacgtagttctcgagccttggttttcagctccatcagctcgtaagcacttctctgtattggttattctagttatacattcttctaaatttttttcaaagttttcaacttctttgcctttggtttgaatgtcctcccgtagctcagagtaatttgatcgtctgaagacttcttctctcagctcgtcaaagtcattctccatccagctttgttctgttgctggtgaggaactgcgttcctttggaggaggagaggcgctctgcgttttagagtttccagtttttctgttctgttttttccccatctttgtggttttatctacttttggtctttgatgatggtgatgtacagatgggtttttggtgtggatgtcctttctgtttgttagttttccttctaacagacaggaccctcagctgcaggtctgttggaataccctgccgtgtgaggtgtcagtgtgcccctgctggggggtgcctcccagttaggctgctcgggggtcaggggtcagggacccacttgaggaggcagtctgcccgttctcagatctccagctgcgtgctgggagaaccactgctctcttcaaagctgtcagacagggacatttaagtctgcagaggttactgctgtctttttgtttgtctgtgccctgcccccggaggtggagcctacagaggcaggcaggcctccttgagctgtggtgggctccacccagttcgagcttcccggctgctttgtttacctaagcaagcctgggcaatggcgggcacccctcccccagcctcgctgccgccttgcagtttgatctcagactgctgtgctagcaatcagtgagaccccgtgggcataggaccctccgagccaggtgcgggatataatctcgtgatgtgccgttttttaagccggtccgaaaagcgcaatattcgggtggagtgacctgatttttcaggtgcatccgtcgcccgtttctttgactcggaaagggaactccctgaccccttgcgcttcccaagtgaggcaatgcctcaccctgcttcggctggtgcatggtgcgcgcacccactgacctgcgcccactgtctggcgctccctagtgagatgaacccggtacctcagatggaaatgcagaaatcacccatcttctgcgtcgctcacgctgggagctgtagaccggagctgttcctattcggccatcttggctcctccc

SEQ ID NO: 10537 - DNA, 5671 bp, Homo sapiens
attttacatttttttttttattattatactttaagttctagggtacatgtgcacagcgtgcaggtttgttacatatgtatacatgtgccatgttggtgtgctgcacccattaactcgtcatttacattaggtatatctcctaatgctatccctccccccctccccccaccccaaaacaggccccagtgtgtgatgttccccttcctgtgtccaagtgttctcattgttcaattcccacctatgagtgagaacatgcgacgtttggttttttgtccttgcgatggtttgctgagaatgatggtttccggcttcatccatgtccctagaaaggacatgaactcatcattgtttatggctgcatagtattccatggtgtgtatgtgccacattttcttaatccagtctatcattgttggacatttgggttggttccaggtctttgctattgtgaatagtgccgcaataaacatacgtgtgcatgtgtctttatagcagcatgatttataatcctttgagtatatacccagtaatgggatggctgggtcaaatggtatttctggttctagatccctgaggaatcgccacactgtcttccacaatggttgaaccagtttacagtcccaccaacagtgtaaaagttcctatttctctgcatcctctctagtacctgttgtttcctgactttttaatgatcgccattctaactggtgtgagatggtatctcattgtggttttgatttgcatttctctgatggccagtgatgatgagcattttttcatgtgtctgttggctgcataaatgtcttcttttgagaagtgtctgttcatatccttcacccacttgttgatggggttgttttttttcttgtgaaattgtttgagttctttgtagattctggatattagccctttgtcagatgagtagattgcagaaattttctcccattctgtaggttgcctgttcactctgatggtagtttcttttgctgtgcagaagctctttagtttaattagatcccatttgtcaattttggcttttgttgccattgcttttggtggtttagacatgaagtccttgcccatgcctatgtcctgaatggtaatgcctaggttttcttctagggtttttatggttttaggtctaacgtttaagtctttaatccatcttgaattaatttttgtataaggtgtaaggaagggatccagtttcagctttctacatatggctaaccagttttcccagcaccatttgttaaatagggaatcctttccccatttctcgtttttgtcaggtttgtcaaaggtcagatggttgtagatgtgtggtattatttctgagggctctgttctgttccattggtctatatctctgttttggcaccagtaccatgctgttttggttactgtagcctggtagtatagtttgaagtcaggtagcgtgatgcttccagctttgttcttttggcttaggattgacttggcaatgcaggctcttttttggttccatatgaactttaaagtagtttttcccaattctgtgaagaaagtcattggtagcttgatggggatggcattgaatctataaattaccttgggcagtatggccgttttcacgatattgattcttcctacccatgagcatggaatgttcttccatttgtttgtatcctcttttatttcattgagcagtggtttgtagttctccttggagaggtccttcacctcccttgtaagttggattcctaggtattttattctctttgaagcaattgtgaatgggatttcactcatgatttggctctctgtttgtctgttattggtgtataagaatgcttgtgatttttgcacattgatttttgtatcctgagactttgctgaagttgcttatcaccttgagattctgggctgagacgatggggttttctagatatacaatcatgttatctgcaaacagggacaatttgacttcttcttttcctaactgaataccctttatttctttctcctgcctaattgccctggccagaacttccaacactgtgttgaataggagtggtgagagagggagggcatccctgtcttgtgccagttttcaaagggaatgcttccagtttttgcccattcagtatgatattggctgtgggtttgtcataaatagctcttattgttttgagatacatcccatcaatacctaatttattgagagtttttagcatgaagggctattgaattttgtcaaaggccttttctgcatctattgaaatgatcatttagtttttgtcattggttctgtttatatgctggattacatttattgatttgtgtatgttgaaccagccttgcatcccagggatgaagcccacttgatcaaggtggataagctttttgatgtgctgctggattcagtttgccagtattttattgaggatttttgcatcaatgttcatcagggatattggtctaaaattctctttttttgttgtgtctctgctaggctttggtatcaggatgatgttggcctcataaaatgagttagggaggattccctctttttctattgattggaatagtttcagaaggaatggtaccagctcctccttgtacctctggtagaattcggctgtgaatccgtctggtcctggactttttttggttggtaagctattaattattgcctcaatttcagagcctgttattggtctattcagagattcaacttcttcctggtttagtcttgggagagtgtatatgtcaaggaatttatccatttcttctagattttctagtttatttgcgtaggggtgttcatagtattctctgatggtagtttgtatttctgtgggatctgtggtgatatcccctttatcaatttttattgtgtatatttgattcttctctcttttcttctttcttactcttgctagcggtctatcaattttgttgatcttttcaaaaaaccagctcctggattcattgatttttttgaagggttttttctgtctctatcttcttcagttctgctctgatcttagttatttcttgccttctgctagcttttgaatgtgtttgctcttgcttctctagttcttttaattgtgatgttagggtgtcaattttagatctttcctgctttctcttgtgggcatttagtgctataaatttccctctacacactgctttaaatgtgtcccagagattctggtatattgtgcctttattctcattggtttcaaagaacatctttatttctgccttcatttcattatgtacccagtagtcattcaggagcaggttgttcagtttccatgtagttgagcggttttgagtgagtttcttaatcctgagttctagtttgattgcactgtggtctgagagacagtttgttataatttctgttcttttacatttgctgaggagtgctttacttccaactatgtggccaattttggagtaagtgcagtgtggtgctgagaagaatgtatattctgttgatttggggtggagagttctgtagatgtctattaggtccacttggtgcagagctgagttcaatttctggatatccttgttaaccttctgtctcattgatctgtctaatgttgacagtcgggtgttaaagtctcccattattattgtgtgggagtctaagtctctttgtaggtctctaaggacctgctttatgaatctgggtgctcctatattgggtgcatgtatatttaagatagttagctcttcttgttgaattgatccctttaccattatgtaatggccttctttgtctcttttgatctttgttggtttaaagtctgttttatcagagactaggattgcaacccctgcctctttttgttttccatttgcttggtagatcttcctccatccctttattttgagcctatgtgtgtctctgcacatgagatgggtttcctgaatatagcacactgacgggtcttgactcttcatccagtttgccagtctgtgtcttttaattggagcattcagcccatttacatttaaggttaatattgttatgtgtgaatttgatcctgtcattatgatgttagctggttattttgctcgttagttgatgcagtttcttcctagcatcgatggtctttacaatttggcatgtttttgcagtggctggtaccagttgttcctttctatgtttaatgcttccttcaggagttcttgtagggcaggcctggtggtgacagaatctctcagcatttgcttgtctgtaaagtattttatttctccttcacttatgaagcttagtttggctggatatgaaattctgggttgaacattcttttctttaagaatgctgaatattggcccccactctcttctggcttgtagagtttctgccaagagatcagctgttagtctgatgggcttccctttgtgggtaacccgacctttctctctggctgcccttaacatttttgccttcatttcaactttggtgaatctgacaattatgtgtcttggagttgctcttctcgaggagtatctttgtggcattctctgtatttcctgaatttgaatgttggcctgccttgctaggttggggaagttctcctggataatatcctgcagagtgttttccaacttggttccattctccctgtcactttcaggtacaccaatcagacgtagatttggtcttttcacatagtcccatatttcttggaggctttgttcatttctttttattcttttttctctaaacttctcttctcacttcatttcattcatttgatcttccatcactgataccctttcttctagttgatcgaatcagctactgaagcttgtgcattcgtcacgtagttcttgtgccatggttttcagctccatcaggtcctttaaggacttatctgcattggtgattctagttagccattcgtctaatcttttttcaaggtttttaacttctttgtgttgggtttgaacttcctcctttagctcggagaaattcgatcatctgtagccttcttctctcaacttgtcaaagtcattctccatccagctttgttccattgctggtgaggagctgcattcctttggaggaggagagatgctctgatttttagaattttcagtttttctgctctgttttttcccctctttgtggttttatctacctttggttttgatgatggtgatgtacagatggggttttggtgtggatgtcctctctgtttgttagttttccttctaacagtcaggaccctcagctgcaggtctgttagagttttctggaggtccactccagaccctttttgcctgggtatcagcagtggaggctgcagaacagcaaatattggtgaacagcaaatgttgctgcctgatcgttcctctggaagtttcatctcagagggatacccggccgtgtgaggtgtcaatctgcccctactggggggtgcctcccagttaggctacttgggggtcagggaaccacttgaggaggcagtctgtccgttctcagatctcaagctccgtgctgggagaaccactgctgtcttccaagctgtcagacagggacatttaagtctgcagaggtttctgctgccttttgtttggctatgccctgcccccagaggtggagtctacagaggcaggcaggcctccttgagctgcggtgagctccacccagttcgagctt

SEQ ID NO: 10538 - DNA, 845 bp, Homo sapiens; identical to SEQ ID NO: 5234

SEQ ID NO: 10539 - DNA, 4121 bp, Homo sapiens
ttatttatttatttatttatttatttatttatttatttattttattttttatttttattatactttaagttttagggtacatgtgcacaacgtgcaggtttgttacatatgtatgcatgtgccatgttggtgtgctgcacccattaacttgtcgtttagcattaggtatatctcctaatgctatccctccccccacccccaccccacaacagtccctggtatgtgatgttccccttcctgtgtccatgtgttctcattgttcaattcccacctatgagtgagaatatgcggtgtttggttttttgtccttgcgatagtttgctgagaatgatggtttccagcttcatccatgtccctacaaaggacatgaactcatcattttttatggctgcatagtattccatggtgtatatgtgccacattttcttaatccagtctatcattgttggacatttgggttggttccaagtctttgctattgtgaatagtgcctcaataaacatacgtgtgcatgtgtctttatagcagcatgatttataatcctttgggtacatacccagtaatgggatggctgggtcaaatggtatttctagttctagatccctgaggaatcgccacactgacttccacaatggttgaactagtttatagtcccaccaacagtgtaaaagcattcctatttctccacatcctctccagcacctgttgtttcctgactttttaatgatcgccattctaacttgtgtgaggtggtatctcattgtggttttgatatgcatttctctgatggccagtgatgatgagcattttttcatgtgttttttggctgcataaatgtcttcttttgaaaagcgtctgttcatatccttcgcccactttttgatgaggttgtttgttttttttcttataaatttgtttgagttcattgtagatgctggatattagccctttgtcagatgagtaggttgcaaaaattttctcccattctgtaggttgcctgttcactctgatggtggtttcttttgctgtgcagaagctctttagtttaattagatcccatttgtcaattttggcttttgttgccattgcttttggtgttttagacatgaagtccttgcccatgcctatgtcctgaatggtattgcctaggttttcttctagggtttttatggttttaggtctaacatttaagtctttaatccatcttgaatttatttttgtataaggtgtaaggaagggatccagtttcaactttctacatatggctagccagttttcccagcaccatttattaaatagggaatcctttccccattgcttgtttttgtcaggtttgtcaaagatcagataatattagatatgtggcattatttctgagggctctgttctgttccattggtctatatctctgttttggtaccagtaccatgctgttttggttactgtagccttgtagtatagtttgaagtcaggtagcatgatgcctccagctttgttcttttggcttaggattgacttggcaatgtgggctcttttttggttccatatgaactttaaagtagtattttccaattctgtgaagaaagtcattggtagcttgatggggatggcattgaatctataaattaccttgggcagtatggccattttcacaatattgatttttcctacccatgagcatggaatgttcttccatttgtttgtatcctcttttatttcattgagcagtggtttgtagttctccttgaagaggtcctttacatcccttgtaagttggattcctaggtattttattctctttgaagcaattgtgaatgggagttcactcatgatttggctctctgtttttctgttattggtgtataagaatgcttctgatttttgtacattgattttgtatcctgagactttgctgaagttgcttatcagtttaaggagattttgggctgagactatggggttttctaggtatacaatcatgtcatctgcaaacagggacaatttgacttcctcttttcctaattgaatgccctttatttccttctcctgcctgattgccctggccagaacttccaacactatgttgaataggagtggtgagagagggcatccctgtcttgtgccagttttcaaagagagtgcttccagtttttgcccattcagtatgatattggctgtgggtttgtcatagatagctcttattattttgagatacgtcccatcaatacctaatttattgagagtttttagcatgaagcgttgttgaattttgtcaaaggccttttctgcatctattgagataatcaggtggtttttgtctttggttctgtttatatgctggattacgtttattgattttcatatgttgaaccagccttgcatcccagggatgaagcccacttgatcacggtggataaactttttgatgtgttgctggattcggtttgccagtattttattgaagatttttgcatcaatgttcatcaaggatattggtctaaaattctcttttttttgttgtgtctctgccaggctttggtatcaggatgatgctggcctcataaaatgagttagggaggattccctctttttctattgattggaatagtttcagaaggaatggtaccagttcctccttgtacctctggtagaattcggctgtgaatccatctggtcctggactttttttggtgggtaagctattaattattgcctcaatttcagagcctgttattggtctattcagagattcaatttcttcctggtttagtcttgggagagtgtatgtgttgaggaatttatccatttcttctagattttctagtttatttgcatagaggtgtttatagtattctctgatggtagtttgtatttcctttgggatcggtggtgatatcccctttatcattttttattgagtctctttgattcttctctcttttcttctttattagtcttgctagcggtctgtcgattttgttgatcttttcaaaaaaccagctcctggattcgttgattttttgaagggttttttgtgtctctatctccttcagttctgctctgatcttagttattcttgccttctgctagcttttgaatgtgtttgttcttgcttctctagttcttttaattgtgatgttagggtgtcaattttagatctttcctgctttctcttgtgggcatttagtgctataaatttccctctacaccctgctttgaatgtgtcccagagattctggtatgttgtgtctttgttctcattggtttcaaagaacatctgtatttcagccttcatttcgttatgtacccagtagtcattcaggagcaggttgttcagtttccatgtagttgagcagttttgagtgagtttcttaatcctgagttctagtttgattgcactgtggtctgagagacagtttgttataatttctgttcttttacatttgctgaggagtgctttacttccaactatgtggtcaattttggaataggtgtggtgtggtgctgaaaagaatgtatattctgttgatttggggtggagagttctgtagatgtctattaggtctgcttggtgcagagctgatttcaattcctggatagccttgttaactttctgtctcattgatctgtctaatgttgacagtggggtgttaaagtctcccattattattgtgtgggagtctaagtctctttgtaggtcactaaggacttgctttatgaatctgggtgctcctgtattgggtgcatatatatttaggatagttagttctccttgttgaattgatccctttactattatgtaatggccttctttgtctcttttgatctttgttggtttaaagtctgttttatcagaaactaggattgcaacccctgcctttttttgttttccatttgcttggtatatcttcctgcatccctttattttgagcctatttgtgtctttgcacgtgagatgggtttcctgaatatagcacactgatgggtcttgactctttatccagtttgccagtctgtgccttttaattggagcatttagcccatttacatttaaggttagtattgttatgtgtgaatttgatcctgtcattatgatgttagctggtcattttgctcattag

SEQ ID NO: 10540 - DNA, 6165 bp, Homo sapiens
tattataatctttcttttttttttttttttaatttttttttttattatactttaagttttagggtacatgtgcacattgtgcaggttagttacatatgtatacatgtgccatgctggtgcgctgcacccaccaacgtgtcatctagcattaggtatatctcccaatgctatccctcccccctcccctgaccccaccaccgtccccagagtgtgatattccccttcctgtgtccttgtgatctcattgttcaattcccacctatgagtgagaatatgcggtgtttggttttttgttcttgcgatagtttactgagaatgatggtttccaatttcatccatgtccctacaaaggacatgaactcatcactttttatggctgcatagtattccatggtgtatatgtgccacattttcttaatccagtctatcattgttggacatttgggttggttccaagtctttgctattgtgaatagtgtcgcaataaacatacgtgtgcatgtgtctttatagcagcatgatttatagtcctttgggtatatatccagtaacgggatggctgggtcaaatggtatttctagttctagatccctgaggaatcgccacactgacttccacaatggttgaactagtttacagtcccaccaacagtgtaaaagtgttcctatttctccacatcctctccagcacctgttgtttcctgactttttaatgattgccattctaactggtgtgagatgatatctcatagtggttttgatttgcatttctctgatggccagtgatgatgagcattttttcatgtgttttttggctgcataaatgtcttcttttgagaagtgtctgttcatgtccttcgcccactttttgatggggttgtttgtttttttcttgtaaatttgtttgagttcattgtagattctggatattagccctttgtcagatgagtaggttgcgaaaattttctcccatgttgtaggttgcctgttcactctgatggtagtttcttttgctgtgcagaagctctttagtttaattagatcccatttgtcaattttggcttttgttgccattgcttttggtgttttggacatgaagtccttgcccacgcctatgtcctgaatggtaatgcctaggttttcttctagggtttttatggttttaggtctaacgtttaaatctttaatccatcttgaattgatttttgtataaggtgtaaggaagggatccagtttcagctttctacatatggctagccagttttcccagcaccatttattaaatagggaatcctttccccattgcttgtttttctcaggtttgtcaaagatcagatagttgtagatatgcggcattatttctgagggctctgttctgttccattgatctatatctctgttttggtaccagtaccatgctgttttggttactgtagccttgtagtatagtttgaagtcaggtagtgtgatgcctccagctttgttcttttggcttaggattgacttggcgatgcgggctcttttttggttccatatgaactttaaagtagttttttccaattctgtgaagaaagtcattggtagcttgatggggatggcattgaatctgtaaattaccttgggcagtatggccattttcacgatattgattcttcctacccatgagcatggaatgttcttccatttgtttgtgtcgtctgttatttccttgagcagtggtttgtagttctccttgaagaggtccttcacatcccttgtaagttggattcctaggtattttattctctttgaagcaattgtgaatgggagttcactcatggtttggctctctgtttgtctgttgttggtgtataagaatgcttgtgatttttgtacattgattttgtatcctgagactttgctgaagtcgcttatcagcttaaggagattttgggctgagacgatggggttttctagatatacaatcatgtcgtctgcaaacagggacaatttgacttcctcttttcctaattgaataccctttatttccttctcctgcctgattgccctggccagaacttccaacactatgttgaataggagcggtgagagagggcatccctgtcttgtgccagttttcaaagggaatgcttccagtttttgcccattcagtatgatattggctgtgggtttgtcatagatagctcttattattttgaaatacgtcccatcaatacctaatttattgagagtttttagcatgaagggttgttgaattttgtcaaaggctttttctgcatctattgagataatcatgtggtttttgtctttggctctgtttatatgctggattacatttattgatttgcgtatattgaaccagccttgcatcccagggatgaagcccacttgatcatggtggataagctttttgatgtgctgctggattcggtttgccagtattttattgaggatttttgcgtcaatgttcatcaaggatattggtctaaaattctcttttttggttgtgtctctgcccggctttggtatcagaatgatgctggcctcataaaatgagttagggaagattccctctttttctattgattggaatagtttcagaaggaatggtaccagttcctccttgtacctctggtagaattcggctgtgaatccatctggtcctggactctttttggttggtaaactattgattattgcctcaatttcagagcctgttattggtctattcagagattcaacttcttcctggtttagtcttgggagagtgtatgtgtcgaggaatgtatccatttcttctagattttctagtttatttgcgtagaggtgtttgtagtattctctgatggtagtttgtatttctgtgggatcggtggtgatatcccctttatcattttttattgcgtctatttgattcttctcttttttctttattactcttgctagcggtctatcaattttgttgatcctttcaaaaaaccagctcctggattcattgattttttgaagggttttttgtgtctctatttccttcagttctgctctgattttagttatttcttgccttctgctagcttttgaatgtgtttgctcttgcttttctagttcttttaattgtgatgttagggtgtcaattttggatctttcctgctttctcttgtaggcatttagtgctataaatttccctctacacactgctttgaatgcgtcccagagattctggtatgtggtgtctttgttctcgttggtttcaaagaacatctttatttctgccttcatttcgttatgtacccagtagtcattcaggagcaggttgttcagtttccatgtagttgagcggctttgagtgagattcttaatcctgagttctagtttgattgcactgtggtctgagagatagtttgttataatttctgttcttttacatttgctgaggagagctttacttccaactatgtggtcaattttggaataggtgtggtgtggtgctgaaaaaactgtatattctgttgatttggggtggagagttctgtagatgtctattaggtctgcttggtgcagagctgagttcaattcctgggtatccttgttgactttctgtctcgttgatctgtctaatgttgacagtggggtgttaaagtctcccattattaatgtgtgggagtctaagtctctttgtaggtcactcaggacttgctttatgaatctgggtgctcctgtattgggtgcataaatatttaggatagttagctcctcttgttgaattgatccctttaccattatgtaatggccttctttgtctcttttgatctttgttggtttaaagtctgttttatcagagactaggattgcaacccctgcctttttttgttttccattggcttggtagatctttctccatccttttattttgagcctatgtgtgtctctgcacgtgagatgggtttcctgaatacagcacactgatgggtcttgactctttatccaacttgccagtctgtgtcttttaattgcagaatttagtccatttatatttaaagttaatattgttatgtgtgaatttgatcctgtcattatgatgttagctggtgattttgctcgttagttgatgcagtttcttcctagtctcgatggtctttacattttggcatgattttgcagcggctggtaccggttgttcctttccatgtttagcgcttccttcaggagctcttttagggcaggcctggtgttgacaaaatctctcagcatttgcttgtctataaagtattttatttctccttcacttatgaagcttagtttggctggatatgaaattctgggttgaaaattcttttctttaagaatgttgaatattggcccccactctcttctggcttgtagggtttctgccgagagatccgctgttagtctgatgggctttcctttgagggtaacctgacctttctctctggctgcccttaacattttttccttcatttcaactttggtgaatctgacaattatgtgtcttggaattgctcttctcgaggagtatctttgtggcgttctctgtatttcctgaatctgaacgttggcctgccttgctagattggggaagttctcctggataatatcctgcagagtgttttccaacttggttccattctccacatcactttcaggtacaccaatcagacgtagatttggtcttttcacatagtcccatatttcttggaggctttgctcatttctttttattcttttttctctaaacttcccttctcgcttcatttcattcatttcatcttccattgctgataccctttcttccagttgatcgcatcggctcctgaggcttctgcattcttcacgtagttctcgagccttggttttcagctccatcagctcctttaagcacttctctgtattggttattctagttatacattcttctaaatttttttcaaagttttcaacttctttgcctttggtttgaatgtcctcccgtagctcagagtaatttgatcgtctgaagccttcttctctcagctcgtcaaaatcattctccatccagctttgttccgttgctggtgaggaactgcgttcttttggaggaggagaggcgctctgcgttttagagtttccagtttttctgttctgttttttccccatctttgtggttttatctacttttggtctttgatgatggtgatgtacagatgggttttctgttagatgtcctttctggttgttagttttccttctaacagacaggaccctcagctgcaggtctgttggaataccctgccgtgtgaggtgtcagtgtgcccctgctgtggggtgtctcccagttaggctgctcgggggtcaggggtcaaggacccaattgaggaggcagtctgcccgttctcagatctccagctgcgtgctgggagaaccactgctctcttcaaagctgtcagacagggacacttaagtctgcagaggttactgctgtctttttgtttgtctgtgccctgcccccagaggtggagcctacagaggcaggcaggcctccttgagctgtggtgggctccacccagttcgagcttcctggctgctttgtttacctaagcaagcctgggcaatggcgggcgcccctcccccagcctcgttgccgccttgcagtttgatctcagactgctgtgccagcaatcagcgagattccgtgggcgtaggaccctctgagccaggtgtgggatatagtctcctggtgcgccgttttttaagccggtctgaaaagcgcaatattcgggtgggagtgacccgattttccaggtgcgtctgtcacccctttctttgactcggaaagggaactccctgacccttgcgcttcccaggtgaggcaatgcctcgccctgcttcggctcgcgcacggtgcgcgcacacactggcctgtgcccactgtctggcactccctagtgagatgaacccggtacctcagatggaaatgcagaaatcacccgtcttctgcgtcgctcacgctgggagctgtagaccggagctgttcctattcggccatcttggctcctccctcctattataatctttcatttgtttcatcaatctagacatttataatgaatacagtataaaaagtagctctactggccaggcacagtggctcacgcctgtaatcccagca

SEQ ID NO: 10541 - DNA, 6641 bp, Homo sapiens
  SITE (44): n equals a,t,g, or c
tattattttactatttttttcttttcttttttttttttttttancagactctaagttttagggtacatgtgcacattgtgcaggttagttacatatgtatacatgtgccatgctggtgcgctgcacccactaatgtgtcatctagcattaggtatatctcccaatgctatccctccccccttccccgaccccaccacagtccccagagtgtgatattccccttcctgtgtccatgtgatctcattgttcaattcccacctatgagtgagaatatgcggtgtttggttttttgttcttgcgatagtttactgagaatgatggtttccaatttcatccatgtccctacaaaggatatgaactcatcattttttatggctgcatagtattccatggtgtatatgtgccacattttcttaatccagtctatcattgttggacatttgggttggttccaagtctttgctattgtgaatagtgccgcaataaacatacgtgtgcatgtgtctttatagcagcatgatttatactcatttgggtatatacccagtaatgggatggctgggtcaaatggtatttctagttctagatccctgaggaattgccacactgacttccacaatggttgaactagtttacagtcccaccaacagtgtaaaagtgttcctatttctccacatcctctccagcacctgttgtttcctgactttttaatgattgccattctaactggtgtgagatgatatctcatagtggttttgatttgcatttctctgatggccagtgatgatgagcatttcttcatgtgttttttggctgcataaatgtcttcttttgagaagtgtctgttcatgtccttcgcccactttttgatggggttgtttgtttttttcttgtaaatttgtttgagttcattgtagattctggatattagccctttgtcagatgagtaggttgtgaaaattttctcccatgttgtaggttgcctgttcactctgatggtagtttcttttgctgtgcagaagctctttagtttaattagatcccatttgtcaattttgtcttttgttgccattgcttttggtgttttggacatgaagtccttgcccacgcctatgtcctgaatggtaatgcctaggttttcttctagggtttttatggttttaggtttaacgtttaaatctttaatccatcttgaattgatttttgtataaggtgtaaggaagggatccagtttcagctttctacatatggctagccagttttcccagcaccatttattaaatagggaatcctttccccattgcttgtttttctcaggtttgtcaaagatcagatagttgtagatatgcggcattatttctgagggctctgttctgttccattgatctatatctctgttttggtaccagtaccatgctgttttggttactgtagccttgtagtatagtttgaagtcaggtaatgtgatgcctccagctttgttcttttggcttaggattgacttggcaatgcgggctcttttttggttccatatgaactttaaagtagttttttccaattctgtgaagaaagtcattggtagcttgatggggatggcattgaatctgtaaattaccttgggcagtatggccattttcacgatattgattcttcctacccatgagcatggaatgttcttccatttgtttgtctcctcttttatttccttgagcagtggtttgtagtcctccttgaagaggtccttcacatcccttgtaagttggattcctaggtattttattctctttgaagcaattgtgaatgggagttcacccatgatttggctctctgtttgtctgttgttggtgtataagaatgcttgtgatttttgtacattgattttgtatcctgagactttgctgaagttgcttatcagcttaaggagattttgggctgagacgatggggttttctagataaacaatcatgtcgtctgcaaacagggacaatttgacttcctcttttcctaattgaataccctttatttccttctcctgcctgattgccctggccagaacttccaacactatgttgaataggagcggtgagagagggcatccctgtcttgtgccagttttcaaagggaatgcttccagtttttgcccattcagtatgatatgagctgtgggtttgtcatagatagctcttattattttgaaatacgtcccatcaatacctaatttattgagagtttttagcatgaagggttgttgaattttgtcaaaggctttttctgcatctattgagataatcatgtggtttttgtctttggctctgtttatatgctggattacatttattgatttgcatatattgaaccagccttgcatcccagggatgaagcccacttgatcatggtggataagctttttgatgtgctgctggattcggtttgccagtattttattgaggatttttgcatcaatgttcatcaaggatattggtctaaaattctcttttttggttgtgtctctgcccggctttggtatcagaatgatgctggcctcataaaatgagttagggaggattccgtctttttctattgattggaatagtttcagaaggaatggtaccagttcctccttgtacctctggtagaattcggctgtgaatccatctggtcctggactctttttggttggtaaactattgattattgccacaatttcagagcctgttattggtcgattcagagattcaacttcttcctggtttagtcttgggagagtgtatgtgtcgaggaatgtatccatttcttctagattttctagtttatttgcgtagaggtgtttgtagtattctctgatggtagtttgtatttctgtgggatcggtggtgatatcccctttatcattttttattgtgtctatttgattcttctctctttttttctttattagtcttgctagcggtctatcaattttgttgatcctttcaaaaaaccagctcctggattcattgattttttgaagggttttttgtgtctctatttccttcagttctgctctgattttagttatttcttgccttctgctagcttttgaatgtgtttgctcttgcttttctagttcttttaattgtgatgttagggtgtcaattttggatctttcctgctttctcttgtgggaatttagtgctataaatttccctctacacactgctttgaatgcgtcccagagattctggtatgtggtgtctttgttctcgttggtttcaaagaacatctttatttctgccttcatttcgttatgtacccagtagtcattcaggagcaggttgttcagtttccatgtagttgagcggctttgagtgagattcttaatcctgagttctagtttgattgcactgtggtctgagagatagtttgttataatttctgttcttttacatttgctgaggagagctttacttccaactatgtggtcaattttggaataggtgtggtgtggtgctgaaaaaaatgtatattctgttgatttggggtggagagttctgtagatgtctattaggtctgcttggtgcagagctgagttcaattcctgggtatccttgttgactttctgtctcgttgatctgtctaatgttgacagtggggtgttaaagtctcccattattaatgtgtgggagtctaagtctctttgtaggtcattgaggacttgctttatgaatctgggtgctcctgtattgggtgcataaatatttaggatagttagctcctcttgttgaattgatccctttaccattatgtaatggccttctttgtctcttttgatctttgttggtttaaagtctgttttatcagagactaggattgcaacccctgcctttttttgttttccattggcttggtagatcttcctccatccttttattttgagcctatgtgtgtctctgcacgtgagatgggtttcctgaatacagcacactgatgggtcttgactctttatccaacttgccagtctgtgtcttttaattgcagaatttagtccatttatatttaaagttaatattgttatgtgtgaatttgatcctgtcattatgatgttagctggtgattttgctcattagttgatgcagtttcttcctagtctcgatggtctttacattttggcatgattttgcagcggctggtaccggttgttcctttccatgtttagcgcttccttcaggagctcttttagggcaggcctggtggtgacaaaatctctcaacatttgcttgtctataaagtattttatttctccttcacttatgaaggttagtttggctggatatgaaattctgggttgaaaattcttttctttaagaatgttgaatattggcccccactctcttctggcttgtagggtttctgccgagagatccgctgttattctgatgggctttcctttgagggtaacccgacctttctctctggctgcccttaacattttttccttcatttcaactttggtgaatctgacaattatgtgtcttggagttgctcttctcgaggagtatctttgtggcgttctctgtatttcctgaatctgaacgttggcctgccttgctagattggggaagttctcctggataatatcctgcagagtgttttccaacttggttccattctccacatcactttcaggtacaccaatcagacgtagatttggtcttttcacatagtcccataattcttggaggctttgctcatttctttttattcttttttctctaaacttcccttctcgcttcatttcattcatttcatcttccattgctgataccctttcttccagttgatcgcatcggctcctgaggcttctgcattcttcacgtagttctcgagccttggttttcagctccatcagctcctttaagcacttctctgtattggttattctagttatacattcttctaaatttttttcaaagttttcaacttctttgcctttggtttgaatgtcctcccgtagctcagagtaatttgatcgtctgaagccttcttctctcagctcgtcaaaatcattctccatccagctttgttctgttgctggtgaggaactgcgttcctttggaggaggagaggcgctctgcgttttagagtttccagtttttctgttctgttttttccccatctttgtggttttatctacttttggtctttgatgatggtgatgtacagatgggttttcggtgtagatgtcctttctggttgttagttttccttctaacagacaggaccctcagctgcaggtctgttggaataccctgccgtgtgaggtgtcagtgtgcccctgctggggggtgcctcccagttaggctgctcgggggtcaggggtcagggacccacttgaggaggcagtctgcccgttctcagatctccagctgcgtgctgggagaaccactgctctcttcaaagctgtcagacagggacacttaagtctgcagaggttactgctgtctttttgtttgtctgtgccctgcccccagaggtggagcctacagaggcaggcaggcctccttgagctgtggtgggctccacccagttcgagcttcccggctgctttgtttacctaagcaagcctgggcaatggtgggcgcccctcccccagcctcgttgccgccttgcagtttgatctcagactgctgtgctagcaatcagcgagattccgtgggcgtaggaccctccgagccaggtgtgggatatagtctcgtggtgcgccgtttcttaagccggtctgaaaagcgcaatattcgggtgggagtgacccgattttccaggtgcgtccgtcacccctttctttgactcggaaagggaactccctgaccccttgcgcttcccaggtgaggcaatgcctcgccctgcttcggctcgcgcacggtgcgcacacacactggcctgcgcccactgtctggcactccctagtgagatgaacccggtacctcagatggaaatgcagaaatcaccgtcttctgcgtcgctcacgctgggagctgtagaccggagctgttcctattcgggcatcttggctcctccctctcttttttttaaaattatactttaagtcctagggtacatgtgcacaatgtgcaggtttgttacatatgtatacatgtgccatgttggtgtgctgcacccactaacttatcatttatattaggtatttctcctaatgctgtccctcccctctcctcacaccccacgacaggccctggtgtgtgatgttccctgcctggtgtccaagtgctctcattattcaattcccacctatgagtgagaacatgtggtgtttggttttctgtctttgcgatagcttgctcagaatgatggtttccagcttcatccatgtccctacaaaggacatgaactctcatccttttttgtggctgcatagtattccatggtgtatatgtgccacattttcttaatccagtctatcactgatggacatttgggttggttccaagtctttgctattgtgaatagtgccacaataaacatacgtgtgcatgtgtctttatagtagcgtgatttataatcctttgggtatatacccagtaatgggatcactgggtcaaatggtatttctagttctagatccttgaggaatcgccacactg

SEQ ID NO: 10542 - DNA, 6064 bp, Homo sapiens
ttttttttttcatatttacatttttattttatttttttttaatttttttttattatactttaagttttagggtacatgtgcacattgtgcaggttagttacatatgtatacatgtgccatgctggtgcactgcacccactaactcgtcatctagcattaggtatatctcccaatgctatccctcccccctccccccaccccacaacagtccccagagtgtgatattccccttcctgtgtccatgtaatctcattgttcaattcccacctatgagtgagaatatgcggtgtttgctttttgttcttgcgatagtttactgagaatgatgatttccaatttcatccatgtccctacaaaggacatgaactcatcattttttatggctgcatagtattccatggtgtatatgtgccacattttcttaatccagtctatcattgttggacatttgggttggttccaagtctttgctattgtgaatagtgccgcaataaacatacgtgtgcatgtgtctttatagcagcatgatttatagtcctttgggtatatacccagtaatgggatggctgggtcaaatggtatttccagttctagatccctgaggaattgccacactgacttccacaatggttgaactagtttacagtcccaccaacagtgtaaaagtgttcctatttctccacatcctctccagcacctgttgtttcctgactttttaatgattgccattctaactggtgtgagatggtatctcattgtggttttgatttgcatttctctgatggccagtgatgatgagcattttttcatgtgttttttggctgcataaatgtcttcttttgagaagtgtctgttcatgtcctttgcccactttttgatggggttgtttgtttttttcttgtaaatttgtttgagttcattgtagattctggatattagccctttgtcagatgagtaggttgcaaaaattttctcccattttgtaggttgcctgttcattctgatggtagtttcttttgctgtgcagaagctctttagtttaattagatcccatttgtcaattttgtcttttgttgccattgcttttggtgttttagacatgaagtccttgcccatgcctatgtcctgaatggtaatgcctaggttttcttctagggtttttatggttttaggtctaacgtttaagtctttaatccatcttgaattgatttttgtataaggtgtaaggaagggatccagtttcagctttctacgtatggctagccagttttcccaccaccatttattaaatagggaatcctttccccattgcttgtttttgtcaggtttgtcaaagatcagatagctgtagatatgtggcgttatttctgagggctctggtctgttccattgatctatatctctgttttggtaccagtaccatgctgttttggttactgtagccttgtagtatagtttgaagtcaggtagtgtgatgcctccagctttgttcttttggcttaggattgacttggtgatgcgggctcttttttggttccatatgaactttaaagtagttttttccaattctgtgaagaaagtcattggtagcttgatggggatggcattgaatctgtaaattaccttgggcagtatggccattttcacgatattgattcttcctacccatgagcatggaatgttcttccatttgtttgtgtcctcttttatttccttgagcagtggtttgtagttctccttgaagaggtccttcacatcccttgtaagttggattcctaggtattttattctctttgaagcaattgtgaatgggagttcactcatgatttggctctctgtttgtctgttgttggtgtataagaatgcttgtgatttttgtacattgattttgtatcctgagactttgctgaagttgcctgtcagcttaaggagattttgggcttgagacaatggggttttctagatatacaatcatgtcgtctgcaaacagggacaatttgacttcctcttttcccaattgaataccctttatttccttctcctgcctaattgcccaggccagaacttccaacactatgttgaataggagtggtgagagagggcatccctgtcttgtgccagttttcaaagggaatgcttccagtttttgcccattcagtatgatattggctgtgggtttgtcatagatagctcttattatttttgaaatacgtcccatcaacgcctaatttattgagagtttttagtatgaagggttgttgaattttgtcaaaggcttttttctgcatctattgagataatcatgtggtttttgtctgtggctctgtttatatgctggattacatttattgatttgcgtatattgaaccagccttgcatcccagggatgaagcccagttgatcatggtggataagctttttgatgtgctgctggattcgttttgccagtattttactgaggatttttgcatcaatgttcatcaaggatattggtctaaaattctctttttttgttgtgtctctgcctggctttggtatcagaatgatgctggcctcataaaatgagttagggaggattccctctttttctgttgattggaatagtttcagaaggaatggtaccagttcctccttatacctctggtagaattcggctgtgaatccatctggtcctgtactctttttggttggtaagctattgattattgccacaatttcagctcctgttattggtctattcagagattcaacttcttcctggtttagtcttgggagagtttatgtgcagaggaatttatccatttcttctagattttctagtttatttgcatagaggtgtttgtagtattctctgatggtagtttgtatttctgtgggatcagtggtgatatcccctttatcattttttattgcgtctatttgattcttctctctttttttctttattagtcttgctagcggtctatcaattttgttgatcttttcaaaaaacaagctcctggattcattaatttattgaagggttttttgtgtctctgtttccttcagttctgctctgagtttagttatttcttgccttctgctagcttttgaatgtgtttgctcctgcttttctagttcttttaattgtgatgttaggttgtcaattttggatctttcctgctttctcttgtgggcatttagtgctataaatttccctctacacactgctttgaatgcgtcccagagattctggtatgttgtgtctttgttctcgttggtttcaaagaacatctttatttctgccttcatttcgttatgtacccagtagtcattcaggagcaggttgttcagtttccatgtagttgagtggttttgagtgagattcttaatcctgagttctagtttgattgcactgtggtctgagagatagtttgttataatttctgttcttttacatttgctgaggagagctttacttcccagtatgtggtcaattttggaataggtgtggtgtggtgctgaaaaaaatgtatattctgttgatatggggtggagagttctgtagatgtctattaggtctgtttggtgcagagctgagttcaattcctgggtatccttgttgactttctgtctcgttgatctgtctaatgttgacagtggggtgttaaagtctcccattattaatgtgtgggagtctaagtctctttgtaggtcactcaggacttgctttatgaatcttggtgctcctgtattgggtgcatatatatttaggatagttagctcttcttgttgaattgatccctttaccattatgtaatgtccttctttgtctcttttgatctttgttggtttaaagtctgttttatcagagactaggattgcaacccctgcctttttttgttttccattggcttggtagatcttcctccatccttttattttgagcctctatgtgtctctgcacgtgagatgggtttcctgaatacagcacactgatgggtcttgactctttattcaatttgccagtctgtgtcttttaattggagcatttagtccatttacatttaaagataatattgttatgtgtgaatttgatcctgtcattatgatgttagctggttattttgctcgttagttgatgcagtttcttcctagtctcaatggtctttacattttggcatgattttgaagtggctggtaccggttgttcctttccatgtttagtgcttccttcaggagctcttttagggcaggcctggtggtgacaaaatctctcagcatttgcttgtctgtaaagtattttatttctccttcacttatgaagcttagtttggctggatatgcaattctgggttgaaaattcttttctttaagaatgttgaatattggcccccactctcttctggcttgtagggtttctgccgagagatccgctgttagtctgatgggcttccctttgagggtaacccgacctttctctctggctgcccttaacattttttccttcatttcaactttggtgaatctgacaattatgtgtcttggagttgccttctcgaggagtatctttgtggtgttctctgtatttcctgaatctgaacattggcctgccttgctagattggggaagttctcctggataatatcctgcagagtgttttccaacttggttccattctccacatcactttcaggtacaccaatcagacgtagatttggtcttttcacatagtcccatatttcttggaggctttgctcatttctttttattcttttttctctaaacttcccttctcgcttcatttcattcatttcatcttccattgctgataccctttcttccagttgatcgcatcggctcctgaggcttctgcattcttcacgtagttctcgagccttggttttcagctccatcagctcctttaagcacttctctgtattggttattctagtaatacattctcctaaatttttttcaaagttttcaactgctttgcctttggtttgaatgtcctcccgtagctcagagtaatttgatcatctgaagtcttctctcagcttgtcaaagtcattctccatccagctttgttccgttgctggtgaggaactgcgttcctttggaggaggagaggtgctctactttttagagtttccagtttttctgttctgttttttccccatctttgtggttttatctacttttggtctttgatgatggtgatgtacagatgggtttttggtgtggatgtcctttctgtttgttagttttccttctaacagagaggaccctcagctgcaggtctgttggaataccctgccgtgtgaggtgtcagtgtgcccctgctggtgcctcccagttaggctgttctggggtcaggggtcagggacccacttgaggaggcagtctgcccgttctcagatttccagctgcgtgctgggagaaccacagctcttttcaaagctgtcagacagggacatttaagtatgcaaaagttactgctgtctttttgtttgtctgtgccctgcccccagaggtggagcctatagaggcaggcaggcctccttgagctgtggtgggctccacccagttcgagcttcccggctgctttgtttacctaagcaagcctgggcaatggcgggcacccctcccccagccttgctgccgccttgcagtttgatctcagactgctgtgctaacaatcagcgagactccgtgggcgtaggaccctccgagccaggtgcgggatataatcttgtggtgcgcagttttttaagcccgtccgaaaagcgcagtgttcgggtgggagtgacccgactttccaggtgccgtccatcacccctttctttgactcagaaagggaaccccctgaccccttgcgcttcccaagtgaggcagtgcctcgccctgcttcggctgaggcacggtgcgtgcgcccactgacctgcgcccactgtctggcactccctaatgagatgaacccggtacctcagatggaaatgcagaaatcacccgtcttctgcgtcgctcacgctgggagctgtagaccggagctgttcctattcggccatcttggctcctcccc

SEQ ID NO: 10543 - DNA, 22524 bp, Homo sapiens
cactttttgatgaggtttttttttttcttgtaaatttgtttaagttccttgcagattttggatattagccctttgtcagatggatagattgcaaaaattttctcccattctgtaggttgcctgttcactttgatgatcatttcttttgctgtgcagaagctctttagtttaattagaccccatttgtcaattttggcttttgttgcaattgcttttggtgttttagtcatgaagtctttgcccatgcctatgtcctgaatggtattgcctaggttttcttctagggttttttatggttttagttcttacatttaaatctttaatccatctttttttttaatttttttaatttttattatactttaagttttagggtacatgtgcacattgtgcaggttagttacatatgtatacatgtgccatgctggtgcgctgcacccactaactcgtcatctagcattaggtatatctcccgatgctatccctcccccctccccccaccccacaactgtccccagagtgtgatattccccttcctgtgtccatgtgatctcattgttcaattcccacctatgagtgagaatatgcggtgtttggttttttgtccttgcgatagtttactgagaatgatgatttccaatttcatccatgtccctacaaaggacatgaactcatcattttttatggctgcatagtattccatggtgtatatgtgccacatattcttaatccagtctatcattgttggacatttgggttggttccaagtctttgctattgtgaataatgccgcaataaacatacgtgtgcatgtgtctttatagcagcatgatttatagtcctttgggtatatacccagtaatgggatggctgggtcaaatggtgtttccagttctagatccctgaggaattgccacactgacttccacaatggttgaactagtttacagtcccaccaacagtgtaaaagtgttcctatttctccacatcctctccagcacctgttgtttcctgactttttaatgatcgccattctaactggtgtgagatggtatctcattgtggttttgatttgcatttctctgatggccagtggtgatgagcattttttcatgtgttttttggctgcataaatgtcttcttttgagaagtgtctgttcatgtccttcacccactttttgatggggttgtttgtttttttcttgtaaatttgtttgagttcattgtagattctggatattagccctttgtcagatgagtaggttgcgaaaattttctcccattttgtaggttgcctgttcactctgatggtagcttcttttgctgtgcagaagctctttagtttaattagatcccatttgtcaattttgtcttttgttgccattgctttggtgttttagacatgaagtccttgcccatgcctatgtcctgagtggtattgcctaggttttcttcttgggtttttatggttttaggtctaacatgtaagtctttaatccatcttgaattgatttttgtataaggtgtaaggaagggatccagtttcagctttctacatatggctagccagttttcccagcaccatttattaaatagggaatcctttccccattgcttgtttttgtcaggtttgtcaaagatcagatagttgtagatatgtagcgttatttctgagggctctgttctgttccattgatctatatctctgttttggtaccagtgccatgctgttttggttactgtagccttgtagtatagtttgaagtcaggtagtgtgatgcctccggctttgttcttttggcttaggattgacttggcgatgtgggctcttttttggttccatatgaactttaaagtagttttttccaattgtgtgaagaaagtcattggtagcttgatggggatggcattgaatctgtaaattaccttgggcagtatggccattttcacgatattgattcttccttcccatgagcatggaatgttcttccatttgtttgtatcctcttttatttccttgagcagtggtttgtagttctccttgaagaggtccttcacatcccttgtaagttggattcctaggtattttattctctttgaagcaattgtgaatgggagttcactcatgatttggctttctgtttgtctgttgttggtgtataagaatgcttgtgatttttgtacattgattttgtatcctgagactttgctgaagttgcttatcagcttaaggagatgttgggctgagacagtggggttttctagatatacaatcatgtcgtctgcaaactgggacaatttgacttcctcttttcctaattgaataccctttatttccttctcctgcctgattgccctggccagaacttccaacactatgttgaataggaatggtgagagagggcatccctctcttgtgccagttttcaaagggaatgcttccagtttttgcccattcagtatgatattggctgtgggtttgtcatagatagctcttattattttgaaatacgtcccatcaatacctaatttattgagagtttttagcatgaagggttgttgaattttgtcaaaggctttttctgcatctattgagataatcatgtggtttttgtctttggttctgtttatatgctggattacatttattgatttgcgtatgttgaaccagccttgcatcccagggatgaagcccacttgatcatggtggataagctttttgatgtgctgctggattcgttttgccagtattttattgaggatttttgcatcaatgttcatcaaggatattggtctaaaattctcttttttggttgtgtctctgcccggctttggtatcagaatgatgctggcctcataaaatgagttaggaaggattccctctttttctattgattggaatagtttcacaaggaatggtaccagctcctccttatacctctggtagaattcggctgtgaatccatctggtcctggactctttttggttggtaagctattgattattgccacaatttcagatcctgttattggtctattcagagattcaacttcttcctggtttagtcttgggagagtgtatgtgtcaaggaatttatccatttcttctagattttctagtttatttgcgtagaggtgtttgtaatattctctgatggtagtttgtatttctgtgggatcggtggtgatatcccctttatcattttttattgcgtctatttgattcttctctctttttttctttattagtcttgctagcggtctatcaattttgtttatcctttcaaaaatccagctcctggattcattaattttttgaagggttttttgtgtctctatttccttcagttctgctctgattttagttatttcttgccttctgctagcttttgaatgtgtttgctcttgcttttctagttcttttaattgtgatgttagggtgtcaattttggatctttcctgctttctcttgtgggcatttagtgctataaatttccctctacacactgctttgaatgcatcccagagactctggtatgttgtgtctttattcttgttggtttcaaagaacatctttatttctgccttcatttcgttatgtacccagtagtcattcaggagcaggttgttcagtttccatgtagttgagtggttttgagtgagattcttaatcctgagttctagtttgattgcaatgtggtctgagagatagtttgttataatttctgttcttttacatttgctgaatagtctttacttccaagtatgtggtcaattttggaataggtgtggtgtggtgctgaaaaaaatgtatattctgttgatttggggtggagggttctgtagatgtctataggtctgcttggtgcagagctgagttcaattcctgggtatccttgttgactttctgtctcattgatctgtctaatgttgacagtggggtgttaaagtctcccattattattgtgtgggagtctaagtctctttgtaggtcactcaggacttgctttatgaatctgggtgctcctgtattgtgtgcatatatatttcggatagttagctcttcttgttgaattgatccctttaccattatgtaatggccttctttgtctcttttgatctttgttggtttaaagtctgttttatcagagactaggattgcaacccctgcctttttttgttttccatttgcttggtagatcttcctccatccttttattttgagcctatgtgtgtctctgcatgtgagatgtgtttcctgaatacagcacactgatgggtcttgactctttatgcaatttgccagtctgtgtcttttaattggagcatttagtccatttacatttaaagttaatattgttatgtgtgaatttgatcctgtcattatgatgttagctggttattttgctcgttagttgatgcagtttcttcctagtctcgatggtctttacattttggcatgaatttgcagtggctggtaccggttgttcctttccatgtttagcacttccttcaggagctcttttagggcatgcctggtggtgacaaaatctctcagcatttgcttgtctgtaaagtattttatttctccttcgcttatgaagcttagtttggctggatatgaaattctgggttgaaaattcttttctataagaatgttgaatatttgcccccagtctcttctggcttgtagggtttctgccgagagatccgctgttagtctgatgggcttccctttgatggtaacccgacctttctctctggctgcccttaacattttttccttcatttcaactttggtgaatctgacaattatgtgtcttggagttgctcttctcgaggagtatctttgtggcgttctctgtatttcctgaatctgaacgttggcctgccttgctagattggggaagttctcctggataatatcctgcagagtgttttccaacttggttccattctccccatcactttcaggtacaccaatcagacgtagatttggtcttttcacatagtcccatatttcttggaggttttgctcatttctttttattcttttttctctaaacttcccttctcacttcatttcattcatttcatcttccatcactgataccctttcttccagttgatctcattggctcctgaggcttctgcgttcttcacgtagttctcgagccttggctttcagctccatcagctcctttaagcacttctctgtattggttattctagttatacattcttctaaatttttttcaaagttttcaacttctttgcctttggtttgaatgtcctcccgtagctcagagtaatttgatcgtctgaagccttcttctctcagctcgtcaaagtcattctccatccagctttgttccattgctggtgaggaactgtgttcctttggaggaggagaggcactctgctttttagagtttccagtttttctgttctgttttttccccatctttgtggttttatctacttttggtctttgatgatggtgatgtacagatgggtttttggtgtggatgtcctttctgtttgttagttttccttctaacagacaggaccctcagctgcaggtctgttggagtacattgccgtgtgaggtgtcagtctgcccctgctggggggtgcctcccagttaggctgctcgggggtcagggacccacttgaggaggcagtctgccggttctcagatctccagctgcgtgctgggagaaccactgctctcttcaaagctgtcagacagggacatttaagtctgcagaggttactgctgtctttttgtttgtctgtgccctgcccccagaggtggagcctacagaggcaggcaggcctccttgagctgtggtgggctccacccagttggagattcccggctgctttgtttacctaagcaagcctgggcaatggcgggcgcccctcccccagccttgctgccgccttgcagtttgatctcagactgctgtgctagcaatcagcgagactccgtgggcataggaccctccgagctaggtgcaggatataatctcgtggtgcgccgttttttaagccagtcggaaaagcgcagtatttgggtgggagtgaccggattttccaggtgtgtctgtcacccctttctttgactcggaaagtgaactccctgaccccttgcgcttcccaagtgaggcaatgcctcgccctgctttggctcgggcacggtgcacacacccactgacctgcgcccactgtctggcactcccaagtgagatgaacccggtacctcagatggaaatgcagaaatcacctgtcttctgcatcgctcacgctgggagctgtagacaggagctgttcctattcggccatcttggctcctccctcctttaatccatcttgagctcatttttgtataaggtgtaaatgggtccagtttctgttttctgcatatggctagccagttttcccagcaccatttattgaatagggaatcctttccccattgcttgtttctgtcaggtttgtcaaagatcagatggttgtagatgtgtggtggtatttctgaggcctctgttctgttccattggtctatatatctgtttcattaccagtaccatgttgttctggtgactgtagccttgtattatagtttgaagtcaggtagcgtgatgccttcagcttcgttctttttgtttaggattgtcttggttatatgggctcttttttggtaccacatgaactttaaagtagttttttctaattctgtgaaaaaagtcaatggtagtttgatgaggatagcactgaatttataaattatttgggcagtatgaccattttcacaatattgattctttccatccatgagcatggaaagttttttcatttgtttgtgtcctctcttatttccttgagcagtggtttgtagttctccttgaagaggtccttcatatcccttctaagttgtattcctaggtattttattttctttgtagcaattgtgaatgggagttcactcatgatttggctctctgcttgtctattatttgtgtacaggaatgcttttgagttttgcacgttgattttgtatcctgagactttgctgaagttgtttttcagcttaaggagtttttcgggctgagacaatggggttttctaaatatacaatcatgtcatatgcaaacagagacaatctgatttcctcttttcctatttgaataccatttatttatttctcttgcctgattgccttggccacagcttccaatactattttgaataataggagtggtgacagagggcatccttgtcttgtgtcagttttcagagggaatgcttccaggttttgcccattgagtatgatattggctgtgagtttatcataaatagctcttattattttgagatgtgtttaatcaataccaagtttattgagtgtttttagcatgaaggggtgttgaattttattgaaggccttttctgcatctattgagataatcatgtggtttttgtcattggttttgtttatatgatggattacatttattgatttgtgtatgttgaagcagccttgcaccccaggtatgaagccaacttgatcatggtggataagttttttaatgtgctgctggattctgttttccagtattttattgaggattttcacatggatgttcatcaagaatattggcctgaaatttttttgtgtgtgtgtctctgccaggctttggtatcaggatgatgttggcctcataaaatgaattagggaggactccctcttttttttttgattggaatagtttcagaaggagtggtacaagctcctccttgtacctctggtagaattcagctgtgaatccatctggtcctggactttttttggttggtaggctattaattattgcctcaatttcagaggctgttattggtctattcagggattcaacttcttcctggtttagtcttgggagagtgtatgtgtcaaggaatttatccatttcttctagattttctagtttatctgtgtagaggtgtttatagtattctctgatgatagtttgtatttctgtgggatcggtggtgatatcccctttataattttttactgcatctatttgagtcttctctcttttcttctttattagtcttgctagcggtctatcaattttgtttatcctttcaaaaatccagctcctggattcattaattttttgaagggttttttgtgtctctatttccttcagttctgctctgattttagttatttcttgccttctgctagcttttgaatgtgtttgctcttgcttttctagttcttttaattgtgatgttagggtgtcaattttggatctttccttctttttcttgtgcacatttagtgtcataaatttccctctacacactgctttaaatgtgtcccagagattctggtatgttgtgtctttgttctcgttggtttcaaagaacatctttatttctgccttcatttcgttatgtacccagtagtcattcaggagcaggttgttcagtttccatgtagttgagtggttttgcgtgaatttattaatcctgagttctagtttgattgcactgtggtctgagaaagagtttgttataatttctgctcttttacatttgctgaggagtgttttagttccaactatgcggtcagttttggaataagtgtgatgtggtgctgagaagaatgtattttctgttgatttggggtggagggttctgtagatgtctattaggtctgcttggtgcagagctgagttcaattcctgaatatccttgttaactatctgtctcattgatctgtctaatgttgatagtggggtgttgaagtctcccattagtattgtgtgggactctaagtctctttgtaagtctctaaggacttgctttatgaatctgggtgctcctgtattgggtgcatatatatttaggatagttagctcttcttgttgaattgatccctttaccattatgtaatggccttctttgtctctttgatctttgttggtttaaagtctgttttatcagagactaggattgcaacccctgcctttttttgttttccatttgcttggtagatcttcctccattcctttattttgagcctgtgtgtgtctctgcatgtgagatgggtctcctgagtacagcacactgatgggtcttgaatttttatccaatttgccactctgtgtcttttaattggagcatttagcccacttacatttaaagttaatattgttgtgtgtgaatttgatcctgtcattatgatgttagctggttattttgcttgttagttgatgcagcttcttcctggcattgatggtctttacattttggcatgtttttgcagtggctggtaccgattgttcctttccatgtttagtgcttccatcaggagctcttttagggcaggcctggtagtgacaaaatctctcagcatttgcttgtctgtaaagtattttatttcttcacttatgaagcttagtttggctggatatgcaattctgggttgaaaattcttttctttaagaatgttgaatatttgcccccactctcttctggcttgtagagtttctgttgagagatccactgttactctgatgggcttccctttgatggtaacccaacctttctctctggctgcccttaacattttttccttcattttaactttgttgaatctgaaaattatgtgtcttggagttgctgttctcaaggagtatctttgtggtgttctctgtatttcctgaatttgaatgttggcctgccttgctaggttgggcaagttcccctggataatatcctgcagagtgttttccaacttggttccattctccttgtcactttcaggtacaccaatcagatgtagatttggtcttttcacatagtcccatatttcttggaggctttgttcatttctttttactcttttttctctaaactccttttctcacttcatttcattcgtttgatcttcaatcactgataccctttcttccagttgatcgaatcagttactgaagcttgcacattcatcacatagttcttgagccatggttttcagctccgtcaggtcgtttagggacttctctatgctggttattcagtcagccattcacctaatcttttttcaaggtttttatcttgtttgcaatgggatcaaacttcctcctttagctcggagaaggttgatcatctgaagctttcttctctcaacttgtcaaagtcactctccatccagctttgttctgttgctggcaaggagctgccttcctttggagggggagaggtgctctgatttttagagtttccagtttttctgctctgtcttttccccatctttgtggctttatctacttttggtctttgatgatggtgacatacagatggggttttggtgtggatgtcctttctgtttgttttccttctaacagtcagaaccctcagctgcaggtctgttggagtttgctggaggtccactccagaccctgtttgccagggagagcctcccaattaggctacttgggggtcagggacccacttgaggaggcagtctgtccattctcagatctcaaactccatgctgggaaaatcagtactgtcttcaaagctgtcagacagggacatttaaatatgcagaggtttctgcttccttttgttcagctatgccctgcccccagaggtggagtctacagaggcagtcaggtcttcttgagctgtggtgggctccacccagtttgagattcttggccgctttgtttacctactcaagcctcagcaatggcagtcacccctccccccagcctcactgccaccttgtagttagatctcagactgctgtgctagtaatgagtgaggctctgtgggcatgggaccctctgagccaggcacgagatatattttcctggtgtgctgtttgctaagaccattggaaaagtgcactattagggtggtagtgacccaattttccaggtgctgtctgtcatggcttcccttggctaggaaagtgagttcccttaccccttgcacttcccaggggaggtgatgcctcaccctgccttggctcttgcttggtgggctgcacccactgtcctgcacccactgtctgacacgccccagtgagatgaacctggtacctcagttggaaatacagaaatcacctgtcttctgcgtcactcatgctgggagctgtagactggagctgttcctattcggccatcttggaaccactatgtggtcgattttagaataagtgctatgtggtgctgagaagaatgtatattctgtttatttgaggtggagagttctgtagatgtttattaggcccacctggttcagagctgagttcaagtgctgaatatccttgttaattttctctctcattggtctgtctaatattgacagtggggtattaaagtctcccactattattgtgtgggagtctaagtctctttgtaggtctctaagaacttgctttatgaatctgcgtgctcctgtattataaagtctgttttatcagagactaggattgtaaactctgtttttttttctttccatttgcttggtaaatatttctccatccctttattttgagcataagtgtgtctttgcacttgagatgggtctcctgaatacagcacactgatgagtcttgactcttcatccaatttgcccatctgtgcctattaattggggcatttagcccacttacctttaatgctaatattgttatgtgtgaatttgatcctgtcattatggtgctagcaggttattttccccattagttgatgcggtttcttcatagtgtcgatggtctttacattttggtttgtttttgcagtggctggtaccagtttttcctttccatatttagtgcttccttcaggagctctttaaggcacacctgatggtgacaaaatccctcagcacttgcttgtctgtaaaggattttatttctccttcacttatgaagcttagttggctggatatgaaattctgggttaaaaattttttctttaataatgttgaatattagcccccactctcttctggcttgtagggtttctgctgagagatctgctgttagtctgatgggcttccctttgtgggtaacctgacttttctctctggctgcccttaacattttttccttcatttcaaccttggtgaatatgatgattatgtttcttggggttgctcttctccaggagtatctttgtggtgttctctctatttcctgaagttgaatgttggcctgccttgctacgttggggaagttctcctggataatgtcctgaagagtgttttctaacttggttccattctcccatcactttcaggtacaccaatcaaacatagatttggtcttcatatagtctcatgtttattggaggctttatttgtttcttttcacccttgtttctctagtcttgtcttctcactttatttcattaatttgatcttcaatcactgatatccttacttccacttgatctaatcggctattgaagcttgtgtatgcttcatgaaggtctcatactgtggttctcagctccatcaggccatttaagctcttctccttactggtattctagttagccattcgtctaaccttttttcaaagtttagtttccttgcaatgggttagaacatgctcctttagctcagagaagtttgttattaccgaccttctgatgactacttttgtcaatttgtcaaactcattctccatccagttttattcccttgctgttgaggagttgtgttcctttggaggagaagaggtattttggttttggaattttcagcctttctgctctggtttctccccatttttgtggtttttgtctacgtttggtctttgatgttggtgacctatggatggggttttgttgtggatgtcctttttgttgatgttgatgctattcctttctgtttgttagttttccttctaacagtcaggcccctcatctgcaggtctgttggagtttgctggaggtccactccagaccctggagtattaccaggtttgcctgggtatttccagtggaggttgcagaacagcaaatattgctgcctgatcctttctctggaagctttgtcccagagggacacctgcctgtatgaggtgtctgtcggcccctactgtgaggtgtctccccatcaggaatcatggggtcatggacccacttgaggaggcagtctgtccattatcagagcttgaactctgtgctgtgagaaccactgctcttttcagagctgttaggcagggaggtttaagtctgcagaagctgtctcctgccttttgttcagatatgccctgcccctagaggtggaatctagagaggcagtaggccttgctgagctgtggtgggctccgcccagtttgaagttccctgttgctttgtttacactgtgggcatagaactgcctactcaagcctcagtagtagtggatgcccctccccctgccaagctccaacatcccaggttgatctcagactgctgcattagcagcgagcaaggctccatgggtgtgggacctgtctagtcaggcttgggagggaatctcctggtctgctggttgtgatgaccctgggaaaagtgcagtatttgggcaggagtgtaccattcctccaggtacagtcactcccagctttccttggctaggaaagggaaatcccccaaccccttgcacttcctgggtgaggtgatgccctgccctgctttggctcaccctccatgggctgcacccactgtccaaccagtcccaatgagatgaaccaggtacctcagttggaaatgcagaaatcacccatcttctgcatcgatctcactgggagctgtagactggagctgttcctattaggccatcttggaagtgacctatctcaaacttttaaccgtttctttccagaagaaaaatttgaaacattaagggaaaacagttgggtaaaatatccatttgcttttcaaaaccctgaatcaataattgagctaaacttggtgcctgaagaagagaatgaattattgcagtttagttcttcatatacattaaagaatgattatgagaccttaagcttatcagcattttggaataaggtaaaggaagactttccattgttaaatagaaagagtgtcctgctattactaccattcacaacaactagtttgtgtgaactagggttttctatcttaacccagttaaaaacaaaggaaagaaatggctgaatggtgtagcagctatgcaggtagcattatcttcctatgttccagactggaatgaacttaggaacaggcaagcacacccatcataataaataaaatcttacctaaaaaaagatgtacaaatggctaataggtatatgaaaatctgctcaacatcacctattacaagggaagtgcaaatcacttgaatgggagaaaatatttgcaaagtgctcatccaaaggggactaatatgtattctatacaagaataacaattcaactatagaaaaccaaacaatcccactaaaaatgaacaatatttttcaaaagaagacttacaaaagaccaatagtatatgaaaaatgctcaacactaattatcagggattgtaaataaaaaccacaatgagatattatctcaccacagaatgtttattattgacagatgcacacactcacacagacacacacacacccagatgctggtgagggtgcagagaaaagggtactcttagacatggtgggaatgtaaattagtgcaaccattatggaaagcagtatagatatttctcagaaaaactaaatctagaactactacatgatgcagcaatctcactacagggtatctatccaaaagaaaagaaattattttctcaaagggatacatttgactcacaggtttatcacaatgctattcccaatagaacagatatggaatcaacctaagtgttcatcaatggctgattggacaagaaaaatggtgtgtgtgtgtgagtgtgtgtgtgcacatgcatgcatgtacatgtatgtgtttatatgtactatttgttttctggatacacacctacacccacacccataggtacccatacctgcacaaatacccatacacatatatacacatacactattcagccattaaaaagagtggaatccttttccagcaacatggatggaaatgggttttattatgataagtgacgtaagggaagcacaaaaagataaataccacatgttctcactcatatgtgggatgtaaaaacttgatctcatggacatcaagaataggatagatatcagaaactgggaaagggaggtgaagagaggttgtttatggatacaaacatgcagttagattgaagaaatcatcctaatgtttgatagcagactagggtgaccatatgtagcaatactattatgtatattgcaaagtaactagaagactagaaatgataaaacacctaaaaatgataaacatgcatacatgcatggtgatggataccccaaattaccctggcttgattatcactcattccatgcatgtaacaaacgctcacatatacccaataaacatgtaaatataatgtgtcaatgaaaaaactctaaaatgttgatttgacatataataaagcttacttgtcagtgaaaagattaaactcccacgaaaaaagttatcttatgcaaacaagagaatttgacttcttcctttccaatttggattccctttatttgtttctcttgcctaattgctctggctgggacttttgatattatgttgaataaaagtggtaaaagcgggcatccttgttttgtttaagaccttagaagaaaggctttccatttttccctgttcagtataatgttagctgtgggtttgtgacatatggcctttattattttgaggtatgttccttctatacttagtttgttgaggatatttttcataagaggatgttgagttttgtcaaatattttttcatcatttatttaaatctatttaattcttggttctgttaatgtgatgtatcatgtttattgatttgcacgtgttgaactatccttgtattcctgggaggaatcccccttgatcatggtgaatgatcttttaaggtgttgatgaatttggtttgctagtattttgttgaggattttgcatatatgttaataatactggcttttagttttcttttttcatgtgtccttgcctggttttggtgtcagggtaatgctgccatgttagaatgagtttggaagcattccttgctgtttaatttttttgaaggattttagtagactcaattcatatttgttgttcttttgatgtttggtagaattcatcagtgagtctatctggtcctgggattttctttgaagtgagaattttattatgaccttactcttgttactcattattaatttgttgaggttttatgtttttttcttggttcaatcttggtaggtttatatgtctggtaatttatccattacttttaggtttccaaattgtcatatagttgttcataatagtcactaatgattctttgtatgtctgtggtctcagttgttgtctcctttttcaattctgattttgtttgtttgggtcttctctacgatttttttggttggttgattagtggctttagaacagttctcttgattttcttgtcaggtggattttatgtctgcatccgtttagtgccaattactggtatgttgttttgtttgtttggtgacatcgtttttcttttttttaaatatttttttattttgttattattatactttaagttttagggtacatgtgcacaatgtgcaggttttgttacctctgtatacatgtgccatgttggtgtactgcaccccttaactcgtcatttagcattaggtatatctcctaatgctatccctcccctctccccccaccccacaacagtccctggagtgtgatgttccccttcctgtgtccatgtgttctcattgttcaattcccacctatgagtgagaacatgtggtgtttggttttttgtctttgcgatagtttgctgagaatgatggtttccatcttcatccatgtccctacaaaggacatgaactcatcattttttaatggctgcatagtattccatggtgtatatgtgccacattttcttaatccagtctatcattgttggacatttgggttggttccaagtctttgctattgtgaatagtgccgcaataaacatacgtgtgcatgtgtctttatagcagcatgatttataatcctttgggtatatacccagtaatgggatggctgggtcaaatggtatttctagttctagatccctgaggaatcgccacactgacttccacaatggttgaaatagtttacagtcccaccaacagtgtaaaagtgttcctatttctccacatcctctccagcacctgttgtttcctgactttttaatgatctccattctaactggtgtgagatggtatctcattgtggttttgatttgcatttctctgatggccagtgatgatgagcactttttcatgtgttttttggctgcataaatgtcttcttttgagaagggtctgttcatatacctcacccactttttaatggttgtttttttcttgtaaatgtgtttgagttcattgtagattctggatattagccctttgtcagatgagtagattatgaaaatgttctcccattttgtaggttgcctgttcactctgatggtagtttcttttgctgtgcagaagctctttagtttaattaaatcccatttgtcaattttgtcttttgttgccattgcttttggtgttttagacatgaagtccttgcccatgcctatgtcctgaatggtattgcctaggttttcttctagggtttttatggttttaggtctaagatttaagtctttaatccatcttgaattaatttttgtataaggtgtaaggaagggatccagtttcagctttctacatatggctagccagttttcccagcaccatttattaaatagggaatcctttccccattgcttgtttttgtcaggtttgtcaaagaacagatagttgtagatatgtgtaattaattctgagggctctgttctgttccattggtctatatctctgttctggtaccagtatcatgctgttttggtgactgtagcaccagtatcatgctgttttggtgactgtagccttgtagtagagtttgaagtcaggtagtgtgatgcctccagctttgttcttttggcttaggattgacttggtgatgcgggctcttttttggttccatatgaactttaaggtagttttttccaattctgtgaagaaagccattggtagcttgatggggatggcattgaatctgtaaattaccttgggcagtacggtcattttcacgatattgattcttcctacccgtgtgcatggaatgttcttccatttgtttgtatcctctttgatttcattgagcattggtttgtagttctccttgaagaggtccttcacatcccttgtaagttggattcctaggtattttattctctttgaagcaattgtgaatgggagttcactcatgatttggctttctgtttgtctgttattggtgtataagaatgcttgtgatttttgtacattgattttatatcctgagactttgctgaagttgtttatcagcttaaggagattttgggctgagacgatggggttttctagatatacaatcatgtcatctgcaaacagggacaatttgacttcctcttttctgaattgaataccctttatttccttctcctgcctgattgccctgccagaacttccaacactatgttgaataggagtggtgagagaaggcatccctgtcttgtgccagttttcaaagggaatgcttccagtttttgcccattcagtatgatattggctgtgggtttctcatagatagctcttattttgagatacgtcccatcaatacctaattttttgagagtttttagcatgaagcattgttgaattttgtcaaaggccttttctgcatctattgagataatgatgtggtttttgtctttggttctgtttatatgctggattacatttattgatttgcgtatgttgaaccagccttgcatcccagggatgaagcccaattgatcatggtggataagctttttgatgtgctgctggattcggtttgccagtattttattgacgatttttgcatcaatgttcattaaggatattggtctaaaattctcttttttggttgtgtctctgcccggctttggtatcaggatgatgctggcgtcgtaaaatgagttagggaggattccctctttttctattgattggaatagtttcagaaggaatggtaccagttcctccttgtacctctggtagaattcggctgtgaatccatgtggtcccagtaatgggatggctgggtcaaatggctggctggcttaccaactctttttggttggtaagcacaatttcagagcctgttattggtctattcagagattcaacttcttcctggtttagtcttgggagggtgtatgtgtcaaggaatttatccatttcttctagattttctagcttatttgtgtagaggtgtttgtagtattctctgatggtagtttgtatttctgtgggatcagcggtgatatctcctttatcattttttattgcatctatttgattcttctctcttttcttctttattagtcttactagcagtctatcaattttgttgatcttttcaaaaaaccagctcctggattcattaattttttgaagggtttttttgtgtctctatttccttcagttctgctctgattttagttatttcttgccttctgctagcttttgaatgtgtttgctcttgcttttctagttcttttaattgtgatgttagggtgtcaattttggatctttcctgctttctcttgtgggcatttagtgctataaatttccctcagcacactgctttgaatgtgtcccacagattctggtatgttgtgtctttgttctcgttggtttcaaagaacatctttatttctgccttcatttcgttaggtacccagtagtcattcaggagcaggttgttcagtttccatgtagttgagtggttttgagtgagtttcttaatcctgagttctagtttgattgtactgtggtctgagagacagtttgttataatttctgttcttttacatttgctgaatagtgctttacttccaactatgtggtcaattttggaataggtgtggtgtggtgctgaaaaaaatgtatattctgttgatttggggtggagagttttgtagatgtctattaggtccgcttggtgcagagctgagttcaattcctgggtatccttgttaactttctgtctcactgatctgcctaaggttgacagtggggtgttaaagtctcccattattattgtgtgggagtctaagtctctttgtatacctctaaggacttgctttatgaatctgggtcctcctgtgttgggtgcatatatatttaggatagttagctcttcttgttgaattgatccctttaccattatgtaatggccttctttgtctcttttgttctttgttggtttaaagtctgttttatcagagactaggattgcaacccctgcctttttttgttttccatttgcttggtagatcttcctccatccctttattttgagcctatgtgtgtctctgcatgtgagatgggtttcctgaatacagcacactgatgggtcttgactctatccaatttgccactctgtgtcttttaattggagcatttagcccatttacatttaaagttaatattgttatgtgtgaatttgatcctgtcattatgatgttagctggttattttgctcgttagttgatgcagtttcttcctagccttgatggtctttacaatttggcatgtttttgcagtggctgataccggttgttcctttccatgtttagtgcttccatcaggagctcttttagggcaggcctggtggtgacaaaatctctcagcatttgcttgtctgtaaagtattttatttctccttcacttatgaagcttattttggctggatatgcaattttgggttgaaaattcttttctttaagaatgttgaatatttgcccccagtctcttctggcttgtagggtttctgccgagagatccgctgttagtctgatgggcttccctttgatggtaacccgacctttctctctggctgcccttaacattttttccttcatttcaactttggtgaatctgacaattatgtgtcttggagttgctcttctcgaggagtatctttgtggcgttctctgtatttcctgaatctgaacgttggcctgccttgctagattggggaagttctcctggataatatcctgcagagtgttttccaacttggttccattctccccatcactttcaggtacaccaatcagacgtagatttggtcttttcacatagtcccatatttcttggaggttttgctcatttctttttattcttttttctctaaacttcccttctcacttcatttcattcatttcatcttccatcactgataccatttcttccagttgattgcatcagctcctgaggcttctgcattctttatgtagttctcgagccttggctttcagctccatcagcccctttaagcacttctctacattggttattctagttatacattcgtctaattttttttcaaagtttttaacttctttgccgttggtttgaatttcctcctgtagctcggagtagtttgattgtctgaagtcttcttctctcaactcgtcaaagtcattctccatccagctttgttctgttgctggtgaggaactgcgaacctttggaggaggagaggtgctctgctttttagagtttccagtttttctgttctgttttttccccatctttgtggttttatctacttttggtctttgatgatggtgacatacagatgggtttttggtgtggatgtcctttctgtttgttagttttccttctaacagacaggaccctcagctgcaggtctgttggagtttgctagaggtccactccagaccctgtttgcctgggtatcagcagtggtggctgcagaactggattttcatgaaccgcaaatgctgctgcctgatcggtcctctggaagttttgtctcagaagagtatccggccgtgcgaggtgtcagtctgcccctactggggggtgcctcccagttaggctgctcgggggtcagggacccacttgaggaggcagtctgcccattctcagatctccaggtgcgtgatgggagaaccactactctcttcgaagctgtcagacagggatgtttaagtctgcagaggttactgctgtctttttgtttgtctgtgccctgcccccagaagtggagcctacagaggcaggcaggcctccttgagctgtggtgggctccacccagttcgagcttcctggctgctttgtttacctaagcaagcctgggcaatggcaggtgcccttcccccagcctcactgctgcct

SEQ ID NO: 10544 - DNA, 5966 bp, Homo sapiens
gggctattttcttttctttttctttttttttttaattatactttaagttttagggtacatgtgcacaacgtgcaggtttgttacatacgtatacatgtgccatgttggtgtgctgcacccattaactcgtcatttacattaggtatatctgctaatgctatccctccccgctccccccaccccacaacaggccccagtgtgtgatgttcccgtttctgtgtccaagtgttctcattgttcaattcccacctatgagtgagaacatgcagtgtttggttttttgtccttgggatactttgctgagaacgatggtttccagcttcatccatgtccctacaaaggacataaactcatccttttatatggctgcatagtattccatggtgtatatgtgccacattttcttaatccagtctgtcattgatggacatttgggttggttccaagtctttgctattgtgagcactgctgtaataaacatacgtgtgcatgtgtctttatagcagaatgatttgtaatcctttgggtatatacccagtaatgggatggctgggtcaaatggtatttctagttctagatccctgaggaatcgccacactgacttccacaatggttgaactagtttacagtcccaccaacagtgtaaaagtgttcctatttctccacatcctctccagcacctgttgtttcctgactttttaatgatcgccattctaactggtatgagatagtatggcattgtggttttgatttgcatttctctgatggccagtgatgatgagccttttttcatgtgtcttttggctgcataaatatcttcttttgagaagtgtcgttcatatcctttgcccactttttgatggggttgtttgattttttcttgtaaatttgtttgagttcattgtagattctggatattagccctttgtcagatgagtagattgcaaaaattttctcccattctgtaggttgcctgttcactctgatggtagtttctttggctgtgcagaagctctttagtttaattatatcccatttgtcaattttggcttttgttgccattgcttttggtgttttagacgtgaagtccttgtccatgcctatgtcctgaatggtattgcctaggttttcttctagggtttttatggttttaggtctaacatttaagtctttaatccatcttgaattaatttttgtataaggtgtaaggaaggggtccagtttcagctttctacatatggctagccagttttcccagcaccatttattaaatagggaatcctttccccattgcttgtttttgtcaggtttgtcaaagatcagatagttgtagatgtgtggcattatttctgagggctctgttctgttccattggtctgtatctctgttttggtaccagtaccatgctgctttggttactgtagtcttgtagtatagtttgaagtcaggtagcatgatgcctccagctttgttcttttggcttaggattgacttggtgatgcgggctcttttttggttccatatgaactttaaagtagcttttttccaattctgtgaagaaagtcattggtagcttgatggggatggcattgaatctataaattaccttgggcagtatggccattttcactatattgattcttcctacccatgagcatggaatgttcttccatttgtttgtatcctcttatttccttgagcagtggtttgtagttttccttgaagaggtccttcacatcccttgtaagttggattcccaggtattttattctctttgaagcaattgtgaatgggagttcactcatgatttggctctctgtttgtctgttattggtgtataagaatgcttgtgatttttgcacattgattttgtatcctgagactttgctgaagttgcttatcagcttaaggagatttggggctgagatgatggggtcttctagatacacaatcatgtcatctgcaaacagggacaatttgacttcctcttttcctacttgaataacctttatttccttctcttgcctgattgccctggccagaacttccaacactatgttgaataggagtagtgagagagggcatccctgtcttatgccagttttcaaagggaatgcttccagtttttgcccattcagtatgatattggctgtgggtttgtcataaatagctcccattattttgagatatgtcccatcagtaccaatttattgagagtttttagcatgaagggttgttggattttatcaaaggccttttctgcatctgttgagataatcatgtggtttttgtctttggttctgtttatatgctggattatgtttattgatttgcatatgttgaaccagccttgcatcccagggatgaagcccacttgatcatggtggataagctttttgatgtgtttgctggattcggtttgccagtattttattgatgatttttgcatcgatgttcatcagggatattggtctaaaattctctttttctgttgtgtctctgccaggctttggtatcaggatgatgctggcctcataaaatgagttagagaagattccctctttttctattgattggaatagtttcagaaggaatggtaccagctcctccttgtacctctggtagaatttggctgtgaatctgtctggtcctggactttttttggttggtaagctattaattattgcctcaatttcagagcctgttattggtctattcagagattcaacttcttcctggtttagtcttgggagggtgtatgtgtccaggaatttatccatttcttctagattttctagtttatttgcatagaggtgtttatagtattctctgatggtagtttgtatttctgtgggatcagtggtgatatcccctttatcattttttattgcatctatttgattcttctctcttttcttctttattagtcttgctagtggtctgtcaatgttgttgatcttttaaaaaaaaccagctcctggattcattgattttttgaagggttttttgtgtctctgtctccttcagttctgctctgatcttagttatttcttgccttctgctagcttttgaatgtgtttgctcttgcttctctagttcttttaattgtggtgttagggtgtcaattttagatctttcctgctttctcttgtgggcatttagtgctataaatttccctctacacactgctttaaatgtctcccagagattctggtatgttgtatctttgttctcattggtttcaaagaacttctttatttctgccttcatttcgttatgtacccagtagtcattcaggagcaggttgttcagtttccatgtagttgagcggttttgagtgagtttcttaatcttgagttctagtttgatcgcactgtggtctgagagacagtttgttatcatttctgttcttttacatttgctgaggagtgctttacttccaactatgtggtcaattttggaacaagtgcggtgtggtgctgagaagaatgtatattttgttgaattggggtggagagttctgtagatgtctattagctccacttggtgcagggctgagttcaattcctggatatctttgttaactttctgtcttgtggatctgtctaatgttgacagtgggtgttaaagtctcccattattattgtgtgggagtctaagcctcttcgtaggcctctaaggacttcctttatgaatccgggtgctcctgtactgggtgcatatatatttaggttagttagctcttcttgttgaattgatccctttaccattatgtaatggccttctttgtctcttttgatctttgttggtttaaagtctgttttatcagagactagggttgcaacccctgccttgttttgttttccatttgcttggtagatcttcctccatccctttattttgagcctgtgtgtctctgcacgtgagaagggtttcctgaatacagcacactgatgggtcttgactctttatccaacttgccagtctgtgtcttttaattggagcatttagcccatttacatttaaggtttatattgttatgtgtgaatttgatcctgtcattgagatgttagctggttattttgctcgttagttgatgcagtttcttcctaaccttgatggtctttacgatttggcatgtttttgcagtggctggtaccagttgttcctttccatgtttagtgcttccttcaggagctcttgtagggcaggcctggtggtgacaaaatctctcagcatttgcttgtctgtaaaggattttatttctccttcacttatgaggcttagtttggctggatatgaaattctgtgttgaaaattcttttctttaagaatgttgaatattggcccccactctcttctggcttgtagaatttctgccgagcgatcagctattagtctgatgggcttccctttgtgggtaacccgacctttgtctctggctgcccttaacattttttccttcatttccactttggtgaatctgacaattaagtgtcttggagttgtccttctcaaggagtatctttgtggacttctctgtatttcctgaatttgaatgttagcctgccttgctggattggggaagttctcctgcataatttcctgcagagtgttttccaacttggttccattctccccgtcactttcaggtacaccaatcagatgtagatttggtcttttcacatagtcccatatttcttggagggtttgtttgtttctttttattcttttttctctaaacttctcttctcacttcatttcattcatttgatcttccatcaagataccctttcttccagttgatcgaattggttagtgaggcttgtgcattcatcatgtagttctcgtgccgtggttttcagctccatcaggtcctttaaggacttctgtgtattagttattctagttagccatttgtctaatcttttttcaaggtttttgacttctttgccatgggtttgaacttcctcctttagctcggagaagtttgatcgtctgaagccttcttctctcaactcatcaaagtcattctccatccagctttgttccgctgctggtgaggagctgcgttcctttggagaagaagaggttctctgatttttagaattttcagtttttctgttctgttttttccccatctttgtggttttatctacctttggtctttgatgatggtgacatgcagatggggttttggtgtggatgttctttctgtttgttagttttccttctaacagtcaggaccctcagctgcaggtctgttggagtttgccagagctcaactccagaccctgtttgcctgggtatcagcagcggaggctgcagaacagcgaatattggtgaacagcaaatgctgctgtctgatcgttcctctggaaattttgtctcagaggggtacctggccgtgtgaggtgtcagtctgcccctactggggggtgcctcccagttaggctactcgggggtcagggacccacttgaggaggcagtctgtccgttctcagatctcaagctgcatgctgggagaaccactgctgtcttccaatctgtcagacagggacatttaagtctgcagaggtttctgctgccttttgtttggctatgccctgctgccagaggtggagtctacaagaggcaggcaggcctccttgagctgtggtgggctccacccagttcgagcttcctggctgctttgtttacctactgaagtctcagcaatggcgggcgcccctcccccagccttgctgccgccttgcagtttgatctcagactgctgtgctagcaatgagcgaggctccgtgggcgtaggaccctctgagccatgcgcgggatataatctcctggtgtgccgtttgctaagaccatcggaaaagtgtagtattagggtgggaatgacccaatttttcagatgctgtctgtcacccctttccttggctagaaaagggaattccctgaccccttgtgct

SEQ ID NO: 10545 - DNA, 6410 bp, Homo sapiens
atttttttttaaattttattattattacagtttaagttttagggtacatgtgcacaatgtgcagcttagttacatatgtatacatgtgccatgctggtgtgctccacccattaactcgtcatttagcattaggtatatctcctaatgctatccctccctccttcccccaccccacaacagtccccagagtgtgatgttccccttcctgtgtccatgtgttctcattgttcaattcccacctatgagtgagaacatgcggtgtttggttttttgtccttgtgatagtttactgagaatgatgatttccagtttcatccgtgtccctacaaaggacatgaactcatcatcttttatggctgcatagtattccatggtgtatatgtgccacattttcttaatccagtctatcattgttggacatttggcttggttccaagtctttgctattgtgaatagtgctgcaataaacatacgtgtgcatgtgtctttatagcagcatgatttataatcctttgggtatatacccagtaatgtgatgactgggtcaaatggtatttctagttctagatccctgaggaatcgccacaccgacttccacaatggttgaactagtttacactcccaccaacagtgtaaaagtgttcctatttctccacatcctctccagcacctgttgtttcctgacttttgaatgattgccattctaactggtgtgagatggtatctcattgtggttttgatttgcatttctctgatggccagtgatggtgagcattttttcatgtgttttttggctgcataaatgtcttcttttgagaagtgtctgttcatgttcttcacccactttttgatggggttgtttgtttttttcttgtaaatttgtttgagttctttgtagattccggatattagccctttgtcagatgagtaggttgcgaaaattttctcccattctctaggttgcctgttcactctgatggtagtttcttttgctgtgcagaagctctttagttgaattagatcccatttgtcaactttggcttttgttgccattgcttttggtgttttagacatgaagtccttgcccatgcctatgtcctgaatggtattgcctaggttttcttctagggtttttatggttttaggtcaaacgtttaagtctttaatccatcttgaattaatttttgtataagatgtaaggaagagatccagtttcagctttctccatatggctagccagttttcccagcaccatttattaaatagggaatcctttccccattgattgtttttctcaggtttgtcaacgatcagatagttgtagatatgcggcattatttctgagggctctgttctgttccattgatctatatctctgttttggtaccagtaccatgctgttttggttactgtagccttgtagtatagtttgaagtcaggtagcgtgatgcctccagctttgttcttttggcttaggattgacttggcaatgtgggctcttttttggttccatatgaactttaaagtagttttttccaattctgtgaagaaagtcattggtagcttgatggggatggcattgaatctgtaaattaccttgggcagtatggccattttcacgatattgattcttcctacccatgagcatggaatgttcttccatttgtttgtatcctcttttatttcattgagcagtggtttgtagttctccttgaagaggtccttcatgtcccttgtaagttggattcctagatattttattctctttgaagcaattgtgaatgggagttcactcatgatttggctctctgtttgtctgttattggtgtataagaaagcttgtgatttttgtacattgattttgtatcctgggactttgctgaagttgcttatcagcttaaggagattttgggctgagacaatggggttttctagatatacaatcatgtcatctgcaaacagggacaatttgacttcctctttttctaattgaataccctttatttccttctgcctaattgccctggccagaacttccaacactatgttgaataggagtggtgagagagggcatccctgtcttgtggcagttttcaaaggaaatgcttccagtttttgcccattcagtatgatattggctgtgggtttgtcatagatagctcttattattttgagatacgtcccatcaatacctaatttattgagagtttttagcatgaagtgttgttaaattttgtcaaaggccttttctgcatctattgagataatcatgtggtttttgtctttggctctgtttatatgctggattacatttattgatttgcatatattgaaccagccttgcatcctagggatgaagcccacttgatcatggtggataagctttttgatgtgctgctggattcagtttgccagtattttattgaggatttttgcatcaatgttcatcaaggatattggtctaaaattctcttttttggttgtgtctctgccaggctttggtatcaggatgatgctggcctcataaaatgagttagggagggttccctctttttctattgattggaatagtttctgaaggaatggtaccagttcctccttgtacctctggtagaatttggctgtgaatccatctggtcctggactctttttggttggtaagctattgattattgccacaatttcagatcctgttattggtctattcagagattcagcttcttcctggtttagtcttgggagggtgtatgtgtcgaggaatttatccatttcttctagattttctagtttatttgcgtagaggtgtttgtagtattctctgatggtagtttgtatttctgtgggatcggtggtgatgttccctttatcattttttattgcatctatttgattcttctctgttttcgtctttattagtcttgctagcggtctatcaattttgttgatcctttcaaaaaaccagctcctgaattcattaattttttgaagggttttttgtgtctctatttccttcagttctgctctgattttagttatttcttgccttctgctagcttttgaatgtgtttgctcttgcttctctagttcttttaattgtgatgttagggtgtcaattttggatctgtcctgctttctcttgtgggcatttagtgctataaatttccctctacacactgctttgaatgtgtcccagagattctggtatgttgtgtctttgttctcattggtttcaaagaacatctttttttctgccttcatttcattatatacccagtagtcattcaggagcaggttgttcagtttccatgtagttgagtggttttgagtgagtttcttaatcctgagttctagtttcattgcactgtggtctgagagacagtttgttataatttctgttcttttacatttgctgaggagagctctacttccaactatgtggtcaattttggaataggtgtggtgtggtgctgaaaaaaatgtatattctgttgatttggggtgcagagttctgtagatgtctattaggtccgcttggtgcagagctgagttcaattcctggatatccttgttaactttctgtttcgttgatctgtctaatgttgacagtggggtgttaaagtctcccattattattgtgtgggagtctaagtctctttgtaggtccctcaggacttgctttatgaatctgggtgctcctgtattgggtgcatatatatttaggatagttagctcttcttgttgaattgatccctttaccattatgtaatggccttctttctctcttttgacctttgttggtttaaagtctgttttatcagacactaggattgcaacccctgcctttttttgttttccatttgcttggtagatcttcctccatccttttattttgagcctatttgtgtctctgcacgtgagatgggtttcctgaatacagcacactgatgggtcttgaccgtttatccaatttgccagtctgtgtcttttaattggagcatttagtccatttacatttaaagttaatattgttatgtgtgaatttgatcctgtggttatgatgttagctggttatcttgctcgttagttgatgcaggttcttcccagcctcgacggtctttacaatttggcatgtttttgcagtgggtggtacggtttgttcctttccatgtttagtgcttccttcaggagctcttttagggcaggcctggtggtgagaaaatctctcagcatttgcttgtctgtaaaggattttatttctccttcacttatgaagcttagtttggctggatatgaaattctgggttgaaaattcttttctttaagaatgttgactattgtcccccactctcttctggcttgtggagtttctgccgagagatccgctgttagtctgatgggcttccctttgtgggtaacccggcctttctctctggctgcccttaacattttttccttcatttcaactttggtgaatctgacaattatgtgtcttggagttgctcttctcgaggagtatctttgtggcgttctctgtatttcctgaatctgaacgttggcctgccttgctagattggggaagttctcctggataatatcctgcagagtgttttccaacttggttccatcctccccgtcactttcaggtacaccaatcagacgtagatttggtcttttcacatagtcccatatttcttgaaggctttgttcgtttctttttattcttttttctctaaacttcccttctcacttcatttcattcatttcatcttgcatcactgataccctttcttccagttgatcgcattggctcctgaggcttctgcattcttcatgtagttctcgatccttggctttcagctccatcagctcctttaagcacttctctctattgattattctagttatacattcgtctaaatttttttcgaagtatttaacttctttgccttcggtttgaatttcctcctgtagctcggagtactttgattgtctgaagtcttcttctctccactcgtcaaagtcattctccgtccagctttgttccattgctggtgaggaactgcgttcctttggaggaggagaggcactctgctttttagagtttccagtttttttgctctgttttttccccatctttgtggttttatctacttttggtctttgatgatggtgatgtacagatgggtttttggtgtggatgtcctttctgtttgttagttttccttctaacagacaggaccctcagctgcaggtctgttggagtttgctagaggtccactccagaccctgtttgcctgggtatcagcagcggtagcttcagaactgcggattttcatgaaccacgaatgctgctgtctgatcgttcctctggaagttttgtctgaaaggagtacccggccgtgtgagatgtcagtctgcccctactggggggtgcctcccagttaggctgctcgggggtcaggggtcagggacccacttaaggaagcagtctgcccattctcagatctccagctgtgtgcttggagaaccactactctcttcaaagctgtcaaacagggacatttaagtctgcagaggttactgctgtctttttgtttgtctgtgccttgcccccagaggtggagcctacaaaggcaggcaggcctccttgagttgtggtgggctctacccagttcgagcttcccggctgctttatttacctaagaaagcctgggcaatggcgggcgcccctcccccagcctcgctgccaccttgcagtttgatctcagactgctgtgctagcagtcagtgagactccgtgggtgtaggaccctccgagccaggtgcgggatataatctcgtggtgcaccgttttttaagcccatcggaaaagcgcagtattagggtgagattgacccgattttccaggtgccatctgtcacccctttctttgactaggaaagggaactccctgaccccttgcgcttcccgagtgaggcaatgcctcgccctgcttcggctcccgcacggtgcgctgcacccactgtcctgcacccactgtctggcactccctagtgagatgaacccagtacctcagatggaaatgcagaaatcacccgtcttctgcattgcttactctgggagctgtagaccggagctgttcctattcggccatcttggctgccagcttctttgtgtagtttcattaccacttgagatgcaattaaatttgttttagttttcagtttgagggaatttgtttttctttttagttcaactttagtttttgagtatgtataattttaagcagcattaatagagtataatcttttcaacactgcccaaaacatgacacatctagaataatctgtttacttctttttgccatattttaggaatggccagcccagtatcaagggtgggatgatacg

SEQ ID NO: 10546 - DNA, 9780 bp, Homo sapiens
ccaggctggagtgcagtggcgcgatctcggctcactgcaagctccacctcccgggttcacaccattctcctgcctcagcctaccaagtagctgggactacaggcgcctgccaccatgcccggctaattttttttgtatttttttttttttagtagagacggggtttcaccgtgttagccaggatgatcttgatttcctgacctcgtgatccgcccacctcggcctcccaaagtgctgggattacaggcgtgagccaccgtgcccggccgaggttttttctctgagctttttactctgaagatgaagcccagctgtaaattatattatttttgtttctgagacacagtctcactgtgtctcccaggccagagtggtcatggtaggatggtaggtcatggtagaacagaaggagcatggaccatgtgaacctggacttgaacactggctccacaatttagcagccacgtatctctgagggagctaatcagcctcccagagcctttatttcctcaattataaaatgaagataataacaatctaagaaggttatgggtggttactaaaaaatgttagttttaaaaacagtagagcggggtgttcacagcacttgggaggtggctcacacctgtaatccccacactttggaaggccaggatgggaagattgcttgggcccgggaattcaaaaccagcctgggcaacatagagagaccctctctctacaaagaaattaaagaaaaaaaaattagccgtgtgcagtggcatacacttgttgtcccagctactcaggaggctgaggtagacggatcacttcagcacaggaggtcaagaccacagtgagccatgatcgtgccactgcactccagcctgggtgacagagcaagaccctgtctcaaaaacaaaaaacaaaacaaaacaaaaacacaaaaaaaagaacagtagtaataacctgcattgcaactgattacctatcacgctagcatatagggaacataattataactgcttaaaattagttgagcaagccaggctcagtggcatgcgcctggaatcccaaccacttgggaggctcaggcagaaggaccccttgagcttagacattcaaagtgtagccaggtgcagcggctcatgcctgtaatcccagcactttgggagactgaggagggtggatcacttgagatcaggagatcgagaccagcctgaccaacttggtgaaaccccatctctactaaaaatacaaaaattagccaggcatgttggcacacgcctgtaatcccagctactcgggaggctgaggcacgagaatcgcttgaacccgggaggcagaggttgcagtgagctgagattgcaccactgcactccagcctgggcaacagagtgagacccctcctgtaagcaataaaatacaatttgagaatgtataaccaaatcactctgatatccagtaatctccctattgctttaggaaccttaatatttaatgacttgaaagtaatcttttatcaagcagtgttccagtcaatgaaatgtaatttataatactgtactgtatgactagacttcagtaaaaattacttaattactgaagtctttagccatttttcttactttcaaggtctcagccagaaaactgaaaccaactccaccacggccacggagcctccatgaaagaatattagaagaaattaaagcagaaagaaagctgcggcctgtatcaccagaggagattagacgtagcagattaggtgagtccactgcttcctgtactcagtctagagtcatcccctgggaaaaggatctttatacacccagccccatgaaagtaaagagttctcattccttgttcatttctctgtatctcactcacttgttctccctctcactctctcgtatacataccccctctcactctctcatatacataccccctcacacttacttgaaatttatagggtgggaaatccttccgcctatctaatactgaactatatgagaacatcgtgccgtaattgaaagagctctgccagtctctaggctgaggttttaggaaagtctctttacctctctgagcatcattttcttcattggcagaagggggataaaaattcctcttaacctacattatgagttttatgtaagaattaaataggattatggtaaaaaaatactttataaattgtattgcatatacaaagataacgtattatattttaaaaatatagatgatagatgtacagttttaccttatgtttgtttattatgggtttaaagatacccgtaatattatgtcatgaaagcatgttattaccggatattacttaacttatttctaaacttcctttacagttattattttttattttttagtgtatactacaagcacatattgattttgatttataggaaggccatattataagatgtctgtaaacatttttatttatacgactgtctttcagtttgtaagactaaaaatgcccaaagaatccagagaaactgcctttacgaaaacggtctatagtggtaccttaacaggaaaggatctggttttgtgacccccactctgctagttttctcctctgatctcttcttctgcctttttcagactcttggacttcaaagtttctatcctggcttctgttctccctaagcaaccataccctcttccatggtttttgtttctgactaccttccagctcacagtctacattgcagatctgtaaaaatgcagactcatacgtccagctgtctgctagatagagccttatcatatcctacaagcaagacaaacccaatatttccacaagtgaactcatcctgtctctccccaaaccattgcattttgttttcccaatgtagaaaccttaacataatctttgactcttacccgatggccaacccctgttgattttacttcctctggatctttttaatcttctactcttctcagcccagcagccactatcccagccgaggctgtcatctgtcgcagcagcactgattgtcctcctgcttccagtcttgaattcttccaccattccatattgattttccttgtttaatcctgacccttctgttgtgtgaccttcgtgatgacagggcccatgtctgtcttgttcgttgttgtgtccctagtacagcactgggctgtacagagtactctcatgggttgaaataattaaatgtactttctggtgacaaagcttcagagtggatcacttgagcccaggagatcaaggctgtagtgagctgtgattgcaccactccactctagcctgggtgaaccaagattccatggaaagaaagaaagaaaaaaaaaagatcagttgactgtatatgtgtgggttcatttctggactctttgttctgttccactgttgtttgccagtaccatgctgtttttgttattgtaactttataatatattgtaagatcagaaagtgtgatgtctctggctttgttattctttctcaagattgattggctattcattgtcttttgtggttccataggaattttaggattatcttctacttctgtaaaaaataccattaggattttcttttttttttttttttttaaattaaacagttttttgggggtgtaaccagcatacaataagttcacatattaaacgtacacaaattggaagagttttgacacatgcaaacagccatgaaaccatcataacaattaaaataacaaacatttccatgttggcttggtatggtttttttttttttttcccatggtgttttttttttattatactctaagttttagggtacatgtgcacattgtgcaggttagttacatatgtatacatgtgccatgcttgtgcgctgcacccactaatgtgtcatctagcattaggtatatttcccaatgctatccctcccccctcccccgaccccaccacagtccccagagtgtgatattccccttcctgtgtccatgtgatctcattgttcaattcccacctatgagtgagaatatgcggtgtttggttttttgttcttgcgatagtttactgagaatgatggtttccaatttcatccatgtccctacaaaggatatgaactcatcattttttatggctgcatagtattccatggtgtatatgtgccacattttcttaatccagtctatcattgttggacatttgggttggttccaagtctttgctattgtgaatagtgccgcaataaacatacgtgtgcatgtgtctttatagcagcatgatttatactcatttgggtatatacccagtaatgggatggctgggtcaaatggtatttctagttctagatccctgaggaatcgccacactgacttccacaatggttgaactagtttacagtcccaccaacagtgtaaaagtgttcctatttctccgcatcctctccagcacctgttgtttcctgactttttaatgattgccattctaaccggtgtgagatgatatctcatagtggttttgatttgcatttctctgatggccagtgatgatgagcatttcttcatgtgttttttggctgcataaatgtcttcttttgagaagtgtctgttcatgtccttcgcccactttttgatggggttgtttgtttttttcttgtaaatttgtttgagttcattgtagattctggatattagccctttgtcagatgagtaggttgcaaaaattttctcccatgttgtaggttgcctgttcactctgatggtagtttcttttgctgtgcagaagctctttagtttaattagatcccatttgtcaattttgtcttttgttgccattgcttttggtgttttggacatgaagtccttgcccacgcctatgtcctgaatggtaatgcctaggttttcttctagggtttttatggttttaggtttaacgtttaaatctttaatccatcttgaattgatttttgtataaggtgtaaggaagggatccagtttcagctttctacatatggctagccagttttcccagcaccatttattaaatagggaatcctttccccattgcttgtttttctcaggtttgtcaaagatcagatagttgtagatatgcggcattatttctgagggctctgttctgttccattgatctatatctctgtttttgtaccagtaccatgctgttttggttactgtagccttgtagtatagtttgaagtcaggtagtgtgatgcctccagctttgttcttttggcttaggattgacttggcgatgcgggctcttttttggttccatatgaactttaaagtagttttttccaattctgtgaagaaagtcattggtagcttgatggggatggcattgaatctgtaaattaccttgggcagtatggccattttcacgatattgattcttcctacccatgagcatggaatgttcttccatttatttgtctcctcttttatttccttgagcagtggtttgtagttctccttgaagaggtccttcacatcccttgtaagttggattcctaggtattttattctctttgaagcattgtgaatgggagttcacccatgatttggctctctgtttgtctgttgttggtgtgtaagaatgcttgtgatttttgtacattgattttgtatcctgagactttgctgaagttgcttatcagcttaaggagattttgggctgagacgatggggttttctagataaacaatcatgtcgtctgcaaacagggacaatttgacttcctcttttcctaattgaataccctttatttccttctcctgcctgattgccctggccagaacttccaacactatgttgaataggagcggtgagagagggcatccctgtcttgtgccggttttcaaagggaatgcttccagtttttgcccattcagtatgatattggctgtgggtttgtcatagatagctcttattattttgaaatacatcccatcaatacctaatttattgagagtttttagcatgaagggttgttgaattttgtcaaaggctttttctgcatctattgagataatcatgtggtttttgtctttggctctgtttatatgctggattacatttattgatttgcgtatattgaaccagccttgcatcccagggatgaagcccacttgatcatggtggataagctttttgatgtgctgctggattcggtttgccagtattttattgaggatttttgcatcaatgttcatcaaggatattggtctaaaattctcttttttggttgtgtctctgcccggctttggtatcagaatgatgctggcctcataaaatgagttagggaggattccctctttttctattgattggaatagtttcagaaggaatggtaccagttcctccttgtacctctggtagaattcggctgtgaatccatctggtcctggactctttttggttggtaaactattgattattgccacaatttcagagcctgttattggtcgattcagagattcaacttcttcctggtttagtcttgggagagtgtatgtgtcgaggaatgtatccatttcttctagattttctagtttatttgcgtagaggtgtttgtagtattctctgatggtagtttgtatttctgtgggatcggtggtgatatcccctttatcattttttattgtgtctatttgattcttctctctttttttctttattagtcttgctagcggtctatcaattttgttgatcctttcaaaaaaccagctcctggattcattgagtttttgaagggttttttgtgtctctatttccttcagttctgctctgattttagttatttcttgccttctgctagcttttgaatgtgtttgctcttgcttttctagttcttttaattgtgatgttagggtgtcaattttggatctttcctgctttctcttgtaggcatttagtgctataaatttccctctacacactgctttgaatgcgtcccagagattctggtatgtggtgtctttgttctcgttggtttcaaagaacatctttatttctgccttcatttcgttatgtacccagtagtcattcaggagcaggttgttcagtttccatgtagttgagcggctttgagtgagattcttaatcctgagttctagtttgattgcactgtggtctgagagatagtttgttataatttctgttcttttacatttgctgaggagagctttacttccaactatgtggtcaattttggaataggtgtggtgtggtgctgaaaaaaatgtatattctgttgatttggggtggagagttctgtagatgtctattaggtctgcttggtgcagagctgagttcaattcctgggtatccttgttgactttctgtctcgttgatctgtctaatgttgacagtggggtgttaaagtctcccattattaatgtgtgggagtctaagtctctttgtaggtgactgaggacttgctttatgaatctgggtgctcctgtattgggtgcataaatatttaggatagttagctcctcttgttgaattgatccctttaccattatgtaatggccttctttgtctcttttgatctttgttggtttaaagtctgttttgtcagagactaggattgcaacccctgcctttttttgttttccattggcttggtagatcttcctccatccttttattttgagcctatgtgtgtctctgcacgtgagatgggtttcctgaatacagcacactgatgggtcttgactctttatccaacttgccagtctgtgtcttttaattgcagaatttagtccatttatatttaaagttaatattgttatgtgtgaatttgatcctgtcattatgatgttagctggtgattttgctcattagttgatgcagtttcttcctagtctcgatggtctttacattttggcatgattttgcagcggctggtaccggttgttcctttccatgtttagcgcttccttcaggagctcttttagggcaggcctggtggtgacaaaatctctcaacatttgcttgtctataaagtattttatttctccttcacttatgaagcttagtttggctggatatgaaattctgggttgaaaattcttttctttaagaatgttgaatattggcccccactctcttctggcttgtagggtttctgccgagagatccgctgttagtctgatgggctttcctttgagggtaacccgacctttctctctggctgcccttaacattttttccttcatttcaactttggtgaatctgacaattatgtgtcttggagttgctcttctcgaggagtatctttgtggcgttctctgtatttcctgaatctgaacgttggcctgccttgctagattggggaagttctcctggataatatcctgcagagtgttttccaacttggttccattctccacatcactttcaggtacaccaatcagacgtagatttggtcttttcacatagtcccatatttcttggaggctttgctcatttctttttattcttttttctctaaacttcccttctcgcttcatttcattcatttcatcttccattgctgataccctttcttccagttgatcgcatcggctcctgaggcttctgcattcttcacgtagttctcgagccttggttttcagctccatcagctcctttaagcacttctctgtattggttattctagttatacattcttctaaatttttttcaaagttttcaacttctttgcctttggtttgaatgtcctcccgtagctcagagtaatttgatcgtctgaagccttcttctctcagctcgtcaaaatcattctccatccagctttgttctgttgctggtgaggaactgcgttcctttggaggaggagaggcgctctgcgttttagagtttccagtttttctgttctgttttttccccatctttgtggttttatctacttttggtctttgatgatggtgatgtacagatgggttttcggtgtagatgtcctttctggttgttagttttccttctaacagacaggaccctcagctgcaggtctgttggaataccctgccgtgtgaggtgtcagtgtgcccctgctggggggtgcctcccatttaggctgctcgggggtcaggagtcagggacccacttgaggaggcagtctgcccgttctcagatctccagctgcgtgctgggagaaccactgctctcttcaaagctgtcagacagggacacttaagtctgcagaggttactgctgtctttttgtttgtctgtgccctgcccccagaggtggagcctacagaggcaggcaggcctccttgagctgtggtgggctccacccagttcgagcttcccggctgctttgtttacctaagcaagcctgggcaatggcgggcgcccctcccccagcctcgttgccgccttgcagtttgatctcagactgctgtgctagcaatcagcgagattccgtgggcgtaggaccctccgagccaggtgtgggatatagtctcgtggtgcgccgtttcttaagccggtctgaaaagcgcaatattcgggtgggagtgacccgattttccaggtgcgtccgtcacccctttctttgactcggaaagggaactccctgacccttgcgcttcccaggtgaggcaatgcctcgccctgcttcggctcgcgcacggtgcgcacacacactggcctgcgcccactgtctggcactccctagtgagatgaacccggtacctcagatggaaatgcagaaatcaccgtcttctgcgtcgctcacgctgggagctgtagaccggagctgttcctattcggccatcttggctcctccccag

SEQ ID NO: 10547 - DNA, 6071 bp, Homo sapiens
cttcttcttttttttttaaagtatttcttttttttttttaattttttttttattatactttaagttttagggtacatgtgcacattgtgcaggttagttacatatgtatacatgtgccatgctggtgcgctgcacccactaacgtgtcatctagcattaggtatatctcccaatgctatccctcccccctcccccgaccccaccacagtccccagagtgtgatattccccttcctgtgtccatgtgatctcattgttcaattcccacctatgagtgagaatatgcggtgtttggttttttgttcttgcgatagtttactgagaatgatggtttccaatttcatccatgtccctacaaaggacatgaactcatcattttttatggctgcatagtattccatggtgtatatgtgccacattttcttaatccagtctatcattgttggacatttgggttggttccaagtctttgctattgtgaataatgccgcaataaacatacgtgtgcatgtgtctttatagcagcatgatttatagtcatttgggtatatacccagtaatgggatggctgggtcaaatggtatttctagttctagatccctgaggaatcgccacactgacttccacaatggttgaactagtttacagtcccaccaagagtgtaaaagtgttcctatttctccacatcctctccagcacctgttgtttcctgactttttaatgattgccattctaactggtgtgagatgatatctcatagtggttttgatttgcatttctctgatggccagtgatgatgagcattttttcatgtgttttttggctgcataaatgtcttcttttgagaagtgtctgttcatgtccttcgcccactttttgatggggttgtttgttttcttcttgtaaatttgtttgagttcattatagattctggatattagccctttgtcagatgagtaggttgcgaaaattttctcccatgttgtaggttgcctgttcactctgatggtagtttcttttgctgtgcagaagctctttagtttaattagatcccatttgtcaattttggcttttgttgccattgcttttggtgttttggacatgaagtccttgcccacgcctatgtcctgaatggtaatgcctaggttttcttctagggtttttatggttttaggtctagcgtttaaatctttaatccatcttgaattgatttttgtataaggtgtaaggaagggatccagtttcagctttctacatatggctagccagttttcccagcaccatttattaaatagggaatcctttccccattgcttgtttttctcaggtttgtcaaagatcagatagttgtagatatgcggcattatttctgagggctctgttctgttccattgatctatatctctgttttggtaccagtaccatgctgttttggttactgtagccttgtagtatagtttgaagtcaggtagtgtgatgcctccagctttgttcttttggcttaggattgacttggtgatgcgggctcttttttggttccatatgaactttaaagtagttttttccaattctgtgaagaaagtcattggtagcttgatggggatggcattgaatctgtaaattaccttgggcagtatggccattttcacgatattgattcttcctacccatgagcatggaatgttcttccatttgtttgtgtcctcttttatttccttgagcagtggtttgtagttctccttgaagaggtccttcacatcccttgtaagttggattcctaggtattttattctctttgaagcaattgtgaatgggagttcactcatgatttggctctctgcttgtctgttgttggtgtataagaatgcttgtgatttttgtacattgattttgtatcctgagactttgctgaagttgcttatcagcttaaggagattttgggctgagacaatggggttttctagataaacaatcatgtcgtctgcaaacagggacaatttgacttcctcttttcctaattgaataccctttatttccttctcctgcctgattgccctggccagaacttccaacactatgttgaataggagtggtgagagagggcatccctgtcttgtgccagttttcaaaggtaatgcttccagtttttgcccattcagtatgatattggctgtgggtttgtcatagatagctcttattattttgaaatacgtcccatcaatacctaatttattgagagtttttagcatgaagggttgttgaattttgtcaaaggctttttctgcatctattgagataatcatgtggtttttgtctttggctctgtttatatgctggattacatttattgatttgcgtatattgaaccagccttgcatcccagggatgaagcccacttgatcatggtggataagctttttgatgtgctgctggattcggtttgccagtattttattgaggatttttgcatcaatattcatcaaggatattggtctaaaattctcttttttggttgggtctctgcccggctttggtatcagaatgatgctggcctcataaaatgagttagggaggattccctctttttctattgattggaatagtttcagaaggaatggtaccagttcctccttgtacctctggtagaattcggctgtgaatccatctggtcctggactctttttggttggtaaactattgattattgccacaatttcagagcctgttattggtctattcagagattcaacttcttcctggtttagtcttgggagagtgtatgtgttgaggaatttatccatttcttctagattttctagtttatttgcgtagaggtgtttgtagtattctctgatggtagtttgtatttctgtgggatcggtggtgatatcccctttatcattttttattgtgtctatttgattcttctctctttttttctttattagtcttgctagcggtctatcaattttgttgatcctttcaaaaaaccagctcctggattcattgattttttgaaggtttttttgtgtctctatctccttcagttctgctctgattttagttatttcttgccttctgctagcttttgaatgtgtttgctcttgcttttctggttcttttaattgtgatgttagggtgtcaattttggatctttcctgctttctcttgtgggcatttagtgctataaatttccctctacacactgctttgaatgcgtcccagagattctggtatgtggtgtctttgttctcgttggtttcaaagaacatctttatttctgccttcatttcgttatgtacccagtagtcattcaggagcaggttgttcagtttccatgtagttgagcggctttgagtgagattcttaatcctgagttctagtttgattgcactgtggtctgagagatagtttgttataatttctgttcttttacatttgctgaggagagctttacttccaactatgtggtcaattttggaataggtgtggtgtggtgctgaaaaaaatgtatattctgttgatttggggtggagagttctgtagatgtctattaggtccgcttggtgcagagctgagttcaattcctgggtatccttgttgactttctgtctcatggatctgtctaatgttgacagtggggtgttaaagtctcccattattaatgtgtgggagtctaagtctctttgtaggtcactcaggacttgctttatgaatctgggtgctcctgtattgggtgcataaatatttaggatagttagcctctcttgttgaattgatccctttaccattatgtaatggccttctttgtctcttttgatctttgttggtttaaagtctgttttatcagagactaggattgcaacccctgcctttttttgttttccattggcttggtagatcttcctccatccttttattttgagcctatgtgtgtctctgcacgtgagatgggtttcctgaatacagcacactgatgggtcttgactttttatccaacttgccagtctgtgtcttttaattgcagaatttactccatttatatttaaagttaatattgttatgtgtgaatttgatcctgtcattatgatgttagctggtgattttgctcgttagttgatgcagtttcttcctagtctcgatggtctttacattttggcatgattttgcagcggctggtaccggttgttcctttccatgtttagcgcttccttcaggagctcttttagggcaggcctggtggtgacaaaatctctcagcatttgcttgtctataaagtattttatttctccttcacttatgaagcttagtttggctggatatgaaattctgggttgaaaattcttttctttaagaatgttgaatattggcccccactctcttctggcttgtagggtttctgccgagagatccgctgttagtctgatgggctttcctttgagggtaacccgacctttctctctggctgcccttcacattttttccttcatttcaactttggtgaatctgacaattatgtgtcttggagttgctcttcttgaggagtatctttgtggcgttctctgtatttcctgaatctgaacgttggcctgccttgctagattggggaagttctcctggataatatcctgcagagtgttttccaacttggttccattctccacatcacttttaggtacaccaatcagacgtagatttggtcttttcacatagtcccatatttcttggaggctttgctcatttctttttattcttttttctctaaacttcccttcttgcttcatttcattcatttcatcttccattgctgataccctttcttccagttgatcgcatcggcttctgaggcttctgcattcttcacgtagttctcgagccttggttttcagctccatcagctcctttaagcacttctctgtattggttattctagttatacattcttctaaatttttttcaaagttttcaacttctttgcctttggtttgaatgtcctcccgtagctcagagtaatttgatcgtctgaagccttcttctctcagctcgtcaaaatcattctccatccagctttgttctgttgctggtgaggaactgcgttcctttggaggaggagaggcgctctgcgttttagagtttccagtttttctgttctgttttttccccatctttgtgattttatctacttttggtctttgatgatggtgatgtacagatgggttttcggtgtagatgtcctttctggttgttagttttccttctaacagacaggaccctcagctgcaggtctgttggaataccctgccgtgtgaggtgtcagtgtgcccctgctggggggtgcctcccagttaggctgctcgggtgccaggggtcagggacccacttgaggaggcagtctgcccgttctcagatctccagctgcgtgctgggagaaccactgctctcttcaaagctgtcagacagggacacttaagtctgcagaggttactgctgtctttttgtttgtctgtgccctgcccccagaggtggagcctacagaggcaggcaggcctccttgagctgtggtgggctccacccagttcgagcttccgggctgctttgtttacctaagcaagcctgggcaatggcgggcgcccttcccccagcctcgctgccgccttgcagtttgatctcagactgctgtgctagcaatcagcgagattccgtgggcgtaggaccctctgagccaggtgtgggatatagtctagtggtgcaccgttttttaagccggtctgaaaagcgcaatattcgggtgggagtgacccgattttccaggtgcgtccgtcacccctttctttgactcggaaagggaactccctgaccccttgcgcttcccaggtgaggcaatgcctcgccctgcttcggctcgtgcacggtgcgcgcacacactggcctgcgcccactgtctggcactccctagtgagatgaacccggtacctcagatggaaatgcagaaatcacccgtcttctgcgtcgctcacgctgggagctgtagacaggagctgttcctattcggccatcttggctcctccccta

SEQ ID NO: 10548 - DNA, 21577 bp, Homo sapiens
tatccctcctccctccccccaccccatgacaggcacctttatgtgatgttccccaccctgtgtccaagtgttctcattgttcaatactcacctatcagtgagaacatgtggtgtttggttttctgtccttgggatagtttgatcagaatgatggtttccagcttcacccatgtccctacaaaggacatgaactcatccttttttatggctgcatagtattccatggtgtatatgtgccacattttcttaatccagtctatcattgatggacatttgggttggttccaagtctttgctattgtgaatagtgccacaataaacatacatgtgcatgtgtctttatggcagcatgatttataatcctttggttatatacccagtaatcggatggctgggtcaaatggtatttctagctctagatccttgaggaattgctacactgtcatccacaatggtggaactagtttacagtcccaccaacagtgtaaaagtgttcctatttctccacatcctctccagcacctgttgtttcctgactttttaatgattgccattctaactggtgtgagatggtatctcattgtggttttgatttgcatttctcagatggacagtgatgctgagcattttttcatgggtctgttggctgcataaatgtcttcttttgagaagtgtctgttcatatcctttgcccactttttgacggggttgtttgattttttcttgtaaatttgtttaagttctttgtagattctggtaattagccctttgtcagatgggtagattgcaaaaattttctcccattctgtaggttgcctgttcactctgatggtactttcttttgctctgcagaggcccttagtttaattagatcccattttgtcaattttggcttttgttgccattgcttttggtgttttaatcatgaagtccttgcccatgtctatgtcctgaatggtactgcctaggttttcttctagggtttttatggttttacatataacatttaagtctttaatccatcttgaattaatttttctataaagtgtaaggaagggattcagtttcacctttctacatatggctagccagttttcccagcaccatttattaaatagggaatcctttccccatttcttgtttttgtcaggtttgtcaaagatcagatggttgtaaatgtgtggtgttatttctgaggcctctgttctgttccattgatctacatctctgttttggtaccagtaccatgctgttttggttactgtagccttgtagtatagtttgaagtcaggtagcatgatgcctccagctttgttcttttggcttagtgttgtcttggcaatgcaggctcttttttggttccatatgaattttaaagtagtttttcccaattctgtgtagaaagtcactggtagcttgatggggatggcactgaatctataaattaccttgggcaatatggccatttttgcgatattgattcttcctatccatgagcatggaatgttcttccatttgtttgtgtcctcttttattttgttgagcagtggtttgtagttttccttgaagagttccttcacatcccttgtaaactggattcctaggtattttattctctttgaagcaattgtgaatgggagatcactcataatttggctctctgtttgtctgttattggtgtataggactgcttgtgatttttgcacattgattttgtatcctgagactttgctgaagttgcttctcagcttaaggagattttgggctgagacgacggggttttctaaatgtacaatcatgtcatctgcaaacagggaaaatttgacttcctcttttcctaatcgaatacactttatttctttctcttgcctgattgccctggccagaacttccaacactatgttgaataggagtggtgagagagggcattcctgtcttgtgccagttttcaaagggaatgcttccagtttttgcccattcagtatgatattggctgtgggtttgtcataaatagctcttattattttgacatatgtcccatcaatacctagtttattgagagtttttagcatgaagggctgttgaattttgtcgaaggccttttctgcatctattgagataatcatgtggtttttgtctttggttctgtttatatgatggattatgtttattgatttctgtatgttgaaccagccttgcatcccagggatgaagccaacttgatcgtggtggataagctttttgatgtgctgctggatttggtttgccagtattttattgaggatttttgcatcaatattcaacagggatattggtctaaaattctccttttttttgttgtgtctctgccagtctttggtatcaggatgatgttggcctcataaaatgaattagggaggattccctctttttctattgattgggattgtttcagaagaaatggtaccagctcctctttgtacctctggtagaatttggctgtgaatttgtctagtcctggactttttttggttcgtaggctattaattattgcctcaatttcagaacctgttattgatctattcagggattcaacttctttccagtttagtcttgggagggtgtatgtgtccaggaatttatccatttcttctagattttctagtttatctgcatagaggtgtttatagtattctctgatggtagtttgtatttctgtgggatcggtggtgttatcctctttttcattttttattgcatctgtttgattcttctctcttttcttctttattagtcttgctagtggtctatcaattttgttgatcttttcaaaaacccagctcttggattcatttattttttgaagggtttttttgtgtctctatctccttcagttctgctctgatcttagttatttcttgccttctgctagcttttgaatgtgtttgctcttgcttctctagtacttttaattgtgatgttagggtgtcaattttaaatctttcctgctttctcttgtgggcatttagtgctataaatttccctctacacactgctttaaatgtgtcccagagattctggtatgttgtttctttgttctcattggtttcaaagaacatctttatttctgccttcatttcgttatgtacccagtagtcattcaggagcaggttgttcattttccatgtagttgaatggtattgagtgagtttcttaatcctgagttctagtttgattgcactgtggtctgagagacagtttattataatttctgttcttttacatttgctgaagagggctttacttccaactatgtggtcaattttggaataagtgtgatgtggtgctgagaagaatgcatattctgttgatttggggtggagagttctgtggatgtctattgggtctgcttggtccagagctgagttcaattcctggatatccttgttaacttcctgtctcgttgatctgtctaatgttgacagtggggtgttaaagtttcccattattattgtgtgggagtctaaatctctttttaggtctctaaggacttgctttatgaatctgggtgctcctatattgggtgcatatatatttaggatagttacctcttcttgttgaactgatccctttaccattatgtaatggccttctttgtctcttttgatctttgttggtttaaagtctgttttatcagagactaggattgcaacacctccttttttttgttttccatttgcttggtagatcttcctccatccctttattttgagcctatgtgtgtctctgcatgtgagatgggtctcctgaatacagcacactgatggttcttgactctttatcccatttgccagtctgtgtcttttaattggagcatttagtccatttacatttaaggttaatattgttatgtgtgaatttgatcctgtcattatgatgttagctggttattttgctcagtagttgatgcagtttctgcatagcgtcgatggtctttacaattggacatgtttttgcagttgctggtactggttgttcctttccatgtttagtgcttcttcaggagctcttgtaaggcaggcctggtgctgacaaaatctctcagcatttgtttgtctgtaaaggatttcacttctccttcacttatgaagcttagtttggctggatatgaaattctgggttgaaaattcttgtctttaagtatgttgaatattggcctccactctcttctggcttgtagagtttctgccaagagatctgctgtttgtctgatgggcttccctttgcaggtaacccaacctttctctctgcctgcccttaacattttttccttaatttcaactttggtgaatctaactattatgtgtcttggagttgctcttttcgaggagtatctttgtggtgttctctgtatttcctgaatttgaatgttggcctgccatgctaggttggggaagtttttctggataatatcctgaagagtgttttctggcttggttccattctccctgtcactttcaggtacaccaataagatgtagatttggtcttttcacatagtcccatatttcttggaggctttgttcatttctttttactcttttttctctaaacttctcttctcgcttcatttcattcatttgatattcaatcactgataccctttcttccacttgatcaaatcggctactgtagcttgtgcacgtatcacgtagttctcgtggatggtttgcagctccatcaggtcatttaaggacttctctacactctttattctagttagccattcatctaatcttttttcaaggatttttgcttctttgtgatgggttcaaacatcctcctttagctcagagaagttgttattaccgattgtctgaagccttcttctctcaactcgtcaaagtcattctccatccagcctttttccattgctggcgaggagctgcattccttcggaggggaataggcactctgatatttagaattttcagcttctctgctctggtttctccccatctttgtggttttatctacctctggtctttgatgatggtgatgtacagatggggttttgatgtggatgtcatttctgtttattagttttccttctaacaatcaggaccctcagctgctggtctgttggagtttgctggaggtccactccagaccctgtttgcctgggtatcaccagcagaggctgcagaacagcaaatgttgctgtctgatccttcctctggaagcttcatctcagaggggcacccagctgtatgaggtgtcagtcagcccctactggaaggtgtctcccagttaggctactcaggggtcagggacccacttgaggaggcagtctgtccactctcagatttcaaactccatgctgggagaaccactactctcttcaaagctgtcagacagggacgtttaagtctgcagaagtttctgctgccttttgttctgctatgccctgcccccagaggtggagtctgcagaggcatgtaggcctccttgagctgccatgggctctacccagttcgagcttcctggtggctttgtttacctactcaagcctcagcaatggcagatgcccctccctcagcctcgctactgccttgcagttcaatctcagactgctgtgctagcagtgagcgaggctccatgggtgtgggaccctccaagccaggcacagaatataatctcctgtgtgccatttgctaaggccgttggaaaagtgcagtattagggtgggagtgtcccgattttccaggtactgtctgtcacggcttccctttgctaggaaagggaattccccgacgctttgtgcttcctgggtgaggcaatgccccaccctgctccatgagctgtgcccactgtcagacaagccccagtgagatgaacccagtacctcagttggaaatgcagatacctcagttggaaatgcagaaatcacccatcttctgtgtcactcaggctgggagctgcagactggagctcttcctatttggccatcttggaacctccaccagtagttctatttttaattttttgaggaacttccattctgttttttataatgactgtagtaattttcattctcaccagtagtgtataagagttttccttgctccacatctatgtcagcattcattactttttgtctttttgatagtagccattctaattgaggtgaaatgatatttcattgtggtttttatttgcatttccctgatggttagtgatgctgagcattattttcagaaacctgttagccactcacatatttccttttgaggaatgtctattcaggtcttttgctcaaggaaagagaacaagagtctctgcctggtaatccagataattattctggatcttgtctaaggccatgaaggtaacaccactatgagtctgcaagaactagtgttagtgggctttgtgtgcccccctaaagcagatacaccttacagcacaatgcccaagtcctttcaaatacctggaaagccttcccaagaaagacaggtacaaacaagcccagaatgtgaagactataataaatacataactcttcaatgcccagatacggatgaacatctgcaagtatcaagacaatccaggaaaaacatgaccttaccaaatgaactaaatagggcaccagggacaaagcctggagaaacagagctatgtgacctttcagatatagaattcaaaatagctattttgagaaaactcaaagaaattgaagataacacagagaataaattcaaaattctatcagattaatttaacacagagattcaaataattaaagagattcaagcagaaattctggagttgcaaaatgcaaccggtatattaaagaatgcatcagagccttttaacagcaagattgattaagcagaagaaagcactagtgagcataaagacgggctatttgaaaatacacagaggagacaaaaggaaaaagaataaaaaacaatgaagcacacctacaggatctagaaaatagcttcaaaggggcaaatctaagccttcttggccttaaagaaaaggtagagtaagagatgggggcagaaagtttattcaaagggataataatagagaatatcccaaatctagacaaaaatgtcaatatccaagtacaagaaggttatagaacaccaagcagatttaacccacagaagaccacctcaaggtgtttaataatcaaacccccaaagatcaaggataaacaaaggatcctgaaggcagcaagaggaaagaaacaaatcacatacaatggagcaccattcacatacatctggcagcagactcttcagtggaacccttacaggccaagagaagtttgcatgctatgtttaaagggctgcaggaaaaaaaacttttacactagaatagtatatctgacaaaaatgtctttcaaatataaaggaggaataaagactttccctaacaaacaaaagctgatgaatttcatcaaccccagatatgtcctacaaaaaatgctaaagggagtacttcaattagaatgaaaaggatattaatgaacaataagaaataatctgaaggtacaaaactcagtggcaatagtaagtacacagaaaaacacagaatattataacactgtaactgtggtatgtaaactactcccatatttgcagaagcactaaatgatgaaccaaagaaataactacaacttttcaatacataggtagtacaataagatataactagaaacaacaaaaagttttaaaatggaggggtgtggaaacaatgttaaggtgtgaagtttttattagttttctttttgtttgttgtttatgtaaacagtgttaagttattatcagcttaaaataattgttataagatagtatttgcaagcctcatggtaacctcaaaccaaataacatagaactgatatgcagacacacacacacaaagcaagaaactaagttgtatcaccagacaaaattaccttcactaaaaggaagacagaaaggaaagaaagaagagaaaaccacaaaacaaccagacaacaaataacaaaatggcaagagtaagtccttacttaccaacaacattgaatgtcaatggactaaactcttcaatcaaaagacatagaatggctgaatggataaaaaaaaaaaaagacccagtaatctgttgcctacaagaaacacaggtaagctataaagacagatatagactaaaaataaggggatggaagaatatatcccatgccaatggaaaccaaaaaagagcaggaacagctatacttttgtcagacaaaatagatttcaagacaaaaactaagagacaaagaaggtcactatataatggtaaaggggtcaattcagtaagaggataaaataattttaaatatatttgcactgagcactggagcacctagaaatataatacaaatattattagagttaaagtgagagataaaccccaatataataataactggagacttcaacaccctgctttcaacactgaacagatcttccagacagaaaatcaacaaagacacatcagacttcaactacactatacaccaaatagacctaatagttatctacagaacatttaatccaacagctgaagaatacacatacttttcctctgcacatggatcattttcaaggaaagactatatgttaggtcacaaaacaggtcttaaaacattcaaaaaattgaaattatatcaagcatcttctcttaccacaatggaataaaactagaaatcaataatgagagaaactttggaaactataaaaacacatggaaattaaacaagatgctcctgaatgaccagtgggtcaataaagaaattaggaaggaaattgaaaattttcttgaaacaaatgattaagaaaatacaacatgccaaaatctacgggattcagcaaaaacagtactaagagggacgtttatagctctaagtgtctatatcaaaaaacaagaaaaacttcaaataaacaacctaatgatgcatttcaaggaactagaaaagcaagagcaaaccaaacccaaaattggtagaagaaaagaagtaataaataccagagcagaaataaatgaaattgaaatgaagaaaacaatataaaatttcagtgaaacaaagagttgggtttttgaaaagttaaacaaaattaacaaatctttagccagactacctaagagaaaacgagagaagctccaagtaaatacaatgagaaatgaaaaagagacattacaactgaggtgctgcagaaattcaaaggatcattagtggcttatatgagcaactatataccaataaattagaaaatctagaagaaattgataaatacctagacacatacaacctagcatgattgaaccaggaagaaatccaaaatctgaacagattaataacaagtaacatgatttaagttgtaataaaatgtctccccataagaagaacccaggactcaatgacttcactgctgaatcctaacaaacatttaaagaagaaggaataccagttgtactcaaattattctggaaaatagtggaggagggagtatgtccaaactcatcctaccaggtcagtgttactctgataccaaaactggacaaagacacatcaacaaagcaaactacagccaatatctctgatgaatattgatttaaaaatcctcaacaaaatgctagcaaatagaattcaacaatacatcaaaaagatcattcatcatgaccaagtgggatatctccctggaatgcaaggaggattcaacatatgcaaattaatcaatgtaatatatcatatcaatagaatggagaaaaaaaccatatgatcatttcaaatgatgctgaaaaagcatttgataaaattcaacatcccttcttgataaaaacactgaaaaaactgggtatagaaggaaaatacatcaacataataaaagccatgtatgacagacccacaactaatatcatatggaatgggaaaaaattgaaagccttttatctaagatctgaaacacaacaaggatgcttacttttaccactattatttaacataatgctggaagtcctagctagagcaatcagacaagagaaagaaataaagtccatccaaattggaaaggaaaaagcaaaattatcctttttgcagacaatattatctcatatttggaaaaacctaaagacttcaccaaaaattaaatgcctaggaattaatttaaccaaagaagcaaaagagctctataatgaaaactataaagcaccgatgaaagaaatggaaggggacatcaaaaaatgaaaaatattctatgttcaggatcagaagaatcaatattgttaaactgtccatactaccaaaagcaatctacagatccaatgcaatacctatcaaaataccaatgacattcttctcagaaatagaaaaaacaatcctaaaatttatatgaaaccacaaaagacccagaatagccaaagctattctaaggaaaaagaacaaaactggaggaatcacattacctgacttaaattatattacagagctatagtaatcaaaactgcagagtactgccatagaaatagacatgtagaccaacagaacagaatagagaacccagaaacataacataacccacataactacagcgactcattttttataaaggagctaagatcatacaatgaggaaaaggcattattcaataaatggtgctgcaaaaacttgatatccatatacggaagaatgaaactagaccccaatctctcatcatatacaaaaaggaaacaaaatggattaaaaattaaatctataaactcaagctatgaaatgactacatggaaacattggagaaattctttggaacattggtctgtgcaaaaatatctgagagtaatactccacaagcacaggcaaccaaagcaaacatgtacaaatggtatcacatcaagttaagaggcttcttcacagccatggatacaattgacaaagtgaagagacaactcacagaatgggagaaaatatttgctaactacccatctgacaagggattaataatcagaatacataaggagtgcaaataactctataggaaacatctaataattcaatgaaaaaatgggcaaaagatttgaatagatgtttctcaaaagaagatgtacaaatggtgaacatacaaatgaaaaggtgcacaacatcattgatcatcagagaattgcaaatcaaagctacaatgagatattatctcaccccagttaaaatggcttatgtccaaaagagaggcaataacaaatgctggtgaggatgcgaagaaaagacaatccttacacactgttgatggtaatgtaaatttgtacaaccactatggagaagagtttagagattcctcaaaaaaatgaaaaattgctctaacatatgatccttttttggggtattgaatatacccaaaagaaaggaaatcagtatgttgaagagatatctgcactcctatgtttgtttcagcactgttcacaatagccaaaatttggaagcaacctaagtgtccatcaacagatggatggataaagaaaatgtacttatacataatggagaactattcagccatgaaaagaataatatcttgtcatctgcaataacatggatggaactgggggtcattatgttaaatgaaacaagccaggcacagaaagacaaacattgcatgttctcatttatttgtgggatctagacatcaaaacaattaaactaatgaagatagagtagaagaatggttaccagaggcttggaagggtattgtagcctggtagggaggtggggattgttaatgagtgtgactaaaagagttagttctttgaaaataattggacaaacagctaaactaagaaaaaacagagaagattcaaataaataaaatcagaaataaaaggagagacattacgactgataccacagaaataaaaatgattgtaagagactactatgaacaatcatatgctaacatacaatatagcaagactaagtcatgacgaaatcaaaacatcagaacaggaatagttaactcctatgactagtaaggagttatgaatcagtaacaaaaaacctaccaaaaaaaatactcacaaccagataacttcactggaaagatctaccaaacatttaaagaagaattaattccaatctttctcaaactcttccaaaaaataggagaagagagaacacttctaaacccgttttatgagtcaaacgttactcagatactgaagtcaggaaaagacactaaagaaaagaaaactacagagcaatgtctctgatgaatattgatgccaaaatttctaacaaattaaattcaagaggacaataaatgaattatacactatgaccaaatggcatttacttccaataaaaggataactcaacatataaaatttgaacaatattatacatcacagtatcagaatgaaggacaaaaaccacattatcatctcaactgatgcagaaaaatcatctgacaaaaatccaacactctttcatgataaaaacactcaacaaactataaatagaagaaaactacctcacataataaaggccatatatgaaaagtctgcaactaacatcatagtcaatgatgaaagaaattggaagtctcatgtagcattactgggaatgtaaaatggtacaaccattatggaaaacagtatgtaagaccctcaaaaaattataaattgaattaccatatgatccagcaattgcacttctaggtatatatccaaaagagttgacagcaggatcagtaagagctatttgcacaccgatgttcactgtagcattattcacaatagccatgaggcagaagcaaccaagatgttcatatatggattaatgattaaacaaaatgtggtatatacatacattagaatattattcagccttaaaaatcctgttacatactatacatgtgctatatgaatgaaacttgaggacattatactaagtgaaatgaggcagtcaccaaaagacaaatactgtatgatttcactttaataaattgtctaaactggtcgatctcatagaaacagaaagtaaaatggtgttttccagggattggagagagggagaaatgggaagatgttatccaatgtgtacagagtttcagacttgcaagatgaaaaagttctagagattttgtaaaacatgtatatagttaatgcaattgaactgcacacttaaacacgattcagatgataaattttgttctgggtttttagcacaatttttaaaaggtctctatgatgttacctttttgtacagagtgttgagttttgttttgttttgttttgtcttttctggcaggcagttaacttactagtggctctaattgatcctattgaagcttggttttagtcctttaagaatatgtctagagcaacatttgctctagggcaagaataggcttactccttagataatggtttttgacatctcaactaaatacccagtgttcgatgtattcagcaaggtccctctactctgacttattggacctctactatctctcagcactattcaacctctaatatctctttttttatttttattttttattttattttattattattatactttaagttttagggtacatgtgcacaatgtgcaggttagtttcatatgtatacatgtgccatgctggtgtgctgcacccattaactcgtcatttagcattaggtatatctcctaaagctatccctccccctggccccaccctgcaacagtccccagagtgtgatgttccccttcctgtgtccatgtgttctcattgttcagttcccacctatgagtgagaatatgcggtgtttggtttttgttcttgcgatagtttactgagaatgatgatttccagtttcatccatgtccctacaaaggacgtgaactcatcattttttatggctgcatagtattccatggtgtatatgtgccacattttcttaatccagtctatcattgttggacatttgggttggttccaagtctttgctattgtgaatagtgccacaataaacatacctgtgcatgtgtctttatagcagcatgatttatagtcctttgggtatatacccagtaatgggatggctgggtcaaatggtatttctatttctagatccctgaggaatcaccacactgacttccacaagggttgaactagtttacagtcccaccaacactgtaaaagtgttcctgtttctccacatcctctccagcacctgttgtttcctgactttttaatgattgccattctaactggtgtgagatggtatctcattgtggttttgatttgcatttctctgatggccagtgatggtgagcattttttcgtgtcttttttggctgcataaatgtcttcttttgagaagtgtctgttcatatccttcgcccactttttgatgcggttgtttgtttttttcttgtaaatttgtttgagttcattgtagattctggatattagccctttgtcagatgagtaggttgcgaaaattttctcccattttgtaggttgcctgttcactctgatggtagtttcttttactgtgcagaagctctttagtttaattagatcccatttgtcaattttggcttttgttgccattgcttttggtgttttagacatgaagtccttgcccatgcctatgtcctgaatggtaatgcctaggttttcttctagggtttttatggttttaggtcgaacgtttaagtctttaatccatcttgaattaatttttctataaggtgtaaggaagggatccagtttcagctttctacctatggcaagccagttttcccagcaccatttattaactagggaatcctttccccattgcttgtttctctcaggtttgtcaaagatcagatagttgtagatatgcggtgttatttctgagggctctgttctgttccattgatctatatatctgttttggtaccagtaccatgctgttttggttactgtagccttgtagtatagtttgaaatcaggtagcatgatgcctccagctttgttcttttggcttaggattgacttggtggtgtgggctcttttttggttccatatgaactttaaagtagttttttccaattctgtgtagaaagtcattggtagcttgatggggatggcattgaatctataaattaccttgggcagtatggccattttcacaatattgattcttcctacccatgagcatggaatgttcttccatttctttgtatcctcttttatttcattgagcagtggtttgtagttctccttgaagaggtccttcacatcccttgtaagttggagtcctaggtattttattctctttgaagcaattgtgaatgggagttcactcatgatttggctctctgtttgtctgttattggtgtataagaatgcttgtgatttttgtacattgattttgtatcctgagactttgctgaagttgcttatcagcttaaggagattttgggctgagacattggggctttctagatatacaatcatgtcgtctgcaaacagggacaatttgacttcctcttttcctaattgaataccctttatttccttctcctgcctaattgccctggccagaacttccaacactatgttgaataggagtggtgagagagggcatccctgtcttgtgccagttttcaaagggaatgcttccagtttttgcccattcagtatgatattggctgtgggtttgtcatacatagctcttattattctgagatacgttccatcaatacctaatttattgagagtttttagcatgaagcattgttgaattttgtcaaaggccttttctgcgtctattgagataatcatgtggtttttgtcttttgttctgtttatatgctggattacatttattgatttgtgtatattgaaccagccttgcatcacagggatgaagcccacttgatcatggtggataagccttttgatgtgctgctggatttggtttgccagtattttactgagtatttttgcatcagtgttcatcaaggatattggtctaaaattctcttttttggttttgtctctgcctagctttggtatcaggatgatgctggcctcataaaatgagttagggaggattccctctttttctattgattggaatagtttcagaaggaatggtaccagctcctccttgtacctctggtagaattcggctgtgaatccatctggtcctggactctttttggttggtaagttattgattattgccacaatttcagatcctgtgattcagatcctgtgattcagatcctgtgtattcagagagtcaacttcttcctggtttagtcttgggagggtgtatgtgtccaggaatttatccatttcttctagattttctagtttatttgtgtagaggtgtttgtagtattctctgatggtagtttgtatttctgtgggatcggtggtgatatcccctttatcattttttattgcatctatttgattcttctctcttttcttctttattagtcttgctagtggtctatcaattttgttgatcctttcataaaaccagctcctggattcattaattttttgaagggttttttgtgtctctatttccttcagttctgctctgatcttagttatttcttgccttctgctagcttttgaatgtgtttgctcttgcttttctgtgtcttttaattgtgatgttagggtgtcaattttaaatctttcctgctttctcttgtgggcatttagtgctataaatttccctctacacactgctttgaatgtgtcccagagattctggtgtgttgtgtctttgttttcgttggtttcaaagaacatctttatttctgccttcatttcattatgtacccagtagtcattcaggagcaggttgttcattttccacgtagttgagtggttttgagtgagtttcttaatcctgagttctagtttgattgcactgtggtctgagagacagtttgttataatttctgatcttttacatttgctgaagagagctttacttccaactatgtggtcaattttggaataggtgtggtgtggtgctgaaaaaaatgtatattctgttgatttgggttggagagttctgtagatatctattaggtccgcttggtgcagagctgggttcaattcctgggtatccttgttaactttctgtctcgttgatctgtctaatgttgacagtggggtgttaaagtctcccattattattgtgtggcagtctaagtctctttctaggtcactcaggacttgctttatgaatctgggtgctcctgtattgggtgcatatatacttaggatagttagctcttcttgttgaattgatccctttaccattatgtaatggccttctttgtctcttttgatgtttgttggtttaaagtctgttttatcagagactgggattgcaacccctgcctttttttgttttccatttgcttggtagattttcctccatccttttattttgagcctatgtgtgtctctgcacgtgagatgggtttcctgaatacagcacactgatgggtcttgactctttatccaatttgccagtctgtgtcttttaattggagcatttagtccatttacatttaaagttaatattgttatgtgtgaatttgatcctgtcattatgatgttagctggctattttgctcgttagttgatgccgtttcttcctagcctcgatggtctttacaatttggcatgattttgcagtggctgccaccggttgttcctttccatgtttagtgcttccttcgggagctcttttagggcaggcctggtggtgacaaaatctctcagcatttgcttgtctgtaaagtattttatttctccttcacttatgaagcttagtttggctggatatgaaattctgggttgaaaattcctttctttaagaatgttgaatattggcccccactctcttctggcttgtagagtttctgccgagagatccgctgttagtctgatgggcttccctttgtgggtaacccgaccttcatctctggcctcccttaacattttttccttcatttcaacttttgtgaatctgacaattatgtgtcttgagttgctctttttgaggagtatctttgtggcgttctgtatttcctgcatctgaacgttggcctgccttgctagattggggaagttctcctggataatatcctgcagagtgttttccaacttggttccattctccccatcactttcaggtacaccaatcagacgtagatttggtcttttcacatagtctcatatttcttggaggctttgttcgtttctttttattctgttttctctaaacttcccttctcgcttcatttcattcacttcatcttccatcactgataccctttcttccagttgatcgcatcagctcctgaggcttctgcattcttcacgtagttctcgagccttggctttcagctccatcagctcctttacgtacttctctgtattagttattctagttatacattcgtcaaaatcattttcaaagttttcaacttctttgcctttggtttgaatttcctcctgtagctcagagtagtttgatcgtctgaagccttcttctctcaactcgtcaaagtcattctctgtccagctgtgttccgttgctggtgaggagctgcgttcctttggaggaggagaggtgctctgctttttagagtttccagtttttctgctgtgttttttccccatctttgcggttttatctacttttggtctttgatgatggtgatgtacagatgggtttttggggtggatgtcctttctgtttgttagttttccttctaacagacaggaccctcagctgcaggtctgttggagtttgctagaggtccactccagaccttgtttgcctgggtaccagcagcggtggctgcagaacagtggatttttgtgaaccgcaaatgctgctgtctgatcgttcctctggaatttttgtctcagaggagtacccggccgtgtgaggtgtcagtctgcccctactggggggtgcctcccagttaggctgctcgggggtcaggggtcagggacccacttgaggaggcagtctgccctttctcagatctccagctgcgtgctgggagaatcactgctctcttcaaagctcagatggaaatgcagcctctaatatctctatttggctcacaaccctcaagtagttctcttcagggtttcagcaaatcttgccctataaatgcctaatattaagccagtggcttaaggtgaccttagaaaagatttctgaagcttcatctctaaacagctacctcctctctactaacctgcttcataaatcccagccacaatgctaataatgtctaccttagacaccatcaatttctctttgggttctatttcactgcgttcctaatcaaaaagccagggtaaatgtgttgcttacctccagtagttctttcttttccaggatagcagtgttgtggagtctgttgttagatgtctaaaaagagttgctgcttatgtattttttgagtgttatatttgtttatggctgaagggtaaatctaatagttataaccctgtcattattcagatgaagaatttgtcattttaagtttctcttttttatattcaccacctaccattctacagtattttttgattctttgtgggatttttctctgtctctacaataacttaacttccatgagaagtgattctgtcagtcttactcaattcagatctctagtgctcagaagagtgcttggtactcatgaataaacaacaaatatttaataaaattaaatgaaatgaatgagtaaattattgaataattatgcacagatgaaatttgcttcagaacatattaaaaattttacactagcaatataaaagaataggtgaatagatgttgaaaaaatttgtgcaaaacctatgatattgaagaagaaaataaggggcagacaaagaagtgaaggaataaaaaatgaagaagaaataagaagacagtaaaagaggaaaatggaaaagaagaaagtttgtagaattgtggagaaaaaaagacaaaaagacaagagaagaaatgaggatatttttgtaaaaaggaaaggaagaaaaagaaaagaggcaagtattattttaattctctaacacagcaaacatactgtgccctgactttgtattttaaggcaaaattctagggctgcaatggtgaaaatagttgggttattctttctaaacacctttatccccaaacatatttgccctgatgtgtaagaaatacacacaaaaatataatccaacttagattatgagtgccataggaaagtgctgtgagaagagtgatatcaaaaccttatatggggatctagctaggtaggcatcttagagaaagtgactaagtttgaaggatgaatagaaattaaacagatgttatgggaggaaacaatttgacaaaaggtttggaataaggaaaagaaagagcatggaacagaaattgtaaaagtttctgattggctttcctaataatgtctgaatgacgctgttgggaatgtgtattgggaatgcaagtttaagtctcacatggagagtctcgaatattgtgctaggagtttgaacttttaagtgctctttagcttttggaaacctctgagagtttttcaataagaaagtaataagctcagatcagtgattttagaacataaaatgtaattttaaaaagcagagaaataaatagaaaagagagagaaggcaactttgagcaaaacttttttcttaaaaaaagcgtttttggcacttagttctagaaatgatagaaaaacagatggaaaagatgttggtactggaaattattttatcagtctgtttttatcctgcttgctaagaaagggcatgacttttttattatgcatctaaggatctcttttactttgagccattttcacttggacacattatagttgagtgctgatattactgatgtgcttcctcccctaaatccccttgcccaacaggggttaagttcttgtaggcctaagtgtctgaaaactctgctcctctaacgtgaaaaatcaaacaaaaacaaatgaaacaccaccagttatcaggaatcagcgtttctctgcaacaaaagaaaatagaggatcatgttcacccactctgctttatttatgggaattaaattgggtttggtgtacagaatatctctatctcaataaaattcaagtgctgcgcagaagataaacggaatatacttttaaatgaaattgcttttcgttttggcagcagggtatttggtcattcaggaacttttgcacctctcacttttcacagaaggtcttttagagatgtatttcagctaaggagctcacctctatgaaaggaggactgggcccctagggttagctcttaaagattacttctaagtcatttcaagcattctgaatatttttcagttatgttcattcagactgatttgatatccatgggcaatattattttgaggtaacacttcataagtattaaaaaaaattactgtcccccccatttgaactatttaaaaagagagttaatggaatgtagagttacttaatttatgataaaattcatacc

SEQ ID NO: 10549 - DNA, 6078 bp, Homo sapiens
tttcttttttttaatctgataactaaatttatttatttatttttattttttatttattttttattaaagttttagggtacatgtgcacattgtgtaggttagttacatatgtatacatgtgccatgctggtgcgctgcacccaccaactcgtcatctagcattaggtatatctcccaatgctatccctcccccctccccccaccctacaacagtccccagagtgtgatattccccttcctgtgtccatgtgatctcattgttcaattcccacctatgagtgagaatatgcagtgtttggttttttgttcttgcgatagtttactgagaatgatgacttccaatttcatccatgtccctacaaaggacatgaactcatccattttcatggctgcatagtattccatggtgtatatgtgccacattttcttaatccagtctatcattgttggacatttgggttggttccaagtctttgctattgtgaataatgccacaataaacatatgtgtgcatgtgtctttatagcagcatgatttatagtcctttgggtatatacccagtaatgggatggctgggtcaaatggtatttccagttctagatccctgaggaatcgccacactgacttccacaatggttgaactagtttacagtcccaccaacagtgtaaaagtgttcctatttctccccatcctctccagcacctgttgtttcctgactttttaatgattgccattctaactagtgtgagatagtatctcattgtggttttgatttgcatttctctgatggccagtgatgatgagcattttttcaggtgtctgttggctgcataaatgtcttcttttgagaagtgtctgttcatgtccttcgcccactttttgatggggttgtttgtttttttcttgtaaatttgtttgagttcattgtagattctggatattagccctttgtcagatgagtaggttgtgaaaattttctcccattttgtaggttgcctgttcactctgatggtagtttcttttgctgtgcagaagctctttagtttaattagatcccaattgtcaattttgtcttttgttgccattgcttttggtgttttagacatgaagtccttgcccatgcctatgtcctgaatggtaaagcctaggttttcttctagggtttttatggttttaggtctaacgtttaagtctttaatccatcttgaattgatttttgtataaggtgtaaggaagggatccagtttcagctttctacatatggctagccagttttcccagcaccatttattaaacagggaatcctttccccattgcttgtttttctcaggtttgtcaaagatcagatagttgtagatatgcggcattatttctgagggctctgttctgttccattgatctatatctctgttttggtaccagtaccatgctgttttggttactgtagccttgtagtatagtttgaagtcaggtagtgtgatgcctccagctttgttcttttggcttaggattgccttggcgatgcgggctcttttttggttccatatgaactttaaagtagttttttccaattctgtgaagaaaggcattggtagcttgatggggatgacattgaatctgtaaattaccttgggcagtatggccattttcacgatattgattcctcctacccatgagcatggaatgttcttccatttgtttgtatcctcttttatttccttgagcagcggtttgtagttctccttgaagaggtctttaacatcccttgtaagttggattcctaggtattttattctctttgaagcaattgtgaatgggagttcactcatgatttggctctctgtttgtctgttgttggtgtataagaacgcttgtgatttttgaacattgattttgtatcctgagactttgctgaagttgcttatcagcttaaggagattttgggctgagacagtggggttttccagatatacaatcatgtcatctgcaaacagggacagtttgacttcctcttttcctaattgaataccctttatttccttctcctgcctaattgccctggccagaacttccaacactatgttgaataggagtggtgagagagggcatccctgtcttgtgccagttttcaaagggaatgcttccagtttttgcccattcagtatgatattggctgtgggtttgtcatagatagctcttattattttgaaatacgtcccatcaatacctaatttattgagagtttttagcatgaagggttgttgaattttgtcaaaggctttttctgcatctattgagataatcatgtggtttttgtctttggctctgtttatatgctggattacatttattgatttgcatatattgaaccagacttgcatcccagggatgaagcccacttgatcatggtggataaactttttgatgtgctgctggatttgttttgccagaattttattgaggatttttgcatcaatgttcatcaaggatattggtctaaaattctcttttttggttgtgtctctgcctgtctttggtatcagaatgattctggcctcataaaatgagttagggaggattccctctttttctattgattggaatagtttcagaaggaatggtaccagttcctccttgtacctctggtagaatttggctgtgaatccatctggtcctggactctttttggttggtaaactattgattattgccacaatttcagctcctgttattggtctattcagaaattcaacttcttcctggtttagtcttgggagagtgtatgtgtcgaggaatttatccagttcttctagattttctagtttatttgcatagaggtgtttgtagtattctctgatggtagtttgtatttctgtgggatcggtggtgatatcccctttatcattttttattgcgtctatttgattcttctctctttttttctttattagtcttgttagcggtctatcaattttgttgatcctttcaaaaaaccagctcctggattcattaattttttgaagggttttttgtgtctctatttccttcagttctgctctgattttagttatttcttgccttctgctagcttttgaatgtgtttgctcttgcttttctagttcttttaattgtgatgttagggtgtcaattttggatctttcctgctttctcttgtgggcatttagtgctataaatttccctctacacactgctttgaatgagtcccagagattctggtatgttgtgtctttgttctcattggtttcaaagaacatctttatttctgccttcatttcgttatgtatccagtagtcattcaggagcaggttgttcagtttccatgtagttgagcggttttgagagagattcttaatcctgagttctagtttgattgcactgtggtctgagagatagtttgttataatctctgttcttttacatttgctgaggagagctttacttccaagtatgtggtcaattttggaataggtgtggtgtggtgctgaaaaaaatgtatattctgttgatttggggtggagggttctgtagatgtctattaggtccgcttggtgcagagctgagttcaattcctgggtatccttgttgactttctgtctcgttgatctgtctaatgttgacagtggggtgttaaagtctcccattattaatgtgtgggagtctaagtctctttgtaggtcactcaggacttgctttatgaatctgggtgctcctgtattgggtgcatatatatttaggatagttagctcttcttgttgaattgatccctttaccattatgtaatggccttctttgtctcttttgatctttgttggtttaaagtctgttttatctgagactaggattgcaacccctgcctttttttgttttccatttgcttggtagatcttcctccatccctttattttgagcctatgtgtgtctctgcacgtgagatgggtttcctgaatacagcacactgatgggtcttgactctttatccaatttgccagtctgtgtcttttaattggagcatttagtccatttacatttaaggttaatattgttgtgtgtgaatttgatcctgtaattatgatgttagctggtgattttgctcgttagttgatgcagtttcttcctagtctcgatggtctgtatattttggcatgattttgcagcggctggtaccggttgttcctttccatgtttagcgcttccttcaggagctcttttagggcaggcctggtggtgacaaaatctctcagcatttgcttgtctgtaaagtattttatttctccttcacttatgaagcttagtttggctggatatgaaattctgggttgaaaattcttttctttaagaatgttgaatattggcccccactctcttctggcttgtagggtttctgctgagagatccgctgttagtctgatgggtttccctttgagggtaacccaacctttctctctggctgcccttaacattttttccttcatttcaactctggtgaatctgacaattatgtgtcttggagttgctcttctcgaggagtatctttgtggcattctctgtatttcctgaatctgaacgttggcctgccttgctagattggggaagttctcctggataatatcctgcagagtgttttccaacttggttccattctccccatcactttcaggtataccaatcagacgtagatttggtcttttcacatagtcccatatttcttggaggctttgctcatttctttttattcttttttctctaaacttcccttctcgcttcatttcatttatttcatcttccatcgctgataccctttcttccagttgattgcatcggctcctgaggcttctgcattcttcatgtagttctcgagccttggttttcagctccatcagctcctttaagcacttctctgtattggttattctagttatacattcttctaaatttttttcaaagttttcaacttctttgcctttggtttgaatgtcctcccgtagctcagagtaatttgatcgtctgaagccttcttctctcagctgatcaaagtcattctccatccagctttgttccgttgctggtgaggaactgcgttcctttggaggaggagaggcgctctgcgttttagagtttccagtttttctgttctgttttttccccatctttgtggttttatctacttttggtctttgatgatggtgatgtacagatgggtttttggtgtggatgtccattctgtttgttagttttccttctaacagacaggaccctcagctgcaggtctgttggaataccctgccgtgtgaggtgtcagtgtgcccctgctggggggtgcctcccagttaggctgctcgggggtcaggggtcagggacccacttgaggaggcagtctgcccgttctcagatctccagctgcgtgctgggagaaccactgctctcttcaaagctgtcagacagggacatttaagtctgcagaggttactgctgtctttttgtttgtctgtgccctgcccccagaggtggagcctacagaggcaggcaggactccttgagctgtggtgggctgggcccagttggagcttcccggctgctttgtttacctaagcaagcctgggcaatggcgggcgcccctccgccagcctcactgccgccttgcagtttgatctcagactgctgtgctagcaatcagcgagactccgtgggcgtaggaccctccgagccaggtgccggatataatctcgtggtgcgccgttttttaagcccgtccgaaaagcgcaatattcgggtgggagtgacccgattttccaggtgagtccgtcacccctttctttgactcagaaagggaactccctgaccccttgcgcttcccaagtgaggcaatgcctcgccctgcttcggctcacgcacggtgcgcacacccactgacccgcacccactgtctggcactccctagtgagatgaacccggtacctcagatggaaatgcagaaatcacccgtcttctgtgtcgctcacgctgggagctgtagaccggagctgttcctattcggccatcttggctcctccacgtat

SEQ ID NO: 10550 - DNA, 10635 bp, Homo sapiens
ttgtttggtttttttttaattatactttaagttttagggtgtatgtgcacattgtgcaggttagttacatatgtatacatgtgccatgctggtgcgctgcacccactaaccactaactcgtcatctagcattaggtatatctcccaatgctacccctcccccctacccccaccccaccacagtccccagagtgtgatattccccttcctgtgtccatgtgatctcattgttcagttcccacctatgagtgagaatatgcggtgtttggttttttgttcttgcgatagtttactgagaatgatgatttccaatttcatccatgtccccacaaaggacatgaactcatcattttttatggctgcatagtattccatggtgtatatgtgccacattttcttaatccagtctatcattgttggacatttgggttggttccaagtctttgctattgtgaataatgccgcagtaaacatacgtgtgcatgtgtctttatagcagcatgatttatagtcctttgggtatatacccagtaatgggatggctgggtcaaatggtatttctacttctagatccctgaggaatcgccacactgacttccacaatggttgaactagtttacagtcccaacaacaatgtaaaagtgttcctatttctccacatcctctccagcacctgttgtttcctgactttttaatgattgccattctaactggtgtgagatggtatctcattgtggttttgatttgcatttctctgatggccagtgatgatgagcattttttcatgtgttttttggctgcctaaatgtcttcttttgagaagtgtctgttcatgtccttcgcccactttttgatggggttgtttgttttttcttgtaaatttgtttgagttcattgtggattctggatattagccctttgtcagatgagtaggttgcaaaaattttctcccattttgtaggttgcctgttcactctgatggtagtttcttttgctgtgcagaaggtctttagtttaattagatcccatttgtctattttgtcttttgtttccattgcttttggtgttttagacaggaagtccttgcccatgcctatgtcctgaatggtaatgcctaggttttcttctagggtttttatggttttaggtctaacatttaagtctttaatccatcttgaattgatttttgtataaggtgtaaggaagggatccagtttcagctttctacatatggctagccagttttcccagcaccatttattaaatagggaatcctttccccattgcttgtttttctcaggtttgtcaaagatcagatagttgtagatatgcggcgttatttctgagggctctgttctgttccattgatctatatctctgttttggtaccagtaccatgctgttttggttactgtagccttgtagtatagtttgaagtcaggtagtgtgatacctccagctttgttcttttggcttaggattgacttggcgatgcgggctcttttttggttccatatgaactttaaagtagttttttccaattctgtgaagaaagtcattggtagcttgatggggatggcattgaatctgtaaattaccttgggcagtatggccattttcacaatattgattcttcctacccatgagcatggaatgttcttccatttgtttgtatcctcttttatctcattgagcagtggtttgtagttctccttgaagaggtccttcacatcccttgtaagttggattcctaggtattttattctctttgaagcaattgtgaatgggagttcactcatgatttggctctctgtttgtctgttattggtgtataagaatgcttgtgatttttgtacattgattttgtatcctgagactttgctgaagttgcttatcagcttaaggagattttgggctgagacactggggttttctaaatatacaatcatgtcgtctgcaaacagggacaatttgacttcctcttttcctacttgaataccctttatttccttctcctgcctaattgccctggccagaacttccaacactatgctgaataggagtggtgagagagggcatccctgtcttgtgccagttttcaaagggaatgcttccagtttttgcccattcagtatgatactggctgtgggtttgtcaaatagctcttattattttgagagacgtcccatcaatacctagtttattcagagtttttagcatgaagggttgttgaattttgtcaaaggctttttctgcatctattgagataatcatgtggtttttgtctttggctctgtttatatgctggattacatttattgatttgcgtatattgaaccagccttgcatcccagggatgaagcccacttgatcatggtggataagctttttgatgtgctgctggattcgttttgccagtattttattgaggatttttgcatcaatattcatcaaggatattggtctaaaattctcttttttggttgtgtctctgcccggctttggtatcagaatgatgctggcctcatcaaatgagttagggaggattccctctttttctattgattggaatagtttcagaaggaatggtaccagttcctccttgtacctctgatagaattcggctgtgaatccatctggtcctggactctttttggttggtaaactattgattatcgccacaatttcagctcctgttattggtctattcagggattcaccttcttcctggtttagtcttgggagattgtatgtgtcgaggaatttatccatttcttctagattttctagtttatttgcgtagaggtgtttgtagtattctctgatggtagtttgtatttctgtgggatcagtggtgatatcccctttatcattttttttgtgtgtctatttgattcttctctctttttttctttattagtcttgctagcggtctatctattttgttgatcctttcaaaaaaccagctcctggattcattaattttttgaagggttttttgtgtctctatttccttcagttctgctctgattttagttatttcttgccttctgctagcttttgaatgtgtttgctcttgcttttctagttattttaattgtgatgttagggtgtcaattttggatctttcctgctttctcttgtgggcatttagtgctataaatttccctctacacactgctttgaatgcgtcccagagattctggtatgttgtgtctttgttctcgttggtttcaaagaacatctttatttctgccttcatttcgttatgtacccagtagtcattcaggagcaggttgttcagtttccatgtagttgagcggttttgagtgagattcttaatcctgagttctagtttgattgcactgtggtctgagagatagtttgttataatgtctgttcttttacatttgctgaggagagctttacttccaagtatgtggtcaattttggaataggtgtggtgtggtgctgaaaaaaatgtatattctgttgatttggggtggagagttctgtagatgtcaattaggtccgcttggtgcagagctgagttcaattcctgggtatccttgttgactttctgtctcgttgatctgtctaatgttgacagtggggtgttaaagtctcccattattaatgtgtgggagtctaagtctctttgtaggtctctaaggacttgctttatgaatctgggtgctcctgtattgggtgcatatatatttaggatagttagctcttcttgttgaattgatccctttaccattatgtaatggccttctttgtctcttttgatctttgttggtttaaagtctgttttatcagagactaggattgcaacctctgcctttttttgttttccatttgcttggtagatcttcctccatccttttattttgagcctatgtgtgtctctgcacgtgagatgggtttcctgaatacagcacactgatgggtcttgactctttatccaatttgccagtctgtgccttttaattggagcattaagtccatttacatttaaagttaatattgttatgtgtgaatttgatcctgtcattatgatgttagctggtgattttgctcgttagttgatgcagtttcttcctattctcgatggtctttacattttggcatgattttgcagcggctggtaccagttgttgctttccatgtttaccgcttccttcagaagctcttttagggcaggcctggtggtgacaaaatctctcagcatttgcttgtctgtaaagtattttatttctccttcacttatgaagcttagtttggctggatatgaaattctgggttgaaaattcttttctttaagaatgttgaatattggcccccactctcttctggcttgtagggtttctgctgagagatccgctgttagtctgatgggcttccctttgagggtaacccgacctttctctctggctgcccttaacattttttcctttatttcacctttggtgaatctgacaattatgtgtcttggagttgctcttctcgaggagtatctttgtggcgttctctgtatttcctgaatctgaacgttggcctgccttgctagattggggaagttctcctggataatatcctgcagagtgttttccaacttggttccattctccccatcactttcaggtacaccaatgagacgtagatttggtcttttcacatagtcccatacttcttggaggctttgctcatttctttttattcttttttctctaaacttcccttctcgcttcatttcattcatttcatcttccattgctgataccctttcttccagttgatcgcatcagctcctgaggcttctgcattcttcacgtagttctcgagccttggttttcagctccatcagctcctttaagcacttctctgtattggttattctagttatacattcttctaaatttttttcaaagttttcaacttctttgcctttggtttcaatgtcctcccgtagctcagagtaatttgatcgtctgaagccttcttctctcagctcgtcaaagtcattctccatccagctttgttccgttgctggtgaggaactgcgttcctttggaggaggagaggtgctctgcgttttagagtttccactttttctgttctgttttttccccatctttgtggttttatctacttttggtctttgatgatggtgatgtacagatgggtttttggtgtggatgtcctttctgtttgttagttttccttctaacagacaggaccctcagctgcaggtctgttggaataccctgccgtgtgaggtgtcagtgtgcccctgctggggggtgcctcccagttaggctgctcgggggtcaggggtcagggacccacttgaggaggcagtctgcccgttctcagatctccagctgcgtgctgggagaaccactgctctcttcaaagctgtcagacagggacatttaagtctgcagaggttactgctgtctttttgtttgtctgtgccctgcccccagaggtggagcctacagaggcaggcaggcttcctggagctgtggtgggctccactcagttcgagcttcccggctgctttgtttacctaagcaagccagggcaatggcgggcgcccctcccccagcctcgctgtcgccttgcagtttgatctcagactgctgtgctagcaatctgtgagactccgtgggcgtaggaccctccgagccaggtgcaggatataatctcgtggtgcgccgttttttaagccggtcggagaagcgcaatattcgggagggagtgacccgattttccaggtgcgtctgtcacccctttctttgactcggaaagggaactccctgaccccttgcgcttcccaagtgaggcaatgcctcgccctgcttcggctcgcccacggtacgcgcgctcactgacctgcgcccactgtctggcactccctagtgagatgaacccggtacctcagatggaaatgcagaaatcaccagtcttctgcgtcgctcacgctgggagctgtagaccggagctgttcctattcggccatcttcgattgcaaaaattttctcccattctgtaggttgcctgttcactctgatggtagtttattttgctgtgcagaagctcattagtttaattagatcccatttgtctattttggcttttgttgccattgctttcggtgttttagtcatgaagtccttgcctatgcctatgtcctgaatggtaatgcctaggtttttcttctagggtttttatggttttgggtctaacatttaagtctttaatccatcttgaattaatttttgtataaggtgtaaggaagggatccagtttcagctttctacatatggctagccagttttcccagcaccatttattaaatagggaatcctttccccgtttcttgtttttgtcaggtttgtcaaagatcagatgtttgtagatatgtggtattatttctgagggctctgttctgttccattggtctacatctctgttttcttaccagtaacatgctgttttagttactgtagccttgtagtatagcttgaagtcaggtagcatgacgcctccagctttgttcttttggcttaggattgtcttgacaatgtgggctcttttttggttccatatgaactttaaagtagttttttccaattctgtgaagaaagtcaatggtagcttgatggggatgacattgaatctataaattaccttgggcagtatggccattttcacgatattgattcttcctatccatgagcatggaatgttcttccatttgtttgtgtcctcttttatctcattgagcagtggtttgtagttctccttgaagaggtccttcacatcccttgtaagttggattcctaggtattttattctctttgaagcaattgtgaatgggagttcactcatgatttggctctgtttgtctgttattggtgtatagtaatgcttgtgatttttgcacattgatgttgtatcctgagactttgctgaagttgcttatcagcttaaggaggtttcgggctgagacactggggttttctaaatatacaatcatgtcatctgcagacagggacaatttgacttcctgttttcctaactgaataccatttatttctttctcctgcctgattgccctggccagaacttccaacactatgttgaataggggtggagagagagggcatccctgtcttgtgccagttctcaaagggaatgcttccagtttttgcccattcagtatgatactggctgtgggtttgtcaaatagctcttattattttgagagacgtcccatcaatacctagtttattcagagtttttagcatgaagggctgttgaattttgtcaaaggcctttttctgcatctattgagataaacatgtggtttttgtctttggttctatttatatgatggattacgtttattgatttgcatacgttgaacaagccttgcatcccagggatgaagccaacttgatcatggtggataagctttttgatgtgctgctggattcggtttgccagtattttattgaggattttcacatcgatgttcatcagggatattggtctaaaattctctttttttgttgtgtctctgcccggctttggtatcaggatgatgctggcctcataaaatgagttagggaggattccctctttttctattgattggaatagtttcagaaggaatggtaccagctcctctttatacctgtggtagagttcagctatgaatccatctggtcctgggctttttttggttggtagtctattaattattgcctcaacttcagagcctgttattggtctattcagggattcgacttcttcctggtttagtcttgggagggtgtatgtgtccaggaatttatctgtttcttctagattttctagtttatttgcatagaggtgtttatagtattctctgatggtagtttgtatttctgtgggattggtggcgatatcccctttatcattttttattgcatctatttgattcttctctcttttcttctttattagtcttgctagcggtctatcaattttgttgatcttttcagaaaaccagctcctggattcattaattttttgaagggtttttttgtgtctctatccccttcagttctgctctgatcttagttatttcttgttttctgctagcttttgaatgtgtttgctcttgcttctctagttcttttaattgtgatgttacggtgtcgattttagatctttcctgctttctcttgtgggcatttagtgctataaatttccctctacacactgctttgaatgtgtcccagagaatctggtatgttgtgtctttgttctcattggtttcaaaaaacatctttatttctgccttcatttcgttatgtacccagtagtcattcaggaggaggttgttcagtttccatgtagttatgcggttttgagtgagtttcttaatcctgaattctaatttgattgcactgtggtctgagagacagtttgttataatttctgttcttttacatttgctgaggagtgctttacttccaactatgtggtcagttttggaataagtctgatgtggtgctgagaagaatgtatattctattgatttggggtggagagttctgtagatgtctattaggtccagttggtgcagacttgagttcaagtcctgggtatccttgttaactttctgtcttgttgatctgtctaatgttgacagtggggtgttaaagtctcccattattaatgtgtgggagtctaagtctctttgtaggtctctaaggacttgctttatgaatctgggtgtatatatatttaggatagttagctcttcttgttgaattgatccctttaccattatgtaatggccttgtctcttgacctttgttggtttaaagtcggttttattggagactaggactgcaacccctgcttttttttgttttccatttgcttggtagatcttcctccatccctttattttgagcctgtgtgtgtgtctgcatgtattcagcagatgggacccctgaatacagcacactgatgggtcctgactgtttatccagtttgccagtctgtgttttttaattggggcatttagtccatttacatttaaagttaatattgttatgcgtgaatttgatcctgtcattatgatgttagccggttattttgcccattagttgatgcagtttcttcctagcatcgatgatgtttacaatttggcatgttttgcagtggctggtactgatggttcctttccatgtttagtgcttccttcaggagctcttgtagggcaggcctggtggtgacagaatctctcaggatttgcttgtaaatttgtctgtaaaggattttatttctccttcacttatgaagcttagtttggctggatatgaaattctgattgaaaattctttaagaatgttgaatattggcccccactctcttctggcttgtagggtttctgccgagagatctgctgttagtctgatgggcttccctttgtgggtaacccgacctttctctctggctgcccttagcattttttccttcatttcaactttggtgaatctgacagttatgtgtcttggggttgctcttctcaaggagtgtctttgtggtggtctctgtatttcgtaaatttgaatgttggcctgccttgctaggttggggaagttctcctggataatatcctgaagagtgttttccagcttggttccattctccctgccacttacaggtacaccaatgagacgtagatttggtcttttcacatagtcccatatttcttggaggcttctttcgtttctttttactcttttttctctaaacttatcttctcacttcatttcattaatttgtgcttcagtcactgataccctttcttccacttgatggaatctggtactgaagcttgtgcatgtgtcacgtagttctcgtgccatggttttcagctccatcagatcatttaaggtcttctctatgctgtatattctagttagccattcgtctaatcttttttcaaggtttttagcttccttgtgacgggttcaaacatcttcctttagcttggagaagtttgttactaccaactttctgaagtctacttctgtcaactcgtcaaagtcattctccgtcctgttttgttcccgttgctggcaaggagctgtgatacttggaggagaaggggtgctctggtttttagaattttcatcttttctgctctggtttctccccatctttgtggttttatctacctttggtctttgctgatagtgacctacagatggggttttggtgtggatgtcctttttgttgatgttgatgctattccttcctgtttgttagttttccttctaacagtcaggtccctcagctgcaggtctgttggagtttgctggaggtccactccagaccctgttgcctaggtatcaccagcggaggctgcagaacagcaaatattgcagaacagcaaatattgctgcctgatccttcctctggaagcttcgtctcagaggggcacccagctgtatgaggtgtcaatcagcccctactgggaggtgtctcccagttaggctactcgggggtctgggacccacttgaggaggcagtctgtcccttctcggatctcaaactccgtgct

SEQ ID NO: 10551 - DNA, 7503 bp, Homo sapiens
ttttttttttttattatactttaagttttagggtacatgtgcacattgtgcaggttagttacatatgtatacatgtgccatgctggtgcgctacacccactaactcgtcatctagcattaggtatatcttccaatgctatccctcccccctccccccccccaccacagtccccagagtgtgatattccccttcctgtgtccatgtgatctcactgttcaattcccacctatgagtgagaacatgcggtgtttggttttttgttcttgcgatagtttactgagaatgatgatttccaatttcatccatgtccctacaaaggacatgaactcatccttttttatggctgcatagtattccatggtatatatgtgccacattttcttaatccagtctatcattgttggacatttgggttggtgccaagtctttgctattgtgaataatgccgcaataaacatacgtgtgcatgtgtctttatagcagcatgatttatagtcctttgggtatatacccagtaatgggatggccgggtcaaatggtatttctagttctagatccctgaggaatcgccacactgacttccacaacggttgaactagtttacactcccaccaacagtgtaaaagtgttcctatttctccacatcctctccagcacctgttgtttcctgactttttaatgattgccattctaactggtgtgagatggtatctcatagtggttttgatttgcatttctctgatggctagtgatgatgagcattttttcatgtgttttttggctgcataaatgtcttcttttgagaattgtctgttcatgtccttcgcccactttttgatggggttgtttgtttttttcttgtaaatttgtttgagttcattgtagattctggatattagccctttgtcagatgagtaggttgcgaaaattttctcccattttgtaggttgcctgttcactctgatggtagtttcttttgctgtgcagaagcactttagtttaattagatcccatttgtcaattttgtcttttgttgccattgcttttggtgttttggacatgaagtccttgtccatgcctatgtcctgaatggtaatgcctaggttttcttctagggtttttatggttttaggtctaacgtttaaatctttaatccatcttgaattgatttttgtataaggtgtaaggaagggatccagtttcagctttctacatatggctagccagttttcccagcaccatttattaaatagggaatcctttccccattgcttgtttttctcaggtttgtcaaagatcagatagttgtaggtaggcggcgttatttctgagggctctgttctgttccattgatctatatctctgttttggtaccagtaccatgctgttttggttactgtagccttgtagtatagtttgaagtcaggtagtgtgatgcctccagctttgttcttttggcttaggattgacttggcgatgcgggctcttttttggttccatatgaactttaaagtagttttttccaattctgtgaagaaagtcattggtagcttgatggggatggcattgaatctgtaaattaccttgggcagtatggccattttcacgatattgattcttcctacccatgagcatggaatgttcttccatttgtttgtatcctcttttatttccttgagcagtggtttgtagttctccttgaagaggtccttcacatcccttgtaagttggattcctaggtattttattctctttgaagcaattgtgaatgggagttcactcatgatttggctctctgtttgtctgttgttggtgtataagaatggttgtgatttttgcacattgattttgtatcctgagactttgctgaagttgcttatcagcttaaggagattttgggctgagacaatggggttttctagatatacaatcatgtcatctgcaaacaaggacaatttgacttcctcttttcctaattgaataccctttatttccttctcctgcctaattgccctggccagaacttccaacactatgttgaataggagtggtgagagagggcatccctgtcttgtgccagttttcaaagggaatgcttccagtttttgcccattcagtatgatattggctgtgggtttgtcatagatagctcttattattttgaaatacgtcccatcaatacctaatttattgagagtttttagcatgaagggttgttgaattttgtcaaaggctttttctgcatctattgagataatcatgtggtttttgtctttggctctgtttatatgctggattacatttattgatttgcgtatattgaaccagccttgcatcccagggatgaagcccacttgatcatggtggataagctttttgatgtgctgctggattcggtttgccagtattttattgaggatttttgcatcaatattcatcaaggatattggtctaaaattctcttttttggttgtgtctctgcccggctttggtatcagaatgatgctggcctcataaaatgagttagggaggattccctctttttctattgattggaatagtttcagaaggaatggtaccagttcctccttgtacctctggtagaattcggctgtgaatccatctggtcctggactctttttggttggtaaactattgattattgccacaatttcagctcctgttattggtctattcagagattcaacttcttcctggtttagtcttgggagagtgtatgtgtcgaggaatgtatccatttcttctagattttctagtttatttgcgtagaggtgtttgtagtattctctgatggtagtttgtatttctgtgggatcggtggtgatatcccctttatcattttttattgtgtctatttgagtcttctctctttttttctttattagtcttgctagcggtctatcaattttgttgatcctttcaaaaaaccagctcctggattcattgattttttgaagggttttttgtgtctctatttccttcagttctgctctgattttagttatttcttgccttctgctagcttttgaatgtgtttgctcttgcttttctagttcttttaattgtgatgttagggtgtcaattttggatctttcctgctttctcttgtgggcatttagtgctataaatttccctctacacactgctttgaatgcgtcccagagattctggtatattgtgtctttgttctcgttggtttcaaagaacgtctttatttctgccttcatttcgttatgtacccggtagtcactcaggagcaggttgttcagtttccatgtagttgagcggctttgagtgagattcttaatcctgagttctagtttgattgcactgtggtctgagagatagtttgttataatttctgttcttttacatttgctgaggagagctttacttccaactatgtggtcaattttggaataggtgtggtgtggtgctgaaaaaaatgtatattctgttgatttggggtggagagttctgtagatgtctattaggtctgcttggtgcagagctgagttcaattcctgggtatccttgttgactttctgtctcgttgatctgtctaatgttgacagtggggtgttaaagtctcccattattaatgtgtgggagtctaagtctctttgtaggtcactcaggacttgcttcatgaatcttggtgctcctgtattgggtgcatatatatttaggatagttagctcttcttgttgaattgatccctttaccattatgtaatggccttctttgtctcttttgatctttgttggtttaaagtctgttttatcagagactaggattgcaacccctgccttttttgttttccatttgcttggtagatcttcctccatccttttattttgagcctatgtgtgtctctgcacatgagatgggtttcctgaatacagcacactgatgggtcttgactctttatccaatttgccagtctgtgtcttttaattggagaatttagtccatttacatttaaagttaatattgttatgtgtgaatttgatcctgtcattatgatgtcagctggtgattttgctcattagttgatgcagtttcttcctagtctcgatggtctttacattttggcatgattttgcagcggctggtaccagttgttcctttccatgtttagcgcttccttcaggagctcttttagggcaggcctggtggtgacaaaatctctcagcatttgcttgtctgtaaagtattttatttctccttcacttatgaagcttagtttggctggatatgaaattctgggttgaaaattcttttctttaagaatgttgaatattggcccccactctcttctggcttgtagggtttctgccgagagatccgctgttagtctgatgggcttccctttgagggtaacccgacctttctctctggctgcccttaacattttttccttcatttcaactttggtgaatctgacaattatgtgtcttggagttgctcttcttgaggagtatctttgtggcattctctgtatttcctgaatctgaacgttggcctgccttgctagattggggaagttctcctggataatatcctgcagagtgttttccaacttggttccattctccccatcactttcaggtacaccaatcagacgtagatttggtcttttcacatagtcccatatttcttggaggctttgctcatttctttttattcttttttctctaaacttcccttctcgcttcatttcattcatttcatcttccattgctgataccctttcttctagttgatcgcatcggctcctgaggcttctgcattcttcacgtagttctcaagccttggttttcagctccatcagctcctttaagcacttctctgtattggttattctagttatacattcttctaaatttttttcaaagttttcaacttctttgcctttggtttgaatgtcctcccgtagctcagagtaatttgatcgtctgaagccttcttctctcagctcgtcaaagtcattctccatccagctttgttccattgctggtgaggaactgcgttcctttggaggaggagaggcgctctgcgttttagagtttccagtttttctgttctgttttttccccatctttgcggttttatctacttttggtctttgatgatggtgatgtacagatgggttttcggtgtggatgtcctttctgtttgttagtttttcttctaacagacaggaccctcagctgcaggtctgttggaataccctgccgtgtgaggtgtcagtgtgcccctgctggggggtgcctcccagttaggctgctcgggggtcaggggtcagggacccacttgaggaggcagtctgccggttctcagatctccagctgcgtgctgggagacccactgctctcttcaaagctgtcagactgcttttttttttttttttttttttgagacagagtcccgctctgtcatccaagctggagtacagtggcgtaatctcggctcactgcaacctgcgcctcccacgttcaagcgatactcctgcctcagcctcccaagtaactgggattacaggtgcgtgctaccacacctggctaatttttgtatttttcatagaaattgggtttcccatgttgcccaggctggtctcaaactcctgacttcaaatgatctgacctcctcggcttcccaaagcgctgggattacaggcgtgaagcacgacgcctggccggggagaacatcttcaacttgataaacagtatcttcaaaaaacctacagcaaacgtcatacttaacagtgggaaactagaagctttcccactaagagcagaaataagccaaggatatccccactcaccactctttccaacaccggactggaagtcctagctaatgaaataaggcaagaaataaaaagaaaaataaaactgtctttgtttgcagatgacatgatcatccaagaagaaaatcaaaaaactgaaaccaggcagtgattacagcaagactgcaggatacaaaagtcaatcactttcctatataccagcaatgaacaagtggaatttgagattaaaaacacaataccatttacattagcacccctcagaatgaaacacttaggtataaatcttaaaaaaaattagaatatctatatgagaaaaattaaagaagtgattaaagaagtcagagcactaaagaaatggagagatattccatgttcatagacagggagattcaatatagtcaaggtgtcagttcttcccaacttcatctacagactcaatgcaatcccaatctaaatccagcaagttattttgcagatatcaacaaactgattctaaagtttacatggggaagcaaaagacccagaatggtcaaaaaaatattaaaagagaagaacaaagttaacgggctgacactatacgacttcaatacttataataaagctacaataaataagacagtgtggtatcaatgaaagaagagagaaacagaccaatggaacagaacagagagcccagaattcgaccctgataaatacagtgaattgatctttgacaaaggagcaaaggcaatacaatggagcaaggggtcttttcaacaaatgatgttggaataactggatatccacatacaaaaaagcgcctctagacaaagaccacagacccttcacaaaaattatctgaaatgaatcataggcctaaatgtaaaatgcaaacctataaagctcctagaagataacaggaaaaaatctagattatgttgggtaggatgatgactttttagatataataccaaaggcacaatctatgaaaataagaattgataagctaagctttattaaaattaaaattttcctctccatgaaaggcactgtcaagagaatgaaaagacaagccacagattgagaaaaaatatttacaaaagaaatatcctataaggataaatatttgtaaattgaatattcacagaagacatatctgataaaggataaatatttgcaagttgaatatttgcaaaagacatatctgataaaggactagtatccaaaatataaaaagaactcttaaaacacagtaagaaaacaatccaattttttaaaatgggccaaagaccttaacagatacctcaccaaagatgatatacagatagtaaataagcatatgaaaaaatgttccatatcatatgtcatcaggtaaatgcaaattaaaatgaggtacctctacatacctattagaatggccaaaatccaaaacaattacaacaccaaatattagcaagaatggggagccacaggaactctcgttcattgctggtgggaatgcaaaatgatccagccactttgcaagacagtttggcagcttcttaacaaactaaacatactcttattaagtccagcaattgcatttcttggtatttgcacaaaagagctgaaaacttatatacatacaaaacctgctataaacacagatgtttggccaggcatggtggctcacacctgtaatcccagcact

SEQ ID NO: 10552 - DNA, 6060 bp, Homo sapiens
ttttactactgtatctttttttttttgttttgttttttttaattatattttaagttttagggtacatgtgcacattgtgcaggttagttacatatgtatacatgtgccatgctggtgcgctgcacccactaacgtgtcatctagcattaggtatatctcccaatgctatccctcccccctcccccaaccccaccacagtccccagagtgtgatattccccttcctgtgtccatgtgatctcattgttcaattcccacctatgagtgagaatatgcggtgtttggttttttgttcttgcaatagtttactgagaatgatggtttccaatttcacccatgtccctacaaaggacatgaactcatcattttttatggctgcatagtattccatggtgtatatgtgccacattttcttaatctagtctatcattgttggacatttgggttggttccaagtctttgctattgtgagtagtgccgcaataaacatacgtgtgcatgtgtctttatagcagcatgatttatagtcctttgggtatatacccagtaatgggatggctgggtcaaatggtatttctagttctagatccctgaggaatcgccacactgacttccacaatggttgaactagtttacagtcccaccaacagtgtaaaagtgttcctatttctccacatcctctccagcacctgttgtttcctgactttttaatgattgccattctaactggtgtgagatgatatctcatagtggttttgatttgcatttctctgatggccagtgatgatgagcattttttcatgtgttttttggctgcataaatgtcttcttttgagaagtgtctgttcatgtccttcgcccactttttgatggggttgtttgtttttttcttgtaaatttgtttgagttcattgtagattctggatattagccctttgtcagatgagtaggttgcgaaaattttctcccatgttgtaggttgcctgttcactctgatggtagtttcttttgctgtgcagaagctctttactttaattagatcccatttgtcaattttggcttttgttgccattgcttttggtgttttggacatgaagtccttgcccacgcctatgtcctgaatggtaatgcctaggttttcttctagggtttttatggttttaggtctaacgtttaaatctttaatccatcttgaattgatttttgtataaggtgtaaggaagggatccagtttcagctttctacatatggctagccagttttcccagcaccatttattaaatagggaatcctttccccattgcttgtttttctcaggtttgtcaaagatcagatagttgtagatatgcggcattatttctgagggctctgttctgttccattgatctatatctctgttttggtaccagtaccatgctgttttggttactgtagccttgtagtatagtttgaagtcaggtagtgtgatgcctccagctttgttcttttggcttaggattgacttggcgatgcgggctcttttttggttccatatgaactttaaagtagttttttccaattctgtgaagaaagtcattggtagcttgatggggatggcattgaatctgtaaattaccttgggcagtatggccattttcacgatattgattcttcctacctatgagcatggaatgttcttccatttgtttgtgtcctcttttatttctttgagcagtggtttgtagttctccttgaagaggtccttcacatcccttgtaagttggattcctaggtattttattctctttgaagcaattgtgaatgggagttcactcatgatttggctctctgtttgtctgttgttggtgtataagaatgcttgtgatttttgtacattgattttgtatcctgagactttgctgaagttgcttatcagcttaaggagattttgggctgagacaatggggttttctagataaacaatcatgtcgtctgcaaacagggacaatttgacttcctcttttcctaattgaataccctttatttccttctcctgcctgattgccctggccagaacttccaacactatgttgaataggagtggtgagagagagcatccctgtcttgtgccagttttcaaagggaatgcttccagtttttgcccattcagtatgatattggctgtgggtttgtcatagatagctcttattattttgaaatacgtcccatcaatacctaatttattgagagtttttagcatgaagggttgttgaattttgtcaaaggctttttctgcatctattgagataatcatgtggtttttgtctttggctctgtttatatgctggattacatttattgatttgcgtatattgaaccagccttgcatcccagggatgaagcccacttgatcatggtggataagctttttgatgtgctgctggattcggtttgccagtattttattgaggatttttgcatcaatgttcatcaaggatattggtctaaaattctcttttttggttgtgtctctgccaggctttggtatcaagatgatgctggcctcatgaaatgagttagggaggattccctctttttctattgattggaatagtttcagaaggaatggtaccagttcctccttgtacctctggtagaattcggctgtgaatccatctgatcctggactctttttggttggtaaactattgattattgccacaatttcagagcctgttattggtctattcagagattcaacttcttcctggtttagtcttgggagagtgtatgtgtcgaggaatgtatccatttcttctagattttctagtttatttgcgtagaggtgtttgtagtattctctgatggtagtttgtatttctgtgggatcggtggtgatatcccctttatcattttttattgtgtctatttgattcttctctctttttttctttattagtcttgctagcggtctatcaattttgttgatcctttcaaaaaaccagctcctggattcattgattttttgaagggttttttgtgtctctatttccttcagttctgctctgattttagttatttcttgccttctgctagcttttgaatgtgtttgctcttgcttttctagttcttttaattgtgatgttagggtgtcaattttggatctttcctgctttctcttgtaggcatttagtgctataaatttccctctacacactgctttgaatgcgtcccagagattctggtatgtggtgtttttgttctcgttggtttcaaagaacatctttatttctgccttcatttcgttatgtacccagtagtcattcaggagcaggttgttcagtttccatgtagttgagcggctttgagtgagattcttaatcctgagttctagtttgattgcactgtggtctgagagatagtttgttataatttctgttcttttacatttgctgaggagagctttacttccaactatgtggtcaattttggaataggtgtggtgtggtgctgaaaaaaatgtatattctgttgatttggggtggagagttctgtagatgtctattaggtccgcttggtgcagagctgagttcaattcctgggtatccttgttgactttctgtctcgttgatctgtctaatgttgacagtggggtgttaaagtctcccattattaatgtgtgggagcctaagtctctttgtaggtcactcaggacttgctttatgaatctgggtgctcctgtattgggtgcataaatatttaggatagttagctcctcttgttgaattgatccctttaccattatgtaatggccttctttgtctcttttgatctttgttggtttaaagtctgttttatcagagactaggattgcaacccctgcctttttttgttttccattggcttggtagatcttcctccatccttttattttgagcctatgtgtgtctctgcacgtgagatgtgtttcctgaatacagcacactgatgggtcttgactctttatccaacttgccagtctgtgtcttttaattgcagaatttagtccatttatatttaaagttaatattgttatgtgtgaatttgatcctgtcattatgatgttagctggtgattttgctcgttagttgatgcagtttcttcctagtctcgatggtctttacattttggcatgattttgcagcggctggtaccggttgttcctttctatgtttagcgcttccttcaggagctcttttagggcaggcctggtggtgacaaaatctctcagcatttgcttgtctataaagtattttatttctccttcacttatgaagcttagtttggctggatatgaaattctgggttgaaaattcttttctttaagaatgttggatattggtccccactctcttctggcttgtagggtttctgccgagagatccgctgttagtctgatgggctttcctttgagggtaacccgacctttctctctggctgcccttaacattttttccttcatttcaactttggtgaatctgacaattatgtgtcttggaattgctcttctcgaggagtatctttgtggtgttctctgtatttcctgaatctgaacattggcctgccttgctagattggggaagttctcctggataatatcctgcagagtgttttccaacttggttccattctccacatcactttcaagtacaccaatcagacgtagatttggtcttttcacatagtcccatatttcttggaggctttgctcatttctttttattcttttttctctaaacttcccttctcgcttcatttcattcatttcatcttccattgctgataccctttcttccagttgatcgcatcggctcctgaggcttctgcattcttcacgtagttctcgagccttggttttcagctccatcagctcctttaagcacttctctgtattggttattctagttatacattcttctaaatttttttcaaagttttcaacttctttgcctttggtttgaatgtcctcccgtagctcagagtaatttgatcgtctgaagccttcttctctcagctcgtcaaaatcattctccatccagctttgttccgttgctggtgaggaactgcgttcctttggaggaggagaggtgctttgcgttttagagtttctagtttttctgttctgttttttccccatctttgtggttttatctacttttggtctttgatgatggtgatgtacagatgggttttcggtgtagatgtcctttctggttgttagttttccttctaacagacaggaccctcagctgcaggtctgttggaataccctgctgtgtgaggtgtcagtgtgcccctgctggggggtgcctcccagttaggctgctcaggggtcaggggtcagggacccacttaaggaggcagtctgcccgttctcagatctccagctgcgtgctgggagaaccactgctctcttcaaagctgtcagacagggacacttaagtgtgcagaggttactgctgtctttttgtttgtctgtgccctgcccccagaggtggagcctacagaggcaggcaggcctccttgagctgtggtgggctccatccagttcgagcttcccggctgctttgtttacctaagcaagcctgggcaatggcgggcgcccctcccccagcctcgttgccgccttgcagtttgatctcagactgctgtgctagcaatcagtgagattccgtgggcgtaggaccctctgagccaggtgtgggatatagtctcgtggtgcgccgttttttaagccggtctgaaaagcgcaatattcgggtgggagtgacccgattttccaggtgcgtccgtcacccctttctttgactcggaaagggaactccctgaccccttgcgcttcccagggcaggcaatgcctcgccctgcttcggctcgcgcacggtgcgcacacacactggcctgcgcccactgtctggcactccctagtgagatgcacctggtacctcagatggaaatgcagaaatcacccgtcttctgcgttctcacgctgggagctgtagaccggagctgttcctattcggccatcttggctcctccccgg

SEQ ID NO: 10553 - DNA, 6433 bp, Homo sapiens
tttttgtctttatttatttatttatttttattacactttaagttttagggtacatgtgcacaacgtgcaggtttgttacatatatatacatgtgccatgttggtgtgctgcacccattaacttgtcatttaacattaggtatatctcccaatgctacccctccaccctcccccaccacacaacaggccctggtgtgtgatgttccccttcctgtgtccaagtgttctcactgttcaattcccacctatgagtgagaacatgtggtgtttggttttttgtccttgtgatagtttgctgagaatgatggtttccagcttcatccatgtccctacaaaggacatgaactcatcattttttatggctgcatagtattccatggtgtatatgtgccacattttcttttctttttttttttttaattatactttaagttttagggtacatgtgcacattgtgcaggttagttacatatctatacatgtgccatgctggtgcgctgcacccactaactcgtcgtctagcattaggtatatctcccaatgctatccctcccccctcccccctccccaccacagtccccagagtgtgatattccccttcctgtgtccatgtgatctcattgttcaattcccacctatgagtgagaatatgcggtgtttggttttttgttcttgcgatagtttactgagaatgatggtttccaatttcatccatctccctacaaaggacatgaactcatcattttttatggctgcatagtattccatggtgtatatgagccacattttcttaatccagtctatcattgttggacatttgggttggttccaagtctttgctattgtgaataatgccgcaataaacatacgtgtgcatgtgtctttatagcagcatgatttatagtcatttgggtatatacccagtaatgggatggctgggtcaaatggtatttctagttctagatccctgaggaattgccacactgacttccacaatggttgaactagtttacagtcccaccaacagtgtaaaagtgttcctatttctccacatcctctccagcacctgttgtttcctgacttgttaatgattgacattctaactggtgtgagatgatatctcatagtggttttgatttgcatttctctgatggccagtgatgatgagcattttttcatgtgttttttggctgcataaatgtcttcttttgagaagtgtctgttcatgtccttcgcccaatttttgatggggttgtttgtttttttcttgtaaatttgtttgagttcattgtagattctggatattagccctttgtcagatgagtaggttgcgaaaattttcttccatgttgtaggttgcctgttcactctgatggtagtttcttttgctgtgcagaagctctttagtttaattagatcccatttggcaattttggcttttgttgccattgcttttggtgttttggacatgaagtccttgcccacgcctatgtcctgaatggtaatgcctaggttttcttctagggtttttatggttttaggtctaacttttaaatctttaatccatcttgaattgatttttatataaggtgtaaggaagggatccagtttcagctttctacatatggctagccagttttcccagcaccatttattaaatagggaatcctttccccattgcttgtttttctcaggtttgtcaaagatcagatagttgtagatatgtggcgttatttctgagggctctgttctgttccattgatctatatctctgttttggtaccagtaccatgctgttttggttactgtagccttgtagtatagtttgaagtcaggtagtgtgatgcctccagctttgttcttttggcttaggattgacttggcaatgcgggctcttttttggttccatatgaactttaaagtagttttttccaattctgtgaagaaggtcattggtagcttgatggggatggcattgaatctataaattaccttgggcagtatggccattttcacgatattgattcttcctacccatgagcatggaatgttcttccatttctttgtatcctcttttatttccttgagcagtggtttgtagttctccttgaagaggtccttcacatcccttgtaagttggattcctaggtattttattctctttgaagcaattgtgaatgggagttcactcatgatttggctctctgtttgtctgttgttggtgtataggaatgcttgtgatttttgtacattgattttgtatcctgagactttgctgaagttgcttatcagcttaaggagattttgggctgagatgatggggttttctagataaacaatcatgtcgtctgcaaacatggacaatttgacttcctcttttcctaattgaataccctttatttccttctcctgcctgattgccctggccagaacttccaacactatgttgaataggagcggtgagagagggcatccctgtcttgtgccagttttcaaagggaatgcttccagtttttgcccattcagtatgatattggctgtgggtttgtcatagatagctcttattattttgaaatacatcccatcaatacctaatttattgagagtttttagcatgaagggttgttgaattttgtcaaaggctttttctgcatctattgagataatcatgtggtttttgtctttggctctgtttatatgctcgattacatttattgatttgcgtatattgaaccagccttgcatcccagggatgaagcccacttgatcatggtggataagctttttgatgtgctgctggattcggtttgccagtattttattgaggatttttgcatcaatgttcatcaaggattttggtctaaaattctcttttttggttgtgtctctgcccagctttggtatcaggatgatgctggcctcataaaatgagttagggaggattccctctttttctattgattggaatagtttcagaaggaatggtaccagttcctccttgtacctctggtagaattcggctgtgaatccatctggtcctggactctttttggttggtaagctattgattattgccacaatttcagctcctgttattggtctattcagagattcaacttcttcctggtttagtcttgggagagtgtatgtgtcgaggaatgtatccatttcttctagattttctagtttatttgcgtagaggtgtttgtagtattctctgatggtagtttgtatttctgtgggatcggtggtgatatcccctttatcattttttattgtgtctatttgattcttctctctttttttctttattagtcttactagcggtctatcaattttgttgatcctttcaaaaaaccagctcctggattcattgattttttgaagggttttttgtgtctctatttccttcagttctgctctgattttagttatttcttgccttctgctagcttttgaatgtgtttgctcttgcttctctagttcttttaattgtgatgttagggtgtcaattttggatctttcctgctttctcttgtgggcatttagtgctataaatttccctctacacactgctttgaatgcgtcccagagattctggtatgttgtgtctttgttctcgttggtttcaaagaacttctttatttctgccttcatttcgttatgtacccagtagtcattcaggagcaggttgttcagtttccatgtagttgagcggctttgagtgagattcttaatcctgagttctagtttgattgcacggtggtctgagagatagtttgttataatttctgttcttttccatttgctgaggagtgctttacttccaactatgtggtcaattttggaataggtgtagtgtggtgctgaaaaaaatgtatattctgttgatttggggtggagagttctgtagatgtctattaggtctgcttggtgcagagctgagttcaattcctgggtatctttgttgactttctgtctcgttgatctgtctaatgttgacagtggggtgttaaagtctcccattattaatgtgtgggagtctaagtctctttgtaggtcactcaggacttgctttatgaatctgggtgctcctgtattgggtgcatatatatttaggatagttagctcctcttgttgaattgatccctttaccattatgtaatggccttctttgtctcttttgatccttgttggtttaaagtctgttttatcagagactaggattgcaacccctgcctttttttgttttccacttgcttggtagatcttcctccatccttttattttgagcctatgtgtgtctctgcacgtgagatgggtttcctgaatacagcacactgatgggtcttgactctttatccaacttgccagtctgtgtcttttaattggagaatttagtccatttacatttaaagttaatattgttatgtgtgaatttgatcctgtcattatgatgttagctggttattttgcttgttagttgatgcagtttcttcgtagtctcgatggtctttacattttggcatgattttgcagcggctggtaccggttgttcctttccatgtttagcgcttccttcaggacctcttttagggcaggcctggtggtgacaaaatctctcagcatttgcttgtctgtaaagtattttatttctccttcacttatgaagcttagtttggctggatatgaaattctgggttgaaaattcttttctttaagaatgttgaatattggcccccactctcttctggcttgtagggtttctgccgagagatccgctgttagtctgatgggcttccctttgtgggtaacccgacctttctctctggctgcccttaacattttttccttcatttcaactttggtgaatctgacaattatgtgtcttggagttgctcttctcgaggagtatctttgtggtgttctctgtatttcctgaatctgaacgttggcctgccttgctagattggggaagttctcctggataatatcctgcagagtgttttccaacttggttccattctccgcatcactttcaggtacaccaatcagacatagatttggtcttttcacatagtcccatatttcttggaggctttgctcatttctttttattcttttttctctaaccttcccttctcgcttcatttcattcatttcatcttccattgctgataccctttcttccagttgatcgcgtcggctcctgaggcttctgcattcttcacgtagttctcgagccttggttttcagctccatcagctcctttaagcacttctctgtattgcttattctagttatacattcttctaaattttttccaagttttcaacttctttgcctttggtttgaatgtcctcccgtagctcagagtaatttgatcgtctgaagtcttcttctctcagctcgtcaaaatcattctccatccagctttgttccgttgctggtgaggaactgcgttcctttggaggaggagaggcgctctgcgttttagagtttccagtttttctgttctgttttttccccatctttgtggttttatctacttttggtctttgatgatgttgatgtacagatgggttttcggtgtggatgtcctttctgtttgttagttttccttctaacagacaggaccctcagctgcaggtctgttggaataccctgccgtgtgaggtgtcagtgtgctcctgctggggggtgcctcccagttaggctgctcgggggtcaggggtcagggacccacttgaggaggcagtctgcccggtctcagatctccagctgcgtgctgggagaaccactgctctcttcaaagctgttagacagggacatttaagtctgcagaggttactgctgtctttttgtttgtctgtgccctgcccccagaggtggagcctacagaggcaggcaggcctccttgagctgtggtgggctccacccagttccagcttgccggctgctttgtttacctaagcaagcctgggcaatagcgggcgcccctcccctagcctcgctgccgccttgcagtttgatctcagactgctgtgctagcaatcagcgagactccgtgggcgtaggaccctccgagccaggtgtgggatatagtctcgtggtgtgccgttttttaagccggtctgaaaagcgcaatattcgggtgggagtgacccaattttccaggtgcgtccgtcacccctttctttgactcggaaagggaactccctgaccccttgcacttcccaggtgaggcaatgcctcgccctgcttcggctcgcgcacagtgcgcgcacctactggcctgtgcccactgtctggcactccccagtgagatgaacccggtacctcagatggaaatgcagaaatcacccgtcttccgcgtcgctcacgctgggagctgtagaccggagctgttcctattcggccatcttggctcctct

SEQ ID NO: 10554 - DNA, 6178 bp, Homo sapiens
tatctattaattaattaattaatttattattattatactttaagttgtagggtacatgtgcacaatgtgcaggttagttacatatgtatacatgtgccatgctggtgtgctgcacccattaactcgtcatttagcattaggtatatctcctaatgctatccctccccctccccccaccccacaacagtccccagagtgtgatgttccccttcctgtgtccatgtgttctcattgttcagttgccatctatgagtgagaatatgcgttgtttggttttttgtccttgcgatagtttactgagaatgatgatttccaatttcatccatgtccctacaaaggacatgaactcatcattttttatggctgcataggattccatggtgtatatgtgccacattttcttaatccagtctatcattgttggacatttgggttggttccaagtctttgctattgtcaatagtgccgcagtaaacatacgtgtgcatgtgtctttatagcagcatgatttatagtcctttgggtatatacccagtaatgggatggctgggttcaaatgtatttctagttctagatccctgaggaatcgccacagtgacttccacaatggttgcactagtttacagtcccagcaacagtgtaaaagtgttcctatttctccacatcctctccagcacctgttgtttcctgactttttaatgatcgctgttctaactggtgtgagatggtatctcattgtggttttgatttgcatttctctgatggccagtgatgttgagcattttttcatgtgtcttttggctgcataaatgtcttcttttgagaattgtctgttcatatcctttgcccactttttgatggggttgtttgtttttttcttgtaaatttgtttaagttcattgtagattctgaatattagccctttgtcagatgagtaggttgcaaaaattttgtcccattttgtaggttgcctgttcactccgatggtagtttcttttgctgtgcagaagctcttgagtttaattagatcccatttgtcaattttggcttttgttgccattgcttttggagttttagacatgaagtccttgcccatgcctatgtcctgaatggtattgcctaggttttcttctagggtttttatggttttaggtctaacgtttaagtctttaatccatcttgaattaatttttgtataaggtgtaaggaagggatccattttcagctttctacatatggctagccagttttcccagcaccatttattaaatagggaatcctttccccactgcttgtttttctcaggtttgtcaaagatcagatagttgtagatatgtggcattatttctgagggctctgttctgttccattgatctatatctctgttttggtaccagtaccatgctgttttggttactgtagccttgtagtatagtttgaagtcaggtagcatgatgcctccagctttgttcttttggcttaggattgacttggcgacgcgggctcttttttggttccatatgaactttaaagtagttttttccaattctgtgaagaaagtaattggtagcttgatggggataccattgaatctataaattaccttgggcagtatggccattttaacgatattgattcttcctacccatgagcatggaatgttcttccatttgtttgtatcctcttttatttccttgagcagtggtttgtagttctccttgaagaggtccttcacgtcccttgtaagttggattcctaagtattttattctctttgaagcaattgtgaatgggagttcactcatgatttggctctctgtttgtgtgttattggtgtataggaatgcttgtgatttttgtacattgattttgtatcctgagactatgctgaagttgcttatcagcttaaggtgattttgggctgagatgatggggttttctagatatacaatcatgtcatctgcaaacagggacaatttgacttcctcttttcctaattgaataccctttatttacttctcctgcctaattgccctggccagaacttccaacaatatgttgaataggagtggtgagagaggacatccctgtcttgtgccagttttcaaagggaatgcttccagtttttgcccattcagtatgatattggctgtgggtttgtcatagatagctcttattattttgagatacatcccatcaatacctaatttattgagagtttttagcatgaagtgttgttgaattttgtcaaaggccttttctgcatctattgagataatcatgtggtttttgtctttggttctgtttatatgctggattacatttgatttgcgtatattgaaccagccttgcatcccagggatgaagcccacttgatcatggtggataagctttttgatgtgctgatggattcagtttgccagtattttattgaggatttttgcatcaatgttcatcaaggatattggtctaaaattctgttttttggtagtgtctctgcccggctttggtatcaggatgatgctggcctcataaaatgagttagggaggattccctctttttctattcattggaatagtttcagaaggaatggtaccagttcctccttgtacctctggtagaatttggctgtgaatccatctggtcctggactctttttggttggtaagctattgattattgccacaatttcagatcctgttattggtctattcagagattcaacttcttcctggtttagtcttgggagagtgtatgtgtcgaggaatttatccatttcttctagattttctagattatttgcatggaggtgtttgtagtattctctgatggtagtttgtatttctgtgggatcagtggtgatatcccctttatcattttttattgcgtctatttgattcttctctcttttcttctttattagtcttgctagtggtctatcaattttgttgatccttccaaaaaaccagctcctggattcattaattttttgaagggttttttgtgtctctatttccttcaattctgctctgattttagttatttcttgccttctgctcgcttttgaatgtgtttgctcttgcttttctagttcttttaattgtgatgttagggtgtcaattttggatctttcctgctttctcttgtgggcatttagtgctctaaatttccctctacacactgctttgaatgtgtcccagagattctggtatgttgtgtctttgttctcgttggtttcaaataacatctttatttctgccttcatttcgttatgtacccagtagtcattcaggagcaggttgttcagttttcatgtagttgagcggttttgagtgattttcttaatcctgagttctagtttgattgcactgtggtctgagagacagtttgttataatttctgatcttttacatttgctgaggagagctttacttccaactatgtggtcagttttggaataggtgtggtgtggtgctgaaaaaaatgtatattctgttgatttggggtggagagttctgtagatgtctattaggtccacttggtgcagagctgagtttaattcctgggtatccttgttaactttctgtgtcattgatctgtctaatgttgacagtggagtgttaaagtctcccattattattgtgtgtgggaggctaagtctctttgtaggtcactgaggacttgctttatgaatctgggtgctcctgtattgggtgcatatatatttaggatagttagctcttcttgttgaattgatccctttaccattatgtaatggccttctttgtctcttttgatctttgttggcttaaagtctgttttatcagagactaggattgcaatccctgcctttttttgttttccatttgcttagtagatcttactccatccttttattttgagcctgtgtgtgtctctgcatgtgagatgggtttcctgaatacagcacactgatgggtcttgactgtttatccaatttgccagtctgtgtcttttaattggagcatttagtccatttacatttaaagttaatattgttatgtgtgaatttgatcctgtcatgatgttagctggttattttgctcgttagttgatgcagttttttcctaatctcgatggtctttacattttggcatgattttgcagcagctggtaccggttgtgcctttccatgtttagtgcttccttcaggagctcttttaggtcaggcctggtggtgacaaaatctctcagcatttgcttgtctgtaaagtattttatttctccttcacttatgaagcttagtttggctggatatgaaattctgagttgacagttcttttctttaagaatgttgaatattggcccccactgtcttctggcttgtagagtttctgccgagagatcagctgttagtctgatgggcttccctttgtgggtaacctgacctttctctttggctgcccttaacattttttccttcatttcaactttggtgaatttgacaattatgtgtcttggagttgctcttctcgaggagtatctttgtggcgttctctgtatttcctgaatctgaacgttggcctgccttgctagactggggaagttctcctggatattatcctgaagagtgttttccaacttggttccattctccccatcactttcaggtacaccaatcagatgtagatttggtcttttcacatagtcccatatttcttggaggctttgttcgtttctttttattcttttttctctaaacttctcttctcgcttcatttcattcatttcatcttccatcactgataccctttattccagttgatcgcatcggctcctgaggcttctgcattcttcacgtagttctcgagccttggctttcagctccatcagctcctttaagcacttctctgtattggttattctagttatacattcgtctaaatttttttcaaagttttcaacttctttgcctttggtttgaatttcctcctgtagctcggagtagtttgattgtctgaagccttcttctctcaactcgtcaaagtcattctccatccagctttgttccgttgctggtgaggaactgcgttcctttggaggaggagaggcgctctgctttttagagtttccagtttttctgctctgtttttccccatctttgtggttttatctacttttggtctttgatgatggtgatgtacagatgggtttttggtgtggatgtcctttctgtttgttagttttccttctaacagacaggaccctcagctgcaggtctgttggagtttgctagaggtccactccagaccctgtttgcctgggtaccagcagtgctggctgcagaatagcagattttcgtgaaccgcgaatgctgctgtctgatcgttcctctggaagttttgtctcagaggagtacccggccgtgtgaggtgtcagtctgcccctactggggggtgcctcccagttaggctgcttgggggtcaggggtcaggacccacttgaggaggcagtctgcccgttctcagatctccagctgcacgctgggagaactactgctctcttcaaagctgtcagacagggacatttaagtctgcagaggttactgctgtctttttgtttgtctgtgccctgcccccagaggtggagcctacagaggcaggctggcctccttgagctgtggtgggctccacccagttcaagcttcctggctgctttgtttacctaagcaagcctgggcaatggtgggcgcccctcccccagcctggctgccgccttgtggtttgatctcagagtgctgtgctagcaatcagcgagactctgagcgtaggaccctctgagccaggtgagggatataatctcctggtgtgccatttcctaagcccgtcagaaaagcgcagtattcaggtgggagtggcccgattttccaggtgctgtctgtcacccctttccttgaccaggaaagggaactaactccctgacctgaccccttgcgcttcccaagtgaggcaatgcctcgccctgcttcggctggtgcacggtgcgttgcacccactgtcctgcgcctactgtctggcactccctagtgagatgaacccggtacctcaaatggaaatgcagaaatcacctgtcttctgagtagctgacactgggagctgtagactggagctgttcctatttggccatcttggctcctccc

SEQ ID NO: 10555 - DNA, 5807 bp, Homo sapiens
attttttttttatttttttaaattatactttaagttttagggtacatgtgcacaatgtgcaggtttgttacatatgtatacatgtgccatgttggtgtgatgcacccattaactcgtcatttagcattagttatatctcctaatgctgtccctcccgcctccccccaccccacaacagtccccagtgtgtgatgttccccttcctgtgtccatgtgttctcattgttcaattcccatctatgagtgagaacatgcaatgtttggttttttgtccttgtgatagtttgctgagaatgatggtttccagcttcattcatgcccctacaaaggacacgaactcatcattttttatggctgcatagtattccatggtgtatatgtgccacattttcttaatccagtctatcattgttggacatttcagttggttccaagtctttgctcttgtgaatagtgccgcaataaacatacatgtgcatgtgtctttatagcagcatgatttataatcctttgggtatatacccagtaatgggatggctgggtcaaatggtatttctagttctagatccctgaggaatcgccacaccgacttccacaatggttgaactagtttacagtcccaccaacagtgtaaaagtgttcctatttctccacatcctctccagcacctgttgtttcctgactttttaatgatcgccattctaaccggtgtgagatggtacctcattgtggttttgatttgcatttctctgatggccagtgatggtgagcattttttcatgtgttttttggctgcataaatgtcttcttttgagaagtgtctgttcatatccttcacccactttttggtggggttgtttttttcttgtaaatttgtttgagttcattgtagattctggatattagccctttgtcagatgagtaggttgcgaaaattttctcccgttttgtaggttgcctgttcactatgacagtgatttcttttgctgtgcagaagctctttagtttaattagatcccatttgtcaattttgtcttttgttgccattgcttttggtgttttagacatgaagtacttgcccatgcctatgtcctgaatcatattgcctagctttccttctagggtttttatggttttaggtctaacatttaagtctttaatccatcttgaattaatttttgtataaggtgtaaggaagggatccagtttcagctttctacatatggctagccagttttcccagcaccatttattaaacagggaatcctttccccatttcttgtttttgtcaggtttgtcaaagatcagatagttgtagatatttggcattatttctgagggctctgttatgttccattggtctatatctctgttttggtaccagtaccatgctgttttggttactgtagccctgtagtatagtttgaagtcaggtagcgtgatgcttccagctttgttcttttggcttaggattgacatggcaatgcaggctcttttttggttccatatgaactttaaagtagttttttccaattctgtgaagaaattcattggtagcttgatggggatggcattgaatctataaattaccttgggcagtatggccattttcatgatattgattcttcctacccatgagcatggaatgttcttccatttgtttatatcctcttttatttcattgagcagtggtttgtagttctaggtccttcacatcccttgtaagttggaatcctatgtattttattctctttgaagcaattgtgaatgggagttcactcatgatttggctctctgtttgtctgttattgctgtataagaaagcttgtgatttttgcacattgattttgtatcctgagactttgctgaagttgcttatcagcttaaggagattttgggctgagaggatggggttttctagatatacaatcatgtcatctgcaaacagggagaatttgacttcttcttttcctaattgaatgccctttatttccttatcctgcctgattgccctggccagaacttccaacactatgttgaatacgagtggtgagagagggcatccctgtcttgtgccagttttcaaaaggaatgcttccagtttttgtccattcagtatgatattggctgtgggtttgtcgtagatagctcttattattttgagctatgtcccatcaatacctaatttattgagagtttttagcatgaagggttgttgaattttgtcaaacgccttttctgcgtttattgagataataatgtggtttttgtctttggttctgtttatatgctggattacgtttattgattttcatacgttgaaccagccttgcatcccagggatgaggcccacttgatcatggtggataagctttttgatgtgctgctggattcggtttgccagtattttattgaggatttttgcatcaatgttcgtcaaggatattggtctaaaattctctcttttttgttatgtctctgccaggctttggcattaggatgatgctggcctcataaaatgagttagggaggattccctctttttctattgattggaatggtttcagaaggaatggtaccagctcctccttgtacctctggtagaattcgactgtgaatccatctggtcctggactttttttggttggtaagctattaattattgcctcaatttcagagcctgttattggtctattcagagattcaacttcttcctggtttagtcttgggagagtgtatgtgtcgaggaatttatgcatttcttctagattttctagtttatttgtgtagaggtgtttatagtgttctctgatggtagtctgtatttctgtgagattggtggtgatatcccctttatcattttttattgcatcgatttgattcttctctcttttcttctttattagtcttgctagcagtctatcaattttgttgatcttttcaaaaaaccagctcctggattcattgatttttttgaagggtttattgtgtctctatttccttcagttctgctctgattttagttatttcttgccttcttgtagcctttgaatgtgtttgctgttgcttctctagttcttttaattgtgatgttagggtgtcaattttagatctttctgctttctcttgtgggcatttagtgctgtaaatttccctctacacactgctttgaatgtgtcccagagattctggtatgttgtgtctttgttctcattggtttcaaagaacatctttatttctgccttcattttgttatgtacccagtagtcattcaggagctggttgttcagttcccatgtagctgagcggttttgagtgagtttcttaatcctgagttctagtttgattgcactgtggtctgagagacagtttgttataatttctgttcttttacatttgctgaggagtgctttacttccacctatgaggtcaattttggaataggtgtggtgtggttctgagaagaatgtatattctgttgatttggggtggagagttctgtagatgtctattaggtccgcttggtgcagagctgagttcaattcctgtatatccttgttaactttctgtcttgttgacctgtctaatattgacagtgcagtgttaaagtctcccattattattgtgtgggtgtctaagtctctttgtaggtcactaaggacttgctttatgaatctgggtgctcctgtattgggtgcatatatatttaggatagttagttcttcttgttgaattgatccctttaccattatgtaatggccttctttgtgtgttttgatctttgttggtttaaagtctgttttatccaagactaagattgcaacccctgcctttttgtgttttccatttgcttggtagatcttcctccatccttttgttttgagcttatgtgtgtctctgcatgtgagatgggtttcctgaatacagcacactgatgggtcttgactctttatccaatttgccagtctgtgtcttttaattggagcatttagcccatttacatttaaggttagtattgttatgtgtgaattttatcctatcattatgatgttagctggttattttgctcattagttgatgcagtttattcctagcctcgatggtctttacaatttggcatgtttttgcagtggctggtaccggttgttcctttccatgtttaatgcttccttcaggagctcttttagagcaggcctggtggtgacaaaatctctcagcatttgcttgtctgtaaagtattttatttttccttcatttatgaagcttagtttggctgaatatgaaattctgggttgaaaattcttttctttaggaatattgaatattggcccccactctcttctggcttgtagagtttctgctgagagatctgctgttagtctgatgggcttctctttgtgggtaacccgacctttctctctggttgcccttaacattttttccttcatttcaactttggtgaatctgacaattatgtgtcttggagttgctcttctcgaggagtatctttgtggcattctctgtatttcctgaatctgaatgttggcctgacttgctagattggggaagttctcctggataatatcctgcagagtgttttccaacttggttccattctccctgtcactttcaggtacaccaatcagacgtagatttggtcttttcacatagtcccatatttcttggaggctttgtttgtttcgttttattcttttttctctaaacttcttttcacacttcattgtattcatttgatcttccatctctgataccctttcttcccgttgatcacatcagttactgaggattgtgcatttgtcatgtagttcttgtgccgtgcttttcagctccatcagttcctttaacgacttctctgcattggttattctagttatccattcgtctaattttttttcaaagtttttaatttctttgccgttggttcgaacttccttctttagctcggagtagtttgatcttctgaagccttcctctctcaactcatcaaagtcattctccatctagctatttcctttgctggtgaggagctgcattcctttggaggaggagaggcactctgatttttagagtttccagtttttctgctctgttttttccccatctttgtggtttttatctacctttggtctttgatgatggtgatgtacagatgggcttttggtgtagatgtcctttctgtttgttagttttccttctaatagtcaggaccctcagctgcaggtctgttggagtttactggaggtccactccagaccctgtttgcctgggtatcagcagcagtggctgcagaacagtggatattggtgaactgcaaatgctgctacctgatcgttcctccggaaattttgtctcagaggagtacccggccgtgtgaggtgtcagtacgcccctactggggggtgcctcccagttaggctgctggggggtcagggacccgcttgaggagccagtctgcccgttctcagatctccagctgcatgctgggagaaccactgctctcttcaaaactgtcagacagggacatttaagtctgcagaggttattgctgtcttttgtttgtctgtgccctgcccccagaggtggagcctacagaggcaggcaggcctccttgagctgtggtgggctccacccagttcaagcttcagggccgctttgtttacctactcaagcctgagcaatggcaggcgcccctcccccagccttgctgctgccttgcagtttgatctcagactgctgtgctagcagtgagcgaggctccatgggcgtaggaccctctgagccaggtg

SEQ ID NO: 10556 - DNA, 6032 bp, Homo sapiens
tttggtagatttcctttttttttttttttattatactttaagttttagggtacatgtgcacattgtgcaggttagttacatatgtatacatgtgtcatgctggtgcgctgcacccactaactcgtcatctagcattaggtatatgtcccaatgctatccctcccccctccccccaccccaccacagtccccagaatgtgatattccccttcctgtgtccatgtgatctcattgttcaattccacctatgagtgagaatatgcggtgtttggttttttgttcttgcgatagtttacggagaatgatgatttccaatctcatccatgtccctacaaaggacatgaactcatcattttttatggctgcatagtattccatggtgtatatgtgccacattttcttaatccagtctatcattgttggacatttgcgttggttccaagtctttgctattgtgaatagtgccgcaataaacatacgtgtgcatgtgtctttatagcagcgtgatttatagtcctttgggtatatacccagtaatgggatggctgggtcaaatggtatttctagttctagatccctgaggaatcaccacactgacttccacaatgattgaactagtttacagtcccaccaacactgtaaaagtgttcctatttctccacatcgtctccagcacctgttgtttcctgactttttaatgatcgccattctaactggtgtgagatggtatctcattgtggtttggatttgcatttctctgatggccagtgatgatgagcattttttcatgtgttttttggctgcataaatgttttcttttgagaagtgtctgttcatgtcctttgcccactttttgatggggttgtttgtttttttcttgtaaatttgtttgagttcattgtagattctggatattagccctttgtcagatgagtaggttgcgaaaattttctcccattttgtaggttgcctgttcactctgatggtagtttcttttgctgtgcagaagctctttagtttcattagatcccatttgtccattttggcttttgttgccatttcttttggtgttttggacatgaagtccttgcccatgcctatgtcctgaatggtaatgcctaggttttcttccagagtttttatggttttacgtctaacatttaagtctttaatccatcttgaattgatttttgtataaggtgtaaggaagggatccagtttcagctttctccatatggctagccagttttcccagcaccatttattaaatagggaatcctttccccatttcttgtttttctcaggtttgtcaaagatcagatagttgtagatatgcggcgttatttctgagggctctgttctgttccattgatctatatctctgttttggtaccagtaccatgctgttttggttactgtagccttgtagtatagtttgaagtcaggtagtgtgatgcctccagctttgttcttttggcttaggattgacttggcgatgcgggctgtttcttggttccatatgaactttaaagtatttttttccaattctgtgaagaaaggcattggtagcttgatggggatgacattgaatctgtatattaccttgggcagtagggccattttcacgatattgattcttcctacccatgagcatggaatgttcttccatttatttgtatcctcttttatttccttgagcagtggtttgtagttctccttgaagaagtccttcacatcccttgtaagttggattcctagctattttattctctttgaagcaattgtgaatgggagttcactcatgatttggctctctgtttgtctgttgttggtgtataagaatgcttgtgatttttgtacattgattttgtatcctgagactttgctgaagttgcttatcagcttaaggagatttggggctgagacaatggggttttccagatatacaatcatgtcatctgcaaacagggacaatttgacttcctcttttcctaattgaataccctttatttccttctcctgcctaattgccctggccagaacttccaacactatgttgaataggagtggtgagagagggcatccctgtcttgtgccagttttcaaagggaatgcttccagtttttgcccattcagtatgatattggctgtgggtttgtcatagatagctcttattattttgaaataggtcccatcaatacctaatttattgagagtttttagcatgaagggttgttgaattttgtcaaaggctttttctgcatctattgagataatcatgtggtttttgtctttggctctgtttatatgctggattacatttattgatttgcgtatattgaaccagccttgcatcccagggatgaagcccactcgatcatggtggataagctttttgatgtgctgctggattcgttttgccagaattttatgaggatttttgcatcaatgttcatcaaggatattgttctaaaattctcttttttggttgtgtctctgccaggctttggtatcagaatgatgctggcctcataaaatgagttagggaggattccctctttttctattgattggaatagtttcagaaggaatggtaccagttcctccttatacctctggtagaattcggctgtgaatccatctggtcctggactctttttggttggtaaactattgattattgccacaatttcaggtcctgttattggtctattcagagattcaacttcttcctggtttagtcttgggagagtgtatgtgtcaaggaatttatccatttcttctagattttctagtttatttgtgtaggggtgtttgtagtattctctgatggtagtttgtatttctgtgggatcggtggtgatatcccctttatcattttttattgtgtctatttgattcatctctctttctttctttattagtcttcctagcagtctatcaattttgttgatcctttcaaaaaaccagctcctggattcattaattttttgaagggttttttgtgtctctatttccttcagttctgctctgattttagttatttcttgccttctgctagcttttgaatgtgtttgctcttgcttttctagttcttttaattgtgatgttagggtgtcaattttggatctttcctgctttctcttgtgggcatttagtgctataaatttccctctacacactgctttgaatgcatcccagagattctggtatgttgtgtctttgttctcgttggtttcaaagaacatctttatttctgccttcgtttcgttatttatccagtagtcattcaggagcaggttgttcagtttccatgtagttgagcggttttgagtgagattcttaatcctgagttctagtttgattgcactgtggtctgagagatagtttgttataatgtctgttcttttacatttgctgaggagagctttacttccaagtatgtggtcgattttggaataggtgtggtgtggtgttgaaaaaaatgtatattctgttgatttggggtggagagttctgtagatgtttattaggtctgcttggtgcagagctgagttcaattcctgggtatccttgttgactttctgtctcgttgatctgtctaatattgacagtggggtgttaaagtcccccattattaatgtgtgggagtctaagtctctttgtaggtcactcaggacttgctttatgaatctgggtgctcctgtattgggtgcatatatatttaggatagttagctcttcttgttgaattgatccctttaccattatgtaatggccttctttgtctcttttgatctttgttggtttaaagtctgttttatcagagactaggattgcaacccctgcctttttttgttttccatttgcttggtagatcttcctccatccctttattttgagcctatgtgtgtctctgcacgtgagatgggtttcctgaatatggcacactgatgggtcttgactctttatccaatttgccagtctgtgtcttttaattggagcatttagtccatttacatttaaagttaatattgttatgtgtgaatttgatcctgtcattatgatgttagctggtgattttgctcgttagttgatgcagtttcttcctagtctcgatggtctttatattttggcatgattttgcagcggctggtaccggttgttcctttccatgtttagtgcttccttcaggagctcttttagggcaggcctggtggtgacaaaatctctcagcatttgcttgtctgtaaagtattttatttctccttcacttatgaagcttagtttggctggatatgaaattctgggtttaaaattcttttctttaagaatgttgaatattggcccccactctcttctggcttgtagggtttctgccgagagatccgctgttagtctgatgggcttccctttgagggtaacccgacctttctctctggctgcccttaacattttttcctttatttcaactttggtgaatctgacaattatgtgtcttagagttgctcttctcgaggagtatctctgtggcgttctctgtatttcctgaatctgaatgttggcctgccttgctagattggggaagttctcctggataatatcctgcagagtgttttccaacttggttccattctccccatcactttcaggtacaccaatcagacgtagatttggtcttttcacatagtcccatatttcttggaggctttgctcatttctttttattcttttttctctaaacttcccttctcgcttcatttcatttatttcatcttccattgctgatacccttccttccagttgatcacattggctcctgaggcttctgtgttcttcacgtagttctcgagccttggttttcatctccatcagctcctttaagcacttctctgtattggttattctagttatacattcttgtaaatttttttcaaagttttcaacttccttgcctttggtttgaatgtcctcccgtagctcagagtaatttgatcgtctgaagccttcttctctcagctcgtcaaagtcattctccatccagctttgttccattggtggtgaggaactgcgttcctttggaggaggagaggcactctgcgttttagagtttccagtttttctgttctgttttttccccatctttgtggttttatctatttttggcctttgatgatggtgatgtacagatgggtttttggtgtggatgtcctttctgtttgttagttttccttctaacagacaggaccctcagctgcaggtctgttggaataccctgccgtgtgaggtgtcagtgtgtccctgctgggggtgcctcccagttaggctgctcaggggtcaggggtcagggacccacttgaggaggcagtctgctggttctcagatctccagctgcgtgctgggagaaccactgctctcttcaaagctgtcagacagggacatttaagtctgcagaggttactgctgtctttttgtttgtctgtgccctgccccgagaggtggagcctacagaggcaagcaggcctccttgagctgtggtgggctccacctagttcgagcttcctggctgctttgtttacctaagcaagcctgggcaatggcgggcgcccctcccccagcctggctgccgccttgcagtttgatctcagactgctgtgctagcatcagcgagactccgtgggcgtaggaccctctgagccaggtgcgggatataatctcgtggtgtgcagttttttaagcaggtccgaaaagcgcaatatttcggtgggagtgaccagattttccacgtgcgtccatcacccctttctttgactcggaaagggaactccctgaccccttgcgcttcccaagtgaggcaatgcctcgccctgcttgggctcgcgcacggtgcgtgcacccactgacccacgcccactgtctggcactccctagtgagatgaacccggtacctcagatgaaaatgcagaaatcacccgtcttctgcgttgctcacgctgggagctgtagacaggagctgttcctatttggccatctt

SEQ ID NO: 10557 - DNA, 6850 bp, Homo sapiens
ttttttttttaatttttttattattattattatactttaagttttaaggtacatgtgcacaacatgcaggtttgttacatatgtatacatgggccatgttggtgtgctgcacccattaactcatcatttagcattaggtatatctcctaatgctatccctccccactcccccaaccccacaacagtccccggtgtgtgatgttccccttcctgtgtccatatgttctcattgttcagttcccacctatgagtgagaatgtgcggtgtttggtttttttgtccttgcgatagtttgctgagaatgatggtttccagcttcatccatgtccctacaaaggacatgaactcatcattttttatggctacatagtattccatggtgtatatgtgccacattttcttaatccagtctgtcattgttggacatttgggttggttccaagtctttgctattgcgaatagtgccgcaataaacatacatgtgcatgtgtctttatagcagcatgatttatagtcctttgggtatatacccagtaatgggatggctgggtcaaatggtatttctagttctagatccctgaggaatcgccacactgacttccacaatggttgaactagtttacagtcccaccaacagtgtaaaagtgttcctatttctctacatcctctccagcacctgttgtttcctgactgtttaatgatcgccattctaactggtgtgagatggtatctcattttggttttgatttgcatttctctgatggccagtgatgatgagcattttttcatgtgtgttttggctacataaatgtcttcttttgacaaatgtctgttcatatcctttgcccactttttgatggggttgtttttttcttgtaaatttgtttgagttcattgtagattctggatactagccctttgtcagatgagtaggttgcaaaaattttctcccattctgtaggttgcctgttcactctgatggtggtttcttttgttgtgcagaagctctttagtttaattagatcccatttgtcaattttggcttttgttgccattgcttttggtgttttagacatgaagtccttgtccatgcctatgtcctgaatggtattgcgtaggttttcttctagggtttttatagttttaggtctaacatttaagtctttaatccatcttgaattaatttttgtataaggtgtaaggaagggatccagtttcagctttctacatatggctagccagttttcccagcaccatttattaaatagggaatcctttccccattgcttgtttttgtcaggtttgtcaaagatcagatagttgtagatatgcggcattatttctgagggctctgttctgttccattggtctatatctctgttttggtaccagtaccatgctgttttgtttactgtagccttgtagtatagtttgaagtcaggtagcgtgatgcctccagctttgttcttttggcttaggattgacttggcaatgtaggctcttttttggttccatatgaactttaaagtagttttttccaattctgtgaagaaagttgttggtagcttgatggggatggcattgaatctataaattaccttgggcagtatggccattttcacaatattgagtcttcctacccatgagcattgaatgttcttccatttgtttgtatcctcttttatttcattgagcagtggtttgtagttctccttgaagaggtccttcacatcccttgtaaattggattcctaggtattttattctctttgaagcagttgtgaatgggagttcactcatgatttggctctctgtttgtctgttattggtgtataagaatgcttgtgatttttgtacattgattttgtatcctgagactttgctgaagttgcttatcagcttaaggagattttgggctgagacgatggggttttctatgtgtacaatcatgtcatctgcaaattgggacaatttgacttcctcttttcctagttgaatgccctttattcccttctcctgcctgattgccctggccagaacttccaacactatgttgaataggagtggtgagagagggcatccctgtcttgtgccagttttcaaagggaatgcttccagtttttgtccattcagtatgatattggctgtgggtttgtcatagatagctcttattattttgaaatacgtcccatcaatacctaatttattgagagtttttagcatgaagggttgttgaattttgtcaaaggccttttctgcatctattgagataatcatgtggtttttgtctttggttctgtttatatgctggattacgtttattgattttcttatgttgaaccagccttgcatcccagggatgaagcccacttgatcatggtggataagctttttgatgtgttgctggattcggtttgccagtattttattgaggatttttgcatcaatgttcatcaaggatattggtctaaaattctctttttttgttatgtctctgcccggctttggtatcaggatgatgctggcctcataaaatgtgttagggaggattccctctttttctatttattggaatagtttcagaaggaatggtaccagctcctccttgtgcctctggtagaattcggctgtgaatccatctggtctggactttttttggttggtaagctattaattattgcctcaatttcagatcctgttattggtctattcagagattcaacttcttcctggtttagtcttgggagagtgtatgtgtcgaggaatttatccatttcttctagattttctagtttatttgcatagaggtgtttatagtattctctgatggtagtttgtatttctgtgggagcagtggtgatatcccctttatcattttttattgcacctatttgattcttctctcttttcttctttattagtcttgctagcggtctatcagttttgttgatcttttcaaaaaaccagctcctggattcattgatttttttgaagggttttttgcgtctctatttccttcagttctgctctgatcttagttatttcttgccttctgctagcttttgaatgtgtttgctcttgcttctctagttttttttttttttttttttttagtatttattgatcattcttgggtgtttcttggagggggtatgtggcagtgtcataggataatagtggagagatggtcagcagataaacacgtgaacaaaggtctctggttttcctagacagaggtccctgtggccttccgcagtgtttgtgtccctgggtacttgagattagggagtggtgatgactcttaatgagcatgcagcctttaagcatctgtttaacaaagcacatcttgcactgcccttaatccatttaaccctgagttgacacagcacatgtttcagagagcacggggttgggggtaaggttatagattaacagcatcccaaggcagaagaatttttcttagtccagaacaaaatggagtctcctatgtctacttctttctagacagacacagtaacaatctgatctctctttcttttccccacatttcccccttttcttttcaacaaaaccgccatcgtcatcatggcctgttctcgacggtcgctgtctcttcggagctgttgggtacacctcccagacggggcggccgggcagaggtgctcctcacttcccagacggggtggccgggcagaggagctcctcacatcccagacagtgggcggccaggcagaggctctcctcacctctcagacggggcagccgtgcagaggcgctcctcacctcccagacggggcagccgggcagaggcgctcctcacctcccagacggggcggccgggcagaggcgctcttcacctcccagacagggcggcagggcagaggcgcttcccacctccctgacggggcggccgggaagaggcgcccctcacctcccagacggggcggccgggcggaggcgctcctcacatcccagacaggacggctgggcagaggcgctcctcacttcccagacgacgggcggccgggcagaggcactcctcacctcccagacagggtggctgggcagagacgctcctcacctctcagacagggcggccggacagaggcgctcgcttcctagatggggcggccgggcagaggcgctccttacctcccagacgaagggtggccgggcagaggtgctcctcacatcccagacgatgggcggccgggcagaggcgctcctcacttcctagatggggcggccgggcagaggtgctcacttcccagatggggcggctgggcagaggcgctcctcacctcccagatgatgggcagccaggcagaggcgctcctcacctcccagacggggcggccgtgcggaggcgctcctcacctcccagacggggcggccgggcggagacgctcctcacctcccagatggggcggccgggcggaggcgctcctcacctcccagacgggttggccaggcagatctctagttctttcaattgtgatgttagggtgtcaattttagatctttcctgctttctcttgtgggcatttagtgctataaatttccctctacacactgctttgaatgcgtcccagagattctggtatgttgtgtctttgttctcgttggtttcaaagaacatctttatttctgccttcattttgttatgtacccagtagtcattcaggagcaggtagttcagtttccatgtagttgagcagttgtgagtgagtttcttaatcctgagttctagtttgattgcactgtggtctgagagacagtttgttataatttctgttcttttacatttgctgaggtgtgctttacttccaactatgtggtcaactttggaataggtgtggtgtggtgctgaaaagaatgtatattctgttgatttggggtggagagttctgtagatgtctattaggtctgcttggtgcagagctgagttcaattcctggatatctttgttaactttctgtctcgttgatctgtgttgacacagtggggttgttgacagtggggtgttaaagtctcccattattattgtttgggagtctaagtctctttgtaggtcactaaggacttgctttatgaatctgggtgctcctgtattgggtgcatatatatttaggatagttagttcttcttgttgaattgatccctttaccattatgtaatggtcttgtctcttttgatctttgttggtttaaagtctgttttatccgagactaggattacaacccctgcctttttttgttttccatttgcttggtagatcttcctccatccctttattttgagcctatgtgtgtttctgcacatgagatgggtttcctgaatacagcatactgatgggtcttgactctttatccaatttgccagtctgtgtcttttaattggagcatttagcccatttacatttaaggttaatattgttatgtgtgaatttgatcctgtcattatgatgttagctggttattttgctcattagttgatgcagtttcttcctagccttgatggtctttacaatttggcatgtttttgcagtggctggtaccggttgttcctttccatgtttagtgcttccttcaggagctcttttagggcaggcctggtggtgacaaaatctctcagcatttgcttgtctgtaaagtattttatttctccttcacttatgaagcttagtttggctggatatgaaattctgggttgaaaattattttctttaagaatgttgaatattggccctcactctcttctggcttctagagtttctgccgagagatcagctgttagtctgatgggcttccctttgtgggtaacccgacctttctctctggctgcccttaacattttttcctttatttcaactttggtgaatctgacaattatgtgtcttggagttgctctgctcgaggagtatctttgtagcattctctgtatttcctgaatttgaatgttggcctgccttgctagattggggaagttctcctggataatatcctgcagagtgttttccaacttggttccattctccccgtcactttcaggtacaccaatcagacgtaaatttggtcttttcacatagtcccatatttcttgcaggctttgttcatttctttttattcttttttctctaaacttctcttcacgcttcatttcattcattttgtcttccatcactgataccctttcttccagttgattgcatcggttactgaggcttgtgcattcgtcacgtagttctcatgccatggttttcagctccatcaggtcctttaaggacttctctgcatgggttattctagttatccattcgtctaatttttttcaaggtttttaacttctttgccattggttcgaacttcctcctttagctcagagagtttgatcttctgaagcctttctctctcaactcgtcaaagtcattctccatccagctttgttccgttgctggtgaggagctgcgttcctttggaggaggagaggcgctctgatttttagagtttccggtttttctgctctgttttttccccatctttgtggttttatctacctttgttctttgatgatggtgacgtacagatgggtttttggtgcagatgtcctttctgtttgttagttttccttctaacagtcaggaccctcagctgcaggtctgttggagtttactggaggtccactccggaccctgtttgcctaggtatcagcagtggtggctgcagaacagcagatagtgctgaaccgcaaatgctgctgcctgatcgttcctctggaagttttgtctcagaggagtacccggcagtgtgaggtgtcagtccgcccctactggggggtgcctcccagttagg

SEQ ID NO: 10558 - DNA, 6062 bp, Homo sapiens
ttttgttttttctttttgtctttttattttattttattttatttttatttcttttttattatactttaagttttagggtacatgtgcacattgtgcaggttagttacatatgtatacatgtgccatgctggtgcgctgcacccactaactcgtcatctagccttaggtatatctcccaatgctatccctccccgctccccccaccccaccacagtccccagagtgtgatattcccctccacatgtccatgtgatctcattgttcaattcccacccatgagtgagaatatgcggtgtttggttttttgttcttgcgatagtttactgagaatgatgatttccaatttcatccatgtccctacaaaggacatgaactcatcattttttatggctgcatagtattccatggtgtatatgtgccacattttcttaatccagtctatcattgttggacatttgggtaggttccaagtctttgctattgtgaataatgccgcaataaacatacgtgtgcatgtgtctttatagcagcatgatttatagtcatttgggtatatacccagtaatgggatggctgggtcaaatggtatttctagttctagatccctgaggaatcgccacactgacttccacaatggttgaactagtttacagtcccaccgacagtgtaaaagtgttcctatttctccacatcctctccagcacctgttgtttcctgactttttaatgattgccattctaactggtgtgagatgatatctcatagtggttttgatttgcatttctctgatggccagtgatgatgagcattttttcatgtgttttttggctgcataaatgtcttcttttgagaagtgtctgttcatgtccttcacccactttttgatggggttgttttttttttcttgtaaatttgtttgagttcattgtagattctggatattagccctttgtcagatgagtaggttgcgaaaattttctcccattttgtaggttgcctgttcactctgatggtagtttcttttgctgtgcagaagctctttagtttaattagatcccatttgtcaattttggcttttgttgccattgcttttggtgttttggacatgaagtccttgcccatgcctatgtcctgaatggtaatgcctaggttttcttctagggtttttatggttttaggtctaacgtttaaatctttaatccatcttgaattgatttttgtataaggtgtaaggaagggatccagtttcagctttctacatatggctagccagttttcccagcaccatttattaaatagggaatcctttccccattgcttgtttttctcagatttgtcaaagatcagatagttgtaggtatgtggcgttatttctgagggctctgttctgttccattgatctatatctctgttttggtaccagtaccatgctgttttggttactgtaggcttgtagtatagtttgaagtcaggtagtgtgatgcctccagctttgttcttttggcttagggttgacttggcgatgcgggctcttttttggttccatatgaactttaaagtagttttttccaattctgtgaagaaagtcattggtagcttgatggggatggcattgaatctgtaaattaccttgggcagtatggccattttcacgatattgattcttcctacccatgagcatggaatgttcttccatttgtttgtatcctcttttatttccttgagcagtggtttgtaattctccttgaagaggtccttcatatcccttgtaagttggattcctaggtattttattctctttgaagcaattgtgaatgggagttcactcatgatttggctccctgtttgtctgttgctggtgtataagaatgcttgtgatttttgtacattgattttgtatcctgagactttgctgaagttgcttatcagcttaaggagattttgggctgagacgatggggatttctagatgaacaatcatgtcgtctgcaaacagggacaatttgacttcctcttttcctaattgaataccctttatttccttctcctgactgattgccctggccagaacttccaacactatgttgaataggagtggtgagagagggcatcccctgtcttgtgccagttttcaaagggaatgcttccagtttttgcccattcagtatgatattggctgcgggtttgtcatagatagctcttattattttgaaatacgtcccatcaatacctaatttattgagagtttttagcatgaagggttgttgaattttgtcaaaggctttttctgcatctattgagataatcatgtggtttttgtctttggctctgtttatatactggattacatttattgatttgcatatattgaaccagccttgcatcccagggatgaagcccacttgatcatggtggataagctttttgatgtgctgctggattccgtttgtcagtattttattgaggatttttgcatcaatgttcatcaaggatattggtctaaaattatcttttttggttgtgtctctgcccggctttggtatcagaatgatgctggcctcataaaatgagttagggaggattccctctttttctattgattggaatagtttcagaaggaatggtaccagttcctccttgtacctctggtagaattcggctgtgaatccatctggtcctggactctttttggttggtaaactattgattattgccccaatttcagctcctgttattggtctattcagagattcaacttcttcctggtttagtcttgggagagtgtatgtgtcgaggaatgtatccatttcttctagattttctagtttatttgcgtagaggtgtttgtagtattctctgatggtagtttgtatttctgtgggatcagtggtgatatcccctttatcattttttattgtgtctatttgattcttctctctttttttctttattagtcttgctagcagtctatcaattttgttgatcctttcaaaaaaccagctcctggattcattgattttttgaagggttttttgtgtctctatttccttcagttctgctctgattttagttatttcttgccttctgctagcttttgaatgtgtttgctcttgcttttctagttcttttaattgtgatgttagggtgtcaattttggatctttcctgctttctcttgtgggcattcagtgctataaatttccctctacacactgctttgaatgcgtcccagagattctggtatgttgtgtctttgttctcgttggtttcaaagaacatctttatttctaccttcatttcgttatgtacccagtagtcattcaggagcaggttgttcagtttccatgtagttgagcagctttgagtgggattcttaatcctgagttctagtttgattgcactgtggtctgagagatagtttgttataatttgtgttcttttacatttgctgaggagaactttacttccaactatgtggtcaattttggaataggtgtggtgtggtgctgaaaagaatgtatattctgttgatttggggtggagagttctgtagatgtctattaggtccgcttggtacagagctgagttcaattcctgggtatccttgttgactttctgtctcgttgatctgtctaatgttgacagtggggtgttaaagtctcccattattaatgtgtgggagtctaagtctctttgtaggtcactcaggacttgctttatgaatctgggtgctcctgtattgggtgcatatatatttaggatagttagctcctcttgttgaattgatccctttaccattatgtaatggccttctttgtctcttttgatctttgttggtttaaagtctgttttatcagagactaggattgcaacccctgcctttttttgttttccattggcttggtagatcttcctccatccttttattttgagcctatgtgtgtctctgcacatgagatgggtttcctgaatacagcacactgatgggtcttgactctttatccaacttgccagtctgtgtcttttaattggagcatttagtccatttacatttaaagttaatattgttatgtgtgaatttgatcctgtcattatgatgttagctggttattttgctcgttagttgatgcagtttcttcctagtctcaatggtctttacattttggcatgattttgcagcggctggtaccggttgttcctttccatgtttagcgcttccttcaggagctcttttagggcaggcctggtggtgacaaaatctctcagcatttgcttgtctgtaaagtattttatttctccttcacttatgaagcttagtttggctggatatgaaattctggggtgaaaattcttttctttaagaatgttgaatattggcccccactctcttctggcttgtagggtttctgccgagagatccactgttagtctgatgggcttccctttgagggtaacccgacctttctctctggctgccctttacattttttccttcatttcaacttcggtgaatctgacaattatgtgtcttggagttgctcttctcgaggagtatctttatggcgttctctgtatttcctgaatctgaacgttggcctgccttgctagattggggaagttctcctggataatatcctgtagagtgttttccaacttggttccattctccgcatcactttcaggtacaccaatcagacgtagatttggtcttttcacatagtcccatatttcttggaggctttgctcatttctttttattcttttttctctaaccttcccttctcgcttcatttcattcatttcatcttccattgctgataccctttcttccagttgatcgcatcggctcctgaggcttctgcattcttcacgtagttctcgagccttggttttcagctccatcagctcctttaagcacttctctgtattggttattgtagttatacattcttctaaatttttttcaaagttttcaacttctttgcctttggtttgaatgtcctcccgtagctcagagtaatttgatcatctgaagccttcttctctcagctcgtcaaagtcattctccatccagctttgttccgttgctggtgaggaactgcgttcctttggaggaggagaggcgctctgcattttagagtttccagtttttctgttctgttttttccccatctttgtggttttatctacttttggtctttgatgatggtgatgtacagatgggttttcggtgtggatgtcctttctgtttgttagttttccttctaacagacaggaccctcagctgcaggtctgttggaataccctgccgtgtgaggtgtcagtgtgcccctgctggggggtgcctcccagttaggctgctcgggggtcaggggtcagggacccacttgaggaggcagtctgcccgttctcagatctccagctgcgtgctgggagaaccactgctctcttcaaagctgtcagacagggacatttaagtctgcagaggttaccgctgtctttttgtttgtctgtgccctgcccccagagatggagcctacacaggcaggcatgcctccttgagctgtggtgggctccacccagttcgagcttcccggctgctttgtttacctaagcaagcctgggcaatggcgggcgcccctcccccagcctcgctgccgccttgcagtttgatctcagactgctgtgctagcaatcagcgagattccgtgggcgtagtaccctccgagccaggtgtgggatatagtctcgtggtgcgccgttttttaagccggtctgaaaagtgcaatattcgggtgggagtgacccgattttccaggtgcgtccgtcacccctttctttgactcagaaagggaactccctggccccttgcacttcccaggtgaggcaatgcctcgccctgcttcggctcgcacccggtgcgcgcacccactggcctgcgcccactgtctggcactccctagtgagatgaacccggtacctcagatggaaatgcagaaatcacccgtcttctgcgtcgctcacgctgggagctgtagactggagctgttcctattcggccatc

SEQ ID NO: 10559 - DNA, 6021 bp, Homo sapiens
ccatcttatttatttattttttttaattatactttaagttttagggtacatatgcacattgtgcaggttagttacatatgtgtacatgtgccatgctggtgcgctgcacccactaactcgtcatctagcattaggtatatctcccaatgttatgcctcccccctccccccaccccacaacagtccccagagtgtgatattccccttcctgtgtccatgtgatctcattgttcaattcccacctatgagtgagaatatgtggtgtttggttttctgttcttgtgatagtttactgagaatgatgatttccaatttcatccatgtccctgcaaaggacatgaactcatcattttttatggctgcatagtattccatggtgtatatgtgccacattttcttaatccagtctatcattgttggacatttggcttggttccaagtctttgctattgtgaatagtgccgcaataaacatacgtgtgcgtgcgtctttatagcagcatgatttatagtcctttgggtatatacccagtaatgggatggctgggtcaaatggtatttctagttctagatccctgaggaatcgccacactgacttccacaatggttgaactagtttacagtcccaccaacagtgtaaaagtgttcctatttctccacatcctctccagcacctgttgtttcctgactttttaatgattgccattctaactggtgtgagatggtagctcattgtggttttgatttgcatttctctgatggccagtgatgatgagcattttttcatgtgtcttttggctgcataaatgtcttcttttgagaagtgtctgttcatgtccttcgcccactttttgatggggttgtttgttcttttcttgtaaatttgtttgagttcattgtagattctggatattagccctttgtcagatgagtaggttgcgaaaattttctcccattttgtaggttgcctgttcactctgatggtagtttcttttgctgtgcagaagctctttaatttaattagatcccatttgtcaattttggcttttgttgccattgcttttggtgttttagacatgaagtccttgcccatgcctatgtcctgaatggtaatgcctaggttttcttctagggtttttatggttttaggtctaacgtttaagtctttaatccatcttgaattgatttttgtataaggtgtaaggaagggatccagtttcagctttctacatatggctaaccagttttcccagcaccatttattaaatagggaatctttccccattgcttgtttttctcaggtttgtcaaagatcagatagctgtagataagcggcgttatttctgagggctctgttctgttccattgatctatatctctgttttgcatgctgttttggttactgtagccttgtagtatagtttgaagtcaggtagtgtgatgcctccagctttgttcttttggcttaggattgacttggcgttgcgggctcttttttggttccatatgaactttaaggtagttttttctaattctgtgaagaaaggcattggtagcttgatggggatggcattgaatctgtaaattaccttgggcagtatggccattttcacgatattgattcttcctacccatgagcatggaatgttcttccatttgtttgtatcctcttttatttccttgagcagtggtttgtagttctccttgaagaggtccttcacatcccttgtaagttggattcctaggtattttattctctttgaagcaattgtgaatgggatttcactcatgatttggctctctgtctgttgttggtgtataagaatgcttgtgatttttgtacattgattttgtatcctgagactttgctgaagttgcttatcagcttaaggagattttgggctgggaccatgggcttttctagatatacaatcatgtcgtctgcaaacagggacaatttgacttcctcctttcctaattgaataccttttatttccttctcctgcctgattgccctggccagaacttccaacactatgttgaataggagtggtgagagagggcatccctgtcttgtgccacttttcaaagggaatgcttccagtttttgcccattcagtatgatattggctgtgggtttgtcatagatagctcttattattttgaaatacatcccatcaatacctaatttattcagagtttttagcatgaagggttgttgaattttgtcaaaggctttttctgcatctattgagataatcatgtggtttttgtctttggctctgtttatatgctggataacatttattgatttgcatatattgaaccagccttgcatcccagggatgaagcccacttgatcatggtggataagctttttgatatgctgctggattcgttttgccagtattttattgaggatttttgcatcaatgttcatcaaggatattggtctaaaattctcttttttggttgtgtctctgcctggctttggtatcagaatgatgctggcctcataaaatgagttagggaggattccctctttttctattgattggaatagtttcagaaggaatgataccagctcctccttgtacctctggtagaattcggctgtgaatccatctggtcctggactctttttggttggtaagctattgattattgccacaatttcagatcctgttattggtctattcagagattcaacttcttcctggtttagtcttgggagagtgtatatgtcgaggaatttatccatttcttctagattttctagtttatttgcatagaggtgtttgtagtattctctgatggtagtttgtatttctgtgggattggtggtgatatcccctttatcattttttattgcgtctatttgattcttctctctttttttctttattagtcttcctagtggtctatcaattttgttgatcctttcaaaaaaccagcttctggattcattaattttttgaagggttttttgtgtctctatttccttcagttctgctctgattttagttatttcttgccttctgctagcttttgaatgtgtttgctcttgcttttctagttcttttaattgtgatgttagggtgtcaattttggatctttcctgccttctcttgtgggcatttagtgctataaatttccctctacacactgctttgaatgcgtcccagagattctggtatgttgtgtctttgttctcgttggtttcaaagaacatctttatttctgccttcatttcgatatgtacccagtattcattcaggagcaggttgttcagtttccatgtagtggagcggttttgagtgagattcttaatcctgagttctagtttgattgcactgtggtctgagagatagtttgttataatctctgttcttttacatttgctgaggagagctttacttccaagtatgtggtcaatttcggaataggtgtggtgtggtgctgaaaaaaatgtatattctgttgatttggggtggagagttctgtagatgtctattaggtctgcttggtgcagagctgagttcaattcctgggtatccttgttgactttctgtctcgttgatctgtctaatgttgacagtggggtgttaaagtctcccattattaatgtgtgggagtctaagtctctttgtaggtcactcaggacttgctttatgaatctgggtgctcctgtattgggtgcatatatatttaggatagttagctcttcttgttgaattgatccctttaccattatgtaatggccttctttgtctcttttgatctttgttggtttaaagtctgttttttcagagactaggattgcaacccctgcctttttttgttttccatttgcttggtagatcttcctccatccttttattttgagcctttgcgtgtctctgcacatgagatgggtttcctgaatacagcacactgatgggtcttgactctttatccaatttgccagtctgtgtcttttaattggagcatttagtccatttgcatttaaagttaatattgttatgtgtgaatttgatcctgtcattatgatgttagctggttcttttgctggttagttgatgcagtttcttcctagtctcgatggtctttacattttggcatgattttgcagcggctggtaccggttgttcctttccatgtttagtgcttccttcaggagctcttgtaaggcaggcctggtggtgacaaaatctctcagcatttgcttatctgtaaagtattttatttctccttcacttatgaagcttagtttggctggatatgaaattctgggttgaaaattcttttctttaagaatgttgaatattggtccccactctcttctggcttgtagggtttctgccaagagatccgctgttagtctgatgggcttccctttgagggtaacccgacctttctctctagctgtccttaacattttttccttcatttcaactttggtgaatctgacaattatgtgtcttggagttgctcttctcgaggagtatctttgtggcgttctctgtatttcctgaatctgaacgttggcctgccttgctagattggggaagttctcctggataatatcctgcagagtgctttccaacttggttccattctccccatcactttcaggtacaccgatcagacgtagatttggtcttttcacatagtcccatatttcttggaggctttgctcatttccttttattcttttttctctaaacttcccttctcgcttcatttcattcatttcatcttccattgctgataccctttcttccagttgatcgcatcggctcctgaggcttctgcattcttcacgtagttctcgagccttggttttcagctccatcagctcctttaagcacttctctgtattggttattctagttatacattcttctaaatttttttcaaagttttcaacttctttgcctttggtttgaatgtcctcccatagctcagagtaatttgatcgtctgaagccttcttctctgagctcgtcaaagtcattctccatccatctttgttccgttgctggtgaggaactgcgttcctttgaaggaggagaggcgctctgctttttagagtttccagtttttctgttctgttttttccccatctttgtggttttatctacttttggtctttgatgatggtgatgtacagatgggtttttggtgtggatgtcctttctgtttgttagttttccttctaacagacaggaccctcagctgcaggtctgttggaataccctgccgtgtgaggtgtcagtgtgcccctgctgggggttgcctcccagttaggctgctcgggggtcagggacccacttgaggaggcagtctgcccgttctcagatctccagctgggtgctgggagaaccactgctctcttcaaactgtcagacagggacatttaagtctgcagaggttactgctgtctttttgtttgtctgtgccctgcccccagcggtggagcctacagaggcaggcaggcctccttgagctgtggtgggctccacccagttcgagcttcctggctgctttgtttacctaagcaagcctgggcaatggcgggcacccctcccccagcctcgctgccaccttgcagtttgatctcagactgctgtgctagcaatcagtgagactctgttggcgtaggtccctccgagccaggtgcgggatataatctcatggtgcgccgttttttaagcccctcggaacagcgcagtattcgggtgggagtgacccgattttccaggtgcgtctgtcacccctttctttgactcggaaagggaactccctgaccccttgcgcttcccaagtgaggcaatgcctcgccctgcttcggcttgcgcacggtgcgcgcacccactgacctgcgcccactgtctggcactcccaagtgagatgaacccggtacctcagatggaaatgcagaaatcacccgtcttctgcgtcactcatgctgggagttgtagacaggagctgttcctatttggccatcttggctcctccccc

SEQ ID NO: 10560 - DNA, 7175 bp, Homo sapiens
ttctttttttctttttttaattttattattattatactttaagttctagggtacatgtgcacagcgtgcaggtttgttacatatgtatacatgtgccatgttggtgtgctgcacccatcaactcatcatttagcattaggtatatctcctaatgctatccctcccccatcccctcaccccacaccagtccccagtgtgtgatgttccccttcctgtgttcatgtgttctcattgttcaattcccacctatgagtgagaacatgcggtgtttagttttttgtccttgtgatagtttgctgagaatgatggtttccagcttcatccatgtccctacaaaggacatgaactcatcattttttatggctgcatattcatggtatacacgtattccgtggtgtatatgtgccacattttcttaatccagtctaccattgttggacatttgggttggttccaagtctttgctattgtgaatagtgccgcaataaacatacatgtgcatgtgtctttatagcagcatgatttataatcctttgggtatatacccagtaatgggatggctgggtcaaatggtatttctagttctagatccctgaggaatcgccacactgacttccacaatggttgaactagtttacagtcccaccaacagtgtaaaagcgctcctatttctccacagcttctacagcatctgttgtttcctgactttttaatgttcaccattctaactggtgtgagatggtatctcattgtggttttgatttgcatttctctgatggccagtgatgatgagcattttttcatgtgtctattggctgcataaatgtcttcttttgagaagtgtctgttcatatcctttgcccactttttgatgtggttgtttgtttttttcttgtaaatttgttaaagttcattgtagattctgaatattagccctttgtcagatgagtaggttgcaaaaattttctcccattctgtaggttgcctgttcactctgatggtagtttcttttgctgtgcagaagctttagtttaattagatcccctttgtcaattttggcttttgttcccattgcttttggtgttttagacatgaagtccttgcccatgcctacgtcctgaatggtattgcctaggttttcttctacagtttttatggttttaggtctaacatgtaagtctttaatccatcttgaattaatttttgtataaggtgtaaggaagggatccagtttcagctttctacatatggctagccagttttcccagcaccatttatgaaatagggaatcctttcctcatttcttgtttttgtcaggtttgtcaaagatcagatagttgtagatatgcagcattatttctgaggactctgttgtgttccattggtctatatctctcttttggtaccagtaccatgctgttttggttactgtagccttgtagtatagtttgaagtcaggtagcatgatgcctccagctttgttcttttggcttaggattgtcttggcaatgtgggatcttttttggtcccatatgaactttaaagaagttttttccaattctgtgaagaaagtcattggtagcttgatggagatggcattgaatcaataaattaccttgggcagtatggccattttcatgatattgattcttcctacccatgagcatggaatgttgttccatttgtttgtatcctcttttatttcattgagtagtggtttgtagttctcctcgaagaggtccttcacatcccttataagttgtattccaaggtattttattctctttgaagcaattgtgaatgggagttcactcatgatttggctctgtgtttgtctgttattggtgtataagaatgcttgcgatttttgcacattgattttgtatcctgagactttactgaagttgcttatcagcttaaggagattttgggctgagacgatggggttttctaaacatacaatcatgtcatctacaaacagggacaatttgacttcctcttttcctaattgaatgctctttatttccttctcctgcctgattgccttggccagaattttccaacactatgttgaataggagtggtgagagagggcatccctgtcttgtgccagttttcaaagggaatgcttccagtttttgtccattcagtatgatattggttgtgggtttgtcatagataacgcttattattttgagatacgtcccatcaatacctaatttattgagagtttttagcatgaagtgttgttgaattttgtcaaaggccttttctgcatctattgagataatcgtgtggtttttgtctttggttctgtttatatgctggattatgtttgttgattttcatatgttgaaccagccttgcatcccagggatgaagcccacttgatcatggtggataagctttttgatgtgctgctggatttggtttgccagtatattactgaggatttttgcatcaatgttcatcaaggatattggtctaaaattctctttttttgttgtgtctctgccaggctttggtatcagaatgatgctggcttcataaaatgagttagggaggattccctctttttctattgattggaatagtttcagaaggaatggtaccagctcctccttgtacttctggtagaattcggctgtgaatccatctggtcctggactttttttggttggtaaactattaattattgcctcaatttcggagcctgttattggtctattcagagattcaacttcttcctggtttagtgttgggagggtgtttgtgtcgaggaatttatccatttcttctagattttctagtttatttgcgtagaggtgtttatagtattctctgatggtagtttgtatttctgtgcgatcagtggtgatatcccctttatcattttttattgtgtctatttgattcttctctcttttcttctttattagtcttgctagcagtctatcaattttgttgatccattcaaaaaaccagctcctggattcatggattttttgaagggttttttgtgtctctatctccttcagttctgctctgatcttagttatttcttgccttctgctagcttttgaatgtgtttgctcttgcttctctggttcttttaattgtgatgttagggtgtcaattttggatctttcctgctttctcttgtgggcatttagtgctgtaaatttccctctacacactgctttgaatgtgtcccggagattctggtatgttgtgtctttgttctcattggtttcaaagaacatctttatttctgcctttatttttttatgtactcagtagtcattcaggagcaggttgttcagtgtccatgtagttgagtggttttgagtgagattcttaatcctgagttctagtttgattgcactgtggtctgagagacagtttgttataatttctgttcttttacatttgctgaggagtgctttacttccagctatgtggtcaattttggaataggtgtggtgtggtgctgaaaagaatgtatattctgttgatttggggaggagagttctgtagatgtctattaggtccgcttggtgcagagctgagttcaattcctggatatccttgttaactttctgtctcgttgatctgtctaatgttgacagtggggtgttaaagtctcccattattattgtgtgggagtctaagtctctttgtaggtcactaaggacttgctttatgaatctgggtgctcccatattgggtgcatatatatttaggatagttagctcttcttgttgaattgatccctttaccattatgtaatggcctcctttgtctcttctcatctttgtcggtttaaaatatgttttatcagagactaggattgcaatccctgcctttttttgttttgcatttgtttggtagatcttccaccctccctttattttgagcctatgtgtgtctctgcatgtgagatgggtctcctgaatacagcacactgatgggtcttgactctttatcccatttgccagtctgtgtcttttaattggagcatttagcccatttacatttaaggttaatattgttatgtgtgaatcttatcctgtcattatgatgttagctggttattttgctcgttagttgatgcagtttcttcctagcctcgatggtctttacaatttggtatgtttttgcaatggctggtaccagttgttcctttccatgtttagtgcttccttcaggagctcttttagggcaggccttgtggtgacaaaatctctcagtatttgcttgtctgtaaaggattttatttctccttcacttatgaagcttagtttggctggatatgaaattctgggttgaaaattcttttctttaagaatgttgaatattggcccccactctcttctggcttgtagagtttctgccgagagatccgctgttagtctgatgggcttccctttgtgggtaacccgacctttctctcaggccgcccttaacattttttccttcatttcaactttggtggatccgacaattatgtgtcttggagttgctcttctcaaggagtatcttgttggcattctctgtatttcctgaatttgaatgttggcctgccttgctagattggggaagttctcctggataatatcctgcagagtgttttccaacttggttccattctccctgtcactttcaggtacaccagttagacatcgatttggtctttccacatagtcccatatttcttggaggctttgttcgtttctttttattattttttctataaacttctcttgtcacttcatttcattcatttcgtcttccatcactgataccctttcttccagttgatcgcatcggctactgaggcttgtgcattggtcacgtagttcttgtgccatggttttcagctccatcaggtcctttaaggacttctctgcattggttattctagtcagccattcgtctaattttttttcaaggtttttaacttctttgccattggttcgaacttcctcctttagctcggagtagtttgatcttctgaagccttcttctctcaactcatcaaagtcattctccatccagctttgttgcattgctggtgaggagctgcgttcctttggaggaggagaggcactctgatttttagagtttccagtttttctgctctgttttttccccatctttgtggttttatctacctttggtctttgatgatggtgacatacagatgggtttttggtgtggatgtcctttctgtttgttagttttccttctaacagtcaggaccttcagctgcaggtctgttggattttgctggaggtccactccagaccctgtttgcctgggtttgagcagcggtggctgcagaacagtggatattggtgaacctcaaatgctgctgcctgatcgttggttgctctggaagttttgtctcagaggagtacccggccatgtgaggtgtcagtctgcccctactgggggatgcctcccagttaggctactcgggggtcagggatccacttgaggaggcagtctgcctgttctcagatctcaagctgcgtgctaggagaaccactactctcttcaaagctgtcagacagggacatttaagtctgcagaggttactgctgccttttgtttgtctgttccctgctccagaggtggatcctacagaggcaggcaggcctccttgagctgtggtgggctccacccagttcgagcttcctggccactttgtttacctactgaagcctgggtaatggcaggcgcccctcccccagcctcattaccaccttgcagttttatctcagcctgctgtgctagcaatgagtgaggctccatgggcataggaacctgtgagccaggtgtgggatataatctcctggtgtgccgtttgttaagccctttggaaaagcgcagtattagggtgggagtgacccgattttccaggtgatgtctgtcacccctttctttgactaggaaagggaattccctgaccccttgtgcttcgcaggtgaggtgatgcctcaccctgcttcggctcacgcatggtgcactgcacccactgtcctgcacccactttccggcactccccagtgagatgaacccagtacctcagttggaaatgcagaaatcacccgtcttctgcgtcgctcacgctgggagctgtagactggagctgttcctattcggccatcttggcttcacctcccagcagattctcaagttattaaaatttttaaaattatgatttcattgttattaaaatatttaaaagtatgattttgttgtttcagaatggttaaaatatgagtaggaatgggagatttggctggtctttgtccctggcttcttggaaaggacctccaaattcttggaaatttcatgagtgatggattggattaagaagcaacggaatgtaatcccagcattttgggaggccaaggcaggtggatcacctgaagtcaggagttggagaccagcctggccaacatggtgaaaccctgtttctactaaaaatacaaaaattagccagtcgtggtggtgtgtacctgtaatccctgctactcgggaggctaaggcaagagaatcgcttgaacctgggaggcagaggtttcagtgagctgagatcgtgccactgcactccagcctgggtaacagagtgagaccctgtcataagataaataaatacgtaaataaaataaataagaatggcaatatcagagggctccaaatagcaggacgtataatggaagagcttattgctaatataattgtttgatcaattagcaaaattgggtagaagttagggtgctgtaaaataatttaaaaaatttggggttgcttgcacacagcttctaaaacccttagaatatctgtagtcctgagagtatcggccaggcgcggcggctcacacctgtaatcccagcaccttgggaggcggaggcgggcggatcacgaggtcaagagatcgagaccatcctggccaacatggtgaaattccgtctctactaaaaatacaaaaattagccaggtgtgatggtggacgcctgtaatcccagctactgaggaggctaaggcgggagaatcgcttggaggcaggagaatcacttgaactcaggaggcagaggttgcagtgagctaagattgcgccactgcactccagcgtggtgacagagcgagactccatctcaaaaaat

SEQ ID NO: 10561 - DNA, 5584 bp, Homo sapiens
atttaatttttttttatactttaagttctagggtacatgtgcacaaagtgcaggtttgttacatatgtatacatgtgccatgttggtgtgctgcaccgattaattcgtcatttacattaggtatatctcctaatgctatccctccccgctccccacaccccatgacaggccccagtgtgtgatgttccccttcctgcgtccaagtgttttcattgttcaattcccacctatgagtgagaacatgaggtgtttggttttttgtccttgtgatagtttgctgagaatgatggtttccagcttcatccatgtccctacaaaggacatgaactcatccttttttatggcttcatagtattccatggtgtatatgtgccacattttcttaatccagcctatcactgatggacatttaggttggttccaagtctttgctgttgtgaatagtgccacaagaaacatacgtgtgcatgtgtctttatagcagcatggtttataaccctttgggtatatacccagtaatgggatggctgagtcaaatggtatttctagtcctagatcattgaggaatcaccacactatcttccacaatggttgaactagttcacagtcccatcaacagtgtaaaagtgttcctatttctccacatcctctccagcatctgttgtttcctgactttttagtgattgccattctaactggtgtaagatggtatctcattgtggttttgatttgcatttctctgatggccagtggtgatgaacattttttcatgtgtctgttggctgcataaatgtcttcttttgagaagtgtctgttcatacccttcacccgccttttgatggggttgtttgtttttttcttgtaaatttgtttgagttctttgtagattctggatattagccctttgtcagatgaatagattgcaaaaattttctcccattctgtaggttacctgttcactctgatggcagtttcttttgctgtgcagaagctctttgtttcttttgctgtgcagaagctctttagtttaattagatcccatttgtctattttggcttttgttgctgttgcttttggtgtttgagacatgaagtccttgcctatgctatgtcctgaatggtattgcctaggttttcttctagagttttatggttttaggtctaacatttaagtctttaatacatcttgaattaatttttgtataaggtgtaaggaagggatccagtttcagctttctacatatggctagtcagttttcctagcaccatttattaaatagggaatcctttccccattgcttgtttttctcaggtttgtcaaatatcagatggttgtagatgtgtggtattatttctgagggctctgttctattccattggtctatatctctgttttggtaccagaactatgctgttttggttactgtagccttgtagtatagtttgaagtcaggtaatgtgatgcttccagctttgttcttttggcttaggattgtcttggcaatgagggctcttttttggttccatatgaactttaaagtagttttttccaattctgtgaagaaagttattggtagcttgatggagatggcattgaatctgtaaattaccttgggcagtatggccattttcacgatattgattcttcctatccatgagcatggaatgttcttccatttgtttgtgtcctcttttattttgttgagcagtggtttgtagttctccttgaagaggtccttcacatcccttgtaagttggattcctaagtattttattctctttgaagcaattgtgaatgggagttcactcatgatttggctctctgtttgtctgttattggtatataagaatgcttgtggtttttgcacattgattttgtatcctgagactttgctgaagttgcttatcagcttaaggagattttgggctgagacaatggggttttctaaatatacaatcatgttatctgcaaacagggacaatttgacttcctcttttcctaattgaatacactttatttcttgctcctgcctgattgccctagccagaacttccaacactatgttgaatagcagtggtgagagagggcatccctgtcttgtgccaggtttcaaagggaatgcttccagtttttgcccattcagtatgatattggctgtgggtttgtcataaatacctcttattattttgagatatgtcctatcaatacctaatttattgagagtttttagcatgaagcgctgctgaattttgtcaaaggccttttctccatctactgagataaccatgtggtttttgtctttggttctgtttacgtgatggattacatttattgatttgcctatgttgaaccagccttgcatcctagggaatgaagcccacttgatcatggtagataagcttttcgatgtgctgctggattcggtttgccagtattttattgaggatttttgcatcgatgttcatcagggatattcgtctaaaattctctttttttgttgtgtctctgtcaggctttggtatcaggatggtgctggcctcataaaatgagttagggaggattccctcatcttatattgattggaatagtttcaggaggaatggtaccagctcctccttgtacctctggtagaattcagctgtgaatccatctggtgctagacttttttgggttgataggctattaattattgcctcaatttcagagcctgttattggtctattcagggattcaacttcttcctggtttagtcttgggagggtgtaagtgtccaggaatttatccatttcttctagattttctagtttatttgtgtagaggagtttatagtattctctgatggtagtttgtatttctatgggattggtggtgatatcccctttgtcattttttattgtgtctatttgattcttctctcttttcttctttattagtcttgctagcagtctatcaattttgttgatcttttcaaaacccagctcctggattcattgattttttgaagggttttttgtgtctctctatctccttcatttctgctctgatcttagttatttcttgccttctgctagcttttgaatgtgtttgttcttgcttctctagttcttttagttgcaatgttagagtgtcaattttagatctttcctgctttcccttgtgggcatttagtgctataaatttccctctacacactgctttgaatgtgtcccagagatcctggtatattgtgtctttgttctcattggtttcaaagaacatctttatttctgccttcattttgttatgtacccagtagtcattcaggaatagcttgttcagtttccatgtagttgagtggttttgagtgagtttcttaatcctgagttctagtttgattgcactgtggtctgagagacagtttgttataatttctgttcttttacatttgctgaggagtgctttacttctaactatgtggtcaatttttgaataagtgtgatgtggtgctgagaagaatgtatattctgttgatttggggtggagagttctgtagatgtctattaggtctgcttggtgcagagctgagttcaattcctggatatccttgttaattttctgtctcattgatctgtctaatgttgacagtggggtgttaaaatctcccagtattattgtgtgggagtctaagtctctttgtaagtctctaaggacttgctttatgaatctgggtgctcctgtattgggtgcatatatatttaggatagttagctcttcttgttgaattgatcccttcaccattatgtaatcgccttctttgtctcttttgatttttgttggtttaaagtctgtcttatcagagactaggactgcaacccctgcctttttttgttttccatttgcttggtagatcttcctccatccctttattttgagcctatgtttgtctctgcacgtgagacgggtctcctgaatacagcacactaatgggtcttgactctttatccaatttgctagtctgtgtcttttaattggagcatttagcccatttacattcaaagttaatattgttgtgtgaatttgatcttgtcactatgatgttagctggttattttgctcgttagttgatgcagtttcttcctagcattgatggtctttacaatttggcatgtttttgcagtggctggtaccggttgttcctttccatgtttagtgcttccttcaggagctcttgtagggcaggcctggtggtgacaaaatctctcagcatttgcttgtctgtaaagtattttatttctccttcacttatgaagcttagtttggctggatatgaaattctgggttgaaaattcttttctttaagtatgttgaatattggtccccactctcttctggcttgtagagtttctgccaagagatccgctgttagtctgatgggcttccctttcagggtaacccaacatttctctctggctgcccttaacattttttccttcatttcaactttggtgactctgacaattacgtgtcttggagttgctcttctcgaggagtatctttgtggcattctctgtatttcctgaatttgaatgttggcctgccttgctaggttggggaagttctcctagataataacctgcagagtgttttccagcttggttccattctcctcatcattttcaggtacaccaatcagacttagatttggtcttttcaaatagtcccatatttcttagaggctttgtttgtttctttttactctgttttctctaaacttctctttcacttcatttcattcatttgatcttcaatcactgatactctttcttccagttgatcaaatcggctactgaagcttgtgcattcagcacgtagttctcgtgccatggttttcagctccatcaggtcatttgaggacttctctacactggttattctagttagccattcgtccaatcttttttcaaggtttttagcttctttgcgctgggttcgcacttcctcctttagctcggagaagtttgatcatctgaagccttctactctcaactcatcaaagtcattctccatccagcattgttccgttgctggagaggagctgtgttcctttggagggggagaggagctctgatttttagaattttcagcttttctgctctgttttttccccatctttgtggttttatctacctttggtctttgatgatggtgatgtacagatggggttttggtgtggatgtcctttctgtttgttagttttccttctaacagtcaggaccttcagatgcatgtctgttggagtttgctggatgtccactccagaccctgtttgcctgggtatcagcagcggaggctgcagaagagcaaatactgctgaagagcaaatgttgctgcctgatcattcctctggaagcttcatctcagaggggtacccggccatgtgaggtgccagtcttcccctactgggggtgcctcccagttaggctactcagaggtcagggacccacttgaggaggcagtctgtccgttctcagatctcaaactccatgctgggagaaccaccactctcttcaaagctgtcagacagggacatttaagtctgcagagg

SEQ ID NO: 10562 - DNA, 11093 bp, Homo sapiens
agaaggcctcttttttttattattatactttaagttttagggtacatgtgcacaatgtgcaggttagttacatatgtatacatgtgacatgctggtgcactgcacccactaactcatcatctagcattaggtatatctcccaatgctatccctcccccctcccccaccccacaacagtccccagagtgtgatgttccccttcctgtgtccatgtgttctcattgttcaattcccacctatgagtgagaatatgcggtgtttggttttttgttcttgcgatagcttactgagaatgatgatttccaatttcatccatgtccctacaaaggacatgaactcatcattttttatggctgcatagtattccatggtgtatatgtgccacattttcttcatccagtctatcattgttggacatttgggttggttccaagtctttactattgtgaatagtgccgcaataaacatacgtgtgcatgtgtctttatagcagcatgatttatagtcctttgggtatatacccagtaatgggatggctgggtcaaatggtatttctagttctagatccctgaggaatcgccacactgacttccacaatggttgaactagtttacagtcccaccaacagtgtaaaagtgttcctatttctccacatgctctccagcatctgttgtttcctgacttcttaatgattgccattctaactggtgtgagatggtatctcattgtggttttgatttgcatttctctgatggccagtgatagtgagcattttttcatgtgctttttggctgcataaatgtcttcttttgagaattgtctgttcacgtccttcgcccactttttgatggggttgtttgtttttttcttgtaaatttgtttgagttcattgtagattctggatattagcctgagaaggcctcttaatagaaactgattttcccccatatccctacccccaacttcctccttcttgtttcctgaacagttgctgtgaagactagaaatgcacgagccattttgcatcatgaaatgaccttaaaagggcaattcacatgaagaatggtggaggagaaagattaaagagatacccagatagtgagcatagtacctgataggtggaatttttttcaactcatgttgtcctccctatctcccacttctagtagtttgcagtgtctatttttcccatatttatgtctgtgtgtgctcaacgtttagctcctatttataagtgagaacctgtggtatttagctttgtgtttctttgttaatttattcaggatgatggcccctaactgcatccatgttgctgcaaaagacattattccattctttttatgcgtgcatagtgttccatggtgtatatgtgtgtggtatgaatacactatagaactttgacattaaaataaacacttttccatcaaaagaccttataaaggaaataaaaagacaagccataagcagagctatttgaaacacttagaattgacaaaggatttagtacccagattatgtaagtaaatcctaaaaatataatagaaaaaaagacaaatgactcaacagaaaattagaaaatattattgaactggttttcaaagaagagttaatacgaatggtatcaaatctatgaaatgattgtaatctaataatcagaaaaatgcaaattaaaactataatgaaatataattttgcttgacatgattggcagaaatgtttaagtctgacaataccaagtatttgaaggctgtagtacaagttttattatttttgagattgtatattttcactaccatctaggtaattaggcattatctattacattttaagatgtacacaattgattacccagaaattttctctcacatgaaaaacccaaaacatttacatgtatattttaggagacaagtatgcaaatactcatagcagtttttttttttaagtaaaatactacaaataccccaaatgctacactataaatggccatcagcagaagaatgggtaaataagttgtggtatacaatatggattggctgtgttcccacctaaataccttgaattataataattcctgtgtgtcaagggtcagaggggtggggcaggtggagataattgaatcatgggggcagtttcccccatactgttctcatggtagtgaataagtgtcatgagatctgatggttttataactgggagttcccctgcacaagctctctttcctgccaccatgtaagacatgtttttgcttctcccttgtcttccgccatgatcatgagggctccccagccatgtggagctgtgagtccattaaacctcttttctttataaattacccagtgttgggtatgtctttattagaagagtgagaacagactaatacagtatatttatatgaaagaataatgcacagcagtgaaatgagtgaactacaactacacagattaacatggaaaaatctataataaaattttaaccaaaagaaaaagtgtcaaaatatgacataaatatgattctattaaagttcaaaaatgtgcaaagcaaattaataaattttaattacacttatgtggtaaacaataaagaaatgcatggaaaagataagtacaatgatctgaatagttttcttctctgtgtatgggataaggagtggctaaggtcacacagaatctgaaaactggtaatggtccttgccttaacccacgctgtggataccaaggttttattaattattattatttacatttttaatttttattctcctgtatgtgtgaaatatttcatattaaaaagcaaaaacaaactacaacaaaaaatagtaagaattactcaggacagactatctagttctatggacatgattattttaagggagccagtattatgaaactgttataacctcttctgggtaaaaatgatggcttgtgataccattcaatgcaaccttacttttctcattgagtacagtgagaatcagggttgtatttccaaccctcttcccccatcagattttctaataaaaacattaagataataaggcagtgtaatctctagacaggctgatttctcacagaaattttcaaagcatggtgtgtgatatggcttggctgtgtccccacccaaatctcatcttgatttgtagctcccataattcccatatgttgtggaaggaacccagtggaagataattgaatcatggagggtttcccctgtactgttatcataatagtaaataagtctcataaaatctgatattttctatagggtttccccttacattttgttctcattcattctttctttcttttattaaaattctactttaagttctgggagacatgtgcagaacgtgcaggtttgttacacaggtatacatgtgccatggtggttggcttcacccatcaacctgtcatctacattagtatttctcctaatgctatccctccctttgccccccactccctgacaggccccagtgtgtgatgttccctttcctgtgcccatatgttatcattgttcaactcccacttatgagtgtgaacatgtgatgtttggttttctgttcctgtgttagtttgctgagaatgatggtttccagcttcatccatgtccctgcaaagggcatgaactcattcttctttatggctgcatagtattctgtggtgtatatgtgccacattttctttatccagtctaatattgatgggcatttgggttggttccaagtctttgctattgtgaatagtgccacaataaacacaggtgtacatgtgtctttatagtagaatgatttataaccctttgggtatatacccagtaatgggactgctggctgaaaagatatttctagttttagatctttgaggaatgaccacactgtcttccacaatggttgaactaatttacactcctaccaacagtgtaagagcattcctatttctccacatcctctccagcatctgctgtttcctggcttttgaatgatcgccattctaactagtgtgagatggtaactcactgtggttttgattggcatttctctaatgatcagtgacgatgaccttttttcatatgtttgttggccacataaatatcttcttttgaaaagtgtccattcatatccttcacccactttttgatggtgttgcttgtttttttttttttttttttgcaaatttatttatgttccttatagattctggatattagccctttggcacatggagagattgcaaaaattttctccccttctgtaggttgcctcttcactctgatgatagtttcttttgctgtgcagaagctctttagtttaattagatcctatttgtcaattttggcttttgttgccattgcttttggtattttagtcatgaagtcctttcccattcctatgtactgaatggtattgcctaggttttcttctagggtttttatggttttaggtgttatgtttaaatctttaatccaccttgagttaatttttgtataaggtgtaaggaagggtccagtttcagttttctgcatattactagccagttttcccaacaccttttattaaatagggaatcctttccccgttgcttgtttttgtgaggtttgtcaaaaaaagatcagatggttgtagatgtgtggtgttatttctgaggcctctgttctgttccattggtctatatatctcttttggtaccagcaccgtgctgtttggttaactgtagccttgtagcatagattgaagtctggtagagtgatgtctccagctttgttctttttgcttaggattgtcttggctatatgggctctttgttggttccatatgaaatttaaaatagttttttctaattccgtgaagaaagtcaatggtagcttcataggaatagcattgaatctataaattactttgagcagtatggccattttcatgacatttattcttcctatccatgagcatggatggtttttccatttgtttgtgtcctctcttatttccttgagcagtggtttatagttcttgacaacgtcctttacatcccttgtaaattgtattcctaggtattttattctctttgtaacaattgtgaatgggagttcactcatgatttggctctctgtttgtctattttttttattatactttaagttttagggtacatgtgcacaatgtgcaggttagttacatatgtatacatgtgccatgctggtgcgctgcacccactaactcgtcatctagcattaggtatatctcccaatgctatccctccccactccccccaccccaccacagtccccagagtctgatattccccttcctgtgtccacctatgcggtgtttggttttttgttcttgagatagtttactgagaatgatgatttccaatttcatccatgtccctacaaaggacatgaactcataattttttatggctgcatagtattccatggtgtatatgtgccacattttcttcatccagtctatcattgttggacatttgggttggttccaagtctttgctattgtgaataatgccgcaataaacatacgtgtgcatgtgtctttatagcagcatgatttatagtcctttgggaatatacccagtaatgggatggctgtgtcaaatggtatttctagttctagatccctgaggaatcgccacactgacttccacaatggttgaactagtttacagtcccaccaacagtgtaaaagtgttcctatttctccactcctctccagcacctgttgtttcctgactttttaatgattgccattctaactggtgtgagatggtatctcattgtggttttgatttgcatttctctgacggccagtgatgatgagcattttttcatgtgttttttggctgcataaatgtcttcttttgagaagtgtctcttcatgtccttcgcccactttttgatggggttgtttgtttttttcttgtaaatttgtttgagttcattgtagattctggatattagccctttgtcagatgagtaggttgcaaaaattttctcccattttgtaggttgcctgttcactctgatggtagtttcttttgctgtgcagaagctctttagtttaattagatcccatttgtcaattttggcttttgttgccatcgcttttggtgttttagacatgaagtccttgcccatgcctatgtcctcaatggtaatgcctaggttttcttctagggtttttatggttttaggtctaacgtttaagtctttaatccatcttgaattgatttttgtataaggtgtaaggaagggatccagtttcagctttctccatatggctagccagttttcccagcaccatttattaaatagggaatcctttccccattgcttgtctttctcaggtttgtcaaagatcagatagttgtagatatgcggcgttatttctgagggctctgttccattccattgatctatatctctgtttcggtaccagtaccatgctgttttggttactgtagccttgtagtatagtttgaagtcagatagtgtgatgcctccaggtttgttcttttggctgaggattgacttggcgatgcgggctcttttttggttccatatgaactttaaagtagttttttccaattctgtgaagaaagtcattggtagcttgatggggatggcattgaatctgtaaattaccttgggcagtatggccattttcacgatattgattcttcctacccatgagcatggaatgttcttccatttgtttgtatcctcttttatttccttgagcagtgctttgtagttctccttgaagaggtccttcacattccttgtaagttggattcctaggtattttattctctttgaagaaattgtgaatgggagttcactcaagatttggctctctgtttgtctgttattggtgtataagaatgcttgtgatttttgtacattgattttgtatcctgagactttgctgaagttgcttatcagcttaaggagattttgggctgagacaatggggttttctagatatacaatcatgtcatgtaaaaacagggacaatttgacttcctcttttcctaattgaataccctgtatttccttctcctgcctaattgccctggcctgaacttccaacactatgttgaataggagtggtgagagagggcatccctgtcttgtgccagttttcaaagggaatgcttccagtttttgcccattcagtatgatattggctgtgggtttgtcatagatagctcttattattttgaaatacgtcccatcaatacctaatttattgagagtttttagcatgaagggttgttgaattttgtcaaaggctttttctgcatctattgagataatcatgtggtttttgtctttggttctgtttatatgctggattacatttattgatttgcgtatattgaaccagccttgcatcccagggatgaagcccacttgatcatggtggataagctttttgatgtgctgctggattcgttttgccagtattttattgaggatttttgcatcaacgttcatcaaggatattggtctaaaaatctcttttttggttgtgtctctgcccggctttggtatcagaatgatgctggcctcataaaatgagttagggaggattccctctttttctattgattggaatagtttcagaaggaatggtaccagttcctccttttacctctgatagaattcggctgtgaatccatctggtcctggactctttttggttggtaaactattgattattgccacaatttcagatcctgttattggtctattcagagattcaacttcttcctggtttagtgttgggagagtgtatgtgtcgaggaatttatccattttttctagattttccagtttatttgcgtagaggtgtttgtagtattccctgatggtagtttgtatttctgtgggatcggtggtgatatcccctttatcattttttattacgtctatttgattcttctctctttttttctttattagtcttgctagcggtctatcaattttgttgatcctttcaaaaaaccagctcctgtattcatttttttgaagggttttttgtgtctctatttccttcagttctgctctgattttagttatttcttgccttctgctagcttttgaatgtgtttgctcttgcttttctagttcttttaattgtgttgttagggtgtcaattttggatctttcctgctttctcttgtgggcatttagtgctataaatttccctctacaaactgctttgaatgtgtcccagagattttggtatgttgtgtctttgttctcgttggtttcaaagaacatctttatttctgccttcatttcgttatgtatccagtagtcattcaggagcaggttgttcagtttccatgtagttgagcggttttgagtgagattcctaatcctgagttctagtttgattgcactatggtctgagagatagtttgttataatctctgttcttttacatttgctgaggagagctttacttccaagtatgtggtcaattttggaataggtgtggtgtggtgctgaaaaaaatgtatattctgttgatttggggtggagagttctgtagatgtctattaggtccgcttggtgcagagctgagttcaattcctgggtatccttgttgactttctgtctcgttgatctgtctaatgttgacagtggggtgttaaagtctcccattattaatgtgtgggagtctaagtctctttgtaggtcactcaggacttgctttatgaatctgggtgctcctgtattgggtgcatatatatttaggatagttagctcttcttgttgaattgatccctttaccattatgtaatggccttctttgtctcttttgatctttgttgttttaaagtctgttttatcagagactaggattgcaacccctgcctttttttgttttccatttgcttggtagatcttcctccatccttttattttgagcctatgtgtgtctctgcacgtgagatgggtttcctgaatacagcacactgatgggtcttgactctttatccaatttgccaatctgtgtcttttaattgaagcatttagtccatttacatttaaagttaatattgttatgtgtgaacttgatcctgtcattatgatgttagctggtgattttgctcgttagttgatgcagtttcttcctagtctcgatggtctttacattttggcatgattttgcagcggctggtaccagttgttcctttccatgtttagcgcttccttcaggagctcttctagggcaggcctggtggtgacaaaatctctcagcatttgcttgtctgtaaagtattttatttctccttcacttatgaagcttagtttggctggatatgaaattctgggttgaaaattcttttctttaagaatgttgagtattggcccccactctcttctggcttgtagggtttctgccgagagatccactgttagtctgatgggcttccctttgagggtaacctgacctttctctctggctgcccttaacattgtttccttcatttcaactttggtgaatctgacaattatgtgtcttggagttgctcttctcgaggagtatctttgtggtgttctctgtatttcctgaatctgaacattggcctgccttgctagattggggaagttctcctggataatatcctgcagagtgttttccaacttggttccattctccccatcactttcaggtacaccaatcagatgtagatttggtcttttcacatagtcccatatttcttggaggctttgctcatttctttttattcatttttctctaaacttcccttctctcttcatttcattcatttcatcttccattgctgataccctttcttccagttgatcgcattggctcctgaggcttctgcattcttcacgtagttctcgagccttggttttcagctccatcacctcctttaagcatttctctgtattggttattctagttatacattcttctaaatttttttcaaagttttcaatttctttgcctttggtttgaatgtcctcccatagctcagagtaatttgatcgtctgaagccttcttctctcagctcgtcgaagtcattctccatccagctttcttccgttgctggtgaggaactgcgttcctttggaggaggagaggcgctctgctttttagagtttccagtttttctgttctgttttttccccatctttgtggttttatctacttttggtcgttgctgatggtgatgtacagatgggtttttggtgtggatgtcctttctgtttgttagttttccttctaacagacaggaccctcagctgcaggtctgttggaataccctgccgtctgaggtgtcagtgtgcctctgctggggggtgcctcccagttaggctgctcgggggtcaggggtcagggacccacttgaggaggcagtctgccggttctcagatctccagctgtgtgctgggagaaccactgctctcttcaaagctgtcagacagggacatttaagtctgcagaggttactgctttttgtctgtgccctgcccccagaggtggagcctacagaggcaggcaggcgtccttgaactgtggtgggctccacccagttcgagcttcctggctgctttgtttacctaatcaagcctgggcaatggcgggcgcccctcccccagcctcgctgccgccttgcagtttgatctcagactgctgtgctagcaatcagcgagactccgtgggcgtaggaccctccgagccaggtgcggggtataatctcgtggtgtgccgtttttaagccggtcctaaaagcgcaatattcgggtgggagtgacccgattttccaggtacgtccgtcacccctttctttgactcggaaagggaactccctgatcccttgcgcttcccaagtgaggcaaagcctcgccctgcttcagctggcgcaccgtgtgcacacccactgacctgcgcccactgtctggcactccctagtgagatgaacctggtacctcagatggaaatgcagaaatcacccgtcttctgcgtcgctcacgctgggagctgtagaccagagctgttcctatttggccatcttggctcctgccccct

SEQ ID NO: 10563 - DNA, 4923 bp, Homo sapiens
ttattcttttttttttttctttatactttaagttctaggatacatgtgcacaacgtgcaggtttgttacatatgtctacatgtgccatgttggtgtgctgcacccattaactcatcatttacattaggtatatctcctaatgctatccctcccctctgcctgccccacgacaggccccagtgtgtgatgtttcccttcctgtgtccaagtgttctcattgttcaattcccacctatgagtgagaacatgcagtgtttggttttttgtccttgaaatagtttgctgaaaatgatggtttccagattcatccatgtccctacaaaggacatgaactcatccttttttatggctgcatagtattccatggtgtatatgtgccacattttcttaatctagtctgtcactgatgggcatttgggttggttccaagtctttgctattgtgaatagtgccccaataaacatacatgtgcatgtgtctttatagcagcatgatttataatcctttgggtatatacccagtaatgggatggctgggtcaaatggtatttctagtactagatccttgaggaatcgccacactgttttccacaatggttgaactagtttacagtcccaccaacagtgtaaaagtgttcctatttctccacatcctctctagcacctgttgtttcctgactttttaatgatcaccattctaactggtgtgagatggtatctcattgtggttttgatttgcatttctctgatggccagtgatgatgagcattttttcatgtgtctgttggctgcataaatgtcttgttttgagaagtgtctgttcatctccttcgcccactttgtgatggggttgtttgtttttttcttgtaaatttgtttgggttctttgtagattctgggatattagtcctttgtcagatgagtagattgcaaaaattttctccaattctgtaggttgcctgttcactctgatggtagtttcttttgctgtgcagaagctctttagtttaattagatcccatttgtcaattttgtcttttgttgccattgcttttggtgttttagacatgaagtccttgcccatgcctatgtcctgaatggtatttcctaggttttcttctagggtttttatggttttaggtctgacatttgagtctttgatccatcttgagttaatttttgtataaggtgtaaggaaggaatctagtttcagctttctacatgtggctagccagttttcccagcaccatgtattaaatagggaatcctttccccatttcttgtttttgtcaggtttgtcaaagatcacatggttgtagatgtgtggtattatttctgagggctctgttctgttccattggtctatatctctgttttggtaccagtaccatgctgttttggttactgtagccttgtagtatagtttgaactcaggtaacgtgatgcctccagctttgttcttttggcttaggattgtattggcaatgtgggctcttttttggttccatatgaactttaaagtagttttttccaattctgtgaagaaagtcattggtagcttgatggggatggcattgaatctataagttaccttaggcagtatggccattttcacaatattgattcttcctgtgcatgagcatgaaatgttcttccatttgtttgtgtcctcttttatttcgttgagcagtggtttgtagttctccttgaagaagtccttcacatcccttgtaagttggattcctaggtattttcttctctttgaagcaattgtgaatgggagttcactcatgatttggctctctgtttgtctattattggtgtataagaatgcttgtgatttttgcacattgatttttatcctgagactttgctgaagttgcttatcagcttaaggagattttgggctgagacgatggggttttctaaatatacaattacgtcatctgcaaacagggacaatttgacttcctcttttcctagttgaataccctttatttctttctcctgcctgattgccctggccagaacttccaacactatgttgaataggagtggtgagagagggcatccctgtcttgtgccagttttcaaagggaatgcttccagtttttgcccattcagtatgatattggctgtgggtttgtcataaatagctcttattattttgagatatgtcccagcaataccgaatttattgagagtttttagtatgaagggctgtttaatttttcaaaggccttttctgcatcttttgagataatcatgtggtttttgtctttggttctgtttatatgctggattatgtttattgatttgtgtatgttgaaccagccttgcatcccagggatgaagcccacttgatcatggtggataagctttttgatgtgcttctggattcggtttgccagtattttactgaggatttttgcataaatgttcatcagggatattggtctaaaattctcttttttcgttgtatctctgccaggctttggtatcaggataatgctggcctcataaaatgagttagggaggattccctctttttctattgattggaatagtttcagaaggaatggcagcagctcctccttgtgcctctagtagagggtagagctgtgaatccgtctggtcctggactttttttggctggtaggctattaattattgcctcaatttcagagcctgttattggtctattcagggattcaacttcttcctggtttagtgttgggagtgtgtatgtatccaggaatttatccatttcttctagattttctagtttatttgtgtagaggtgtttatagtattctctgatggtagtttgtatttctgtgggatcagtggtgatatcccctttatcattttttattgtgtctatttgattcttctctcttttcttctttattagtcttggtagcggtctatcaattttgttgatcttttcaaaaaaccagctcctggattcattgattttttgaagagttttttgtgtctctatctccttcagttctgatctgatcttagttatttcttgccttctgctggcttttaaatgtgtttgctcttgcttctctagttcttttaattgtgatgttagggtgtcaatttaaatctttcctgctttctcttgtgggcatttagtgttataaatttccctttacacactgctttaaacgtgtcccagagattctggtatgttgtgtctttgttctcattggtttcaaagaacatctttctgccttcatttaacaaaatgtacccagtagtcattcaggagcaggttgttcagtttccatgtagttgagtggttttgagtgagtttcttaatcctgagttctagtttgattgcgctgtggtctgagagacagtttgttataatttctgttcttttatatttgctgaggagtgctttacttccaactatgtggtcagttttggaataagtgcgatatggtgctgagaagaatgtatattctgttgatttggggtggagagttctgtagatgtctattaggtctgtttggtgcagagctgagttcagttcctgggtatccttgttaactttctgtctcgttgatctgtctaatgttgacagtggggtgttaaggtctcccattattattgtgtgggagtctaagtctctttgtaggtctctaaggagttgctttatgaatctgggtgctcctgtattgggtgcatatatatttaggatagttagctcttcttgttgaattgatccctttaccattatataatggccttctttgtctcttttggtctttgttggtttaaagtctgttttatcagagattaggtgtgcaacccctgcctttttttgttttctatttgcttggtagatcttcctccatccctttattttgagcctatgtgtgtctctgcatgtgagatggggctcctgaatacaacacactgttgggtcttgactctttatccaatttgccagtccgtgtcttttaattggagcatttagcccatttacatttaaggttaatattgttatgtgtgaatttgatcctgtcattatgacattagctggttattttgctccttagttgatgcagtttcttcctaccatcaatggtctttacaatttggcatgtttttgcagtggctggtaccagttgttcctttccatgtttagtgcttccttcaggagctcttttagggcaggcctggtggtgacaaaatctctcagcatttgcttatctgtaaagtattttatttctccttcacttatgaagcttaatttggctgtatatgaaattctgggttgaaaattcttttctttaagaatgttgaacattgccccccactctcttctggcttgtaaagtttctgcggagagatcagctgttagtctgatgggcttccctttgtgggtaaccagacctttctctctggctgcccttaacattttttccttcatttccactgtggtgaatctgacaattatgtcttggagttgctcttcttgaggagtatctttgtggcattctctgtatttcctgaatttgaacgttggcctgccttgctaggttggggatgttctcctggataatatcctgcagagtgttttccagcttggttccattctccctgtcactttcaggtacaccaatcagacgtagatttggtcttttcacatagccccatatttcttggagactttgttcgtttcttttactctattttctctaaacttctcttctcacttcatttcattcatttgatcttcagtcactgataccctttcttccagttgatcgaatcggctactgaagcttgtgcattcatcatgtagttcttgtgccacagtattcagctccatcaggtcatttaaggacttctctatgctggttattctagttagccatttgtctaatcttttttcaaggtt

SEQ ID NO: 10564 - DNA, 6046 bp, Homo sapiens
tttattttattttatttttttttttatattatactctaagttttagggtacatgtgcacattgtgcaggttagttacatatgtatacatgtgccatgctggtgcgctgcacccactaatgtgtcatctagcattaggtatatctcccaatgctatccctcccccctcccccgaccccaccacagtccccagagtgtgatattccccttcctgtgtccatgtgatctcattgttcaattcccacctatgagtgagaatatgcggtgtttggttttttgttcttgcgatagtttactgagaatgatggtttccaatttcatccatgtccctacaaaggatatgaactcatcattttttatggctgcatagtattccatggtgtatatgtgccacattttcttaatccagtctatcattgttggacatttgggttggttccaagtctttgctattgtgaatagtgccacaataaacatacgtgtgcatgtgtctttatagcagcatgatttatactcatttgggtatatacccagtaatgggatggctgggtcaaatggtatttctagttctagatccctgaggaatcgccacactgacttccacaatggttgaactagtttacagtcccaccaacagtgtaaaagtgttcctatttctccgcatcctctctagcacctgttgtttcctgactttttaatgattgccattctaactggtgtgagatgatatctcatagtggttttgatttgcatttctctgatggccagtgatgatgagcatttcttcatgtgttttttggctgcataaatgtcttcttttgagaagtgtctgttcatgtccttcgcccactttttgatggggttgtttgtttttttcttgtaaatttgtttgagttcattgtagattctggatattagccctttgtcagatgagtaggttgcgaaaattttctcccatgttgtaggttgcctgttcactctgatggtagtttcttttgctgtgcagaagctcttgagtttaattagatcccatttgtcaattttggcttttgttgccattgcttttggtgttttggacatgaagtccttgcccacgcctatgtcctgaatggtaatgcctaggttttcttctagggtttttatggttttaggtttaatgtttaaatctttaatccatcttgaattgatttttgtataaggtgtaaggaagggatccagtttcagctttctacatatggatagccagttttcccagcaccatttattaaatagggaatcctttccccattgcttgtttttctcaggtttgtcaaagatcagatagttgtagatatgcggcattatttctgagggctgtgttctgttccattgatctatatctctgttttggtaccagtaccatgctgttttggttactgtagccttgtagtatagtttgaagtcaggtagtgtgatgcctccagctttgttcttttggcttaggattgacttggcaatgcgggctcttttttggttccatatgaactttaaagtagttttttccaattctgtgaagaaagtcattggtagcttgatggggatggcattgaatctgtaaattaccttgggcagtatggccattttcacgatattgattcttcctacccatgagcatggaatgttcttccatttgtttgtgtcctcttttatttccttgagcagtggtttgtagttctccttgaagaggtccttcacatcccttgtaagttggattcctaggtattttattctctttgaagcaattgtgaatgggagttcacccatgatttggctctctgtttgtctgttattggtgtataagaatgcctgtgatttttgtacattgattttgtatcctgagactttgctgaagttgcttatcagcttaaggagattttgggctgagacagtggggttttctagataaacaaacatgtcgtctgcaaacagggacaatttgacttcctcttttcctaattgaataccctttatttccttctcctgcctgattgccctggccagaacttccaacactatgttgaataggagcggtgagagagggcatccctgtcttgtgccagttttcaaagggaatgcttccagtttttgcccattcagtatgatattggctgtgggtttgtcatagatagctcttattattttgaaatacatcccatcaatacctaatttattgagagtttttagcatgaagggttgttgaattttgtcaaaggctttttctgcatctattgagataatcatgtggtttttgtctttggctctgtttatatgctggattacatttattgatttgcgtatattgaaccagccttgcatcccagggatgaagcccacttgatcatggtggataagctttttgatgtgctgctggattcggtttgccagtattttattgaggatttttgcatcaatgttcatcaaggatattggtctaaaattctcttttttggttgtgtctctgcccggctttggtatcagaatgatgctggcctcataaaatgagttagggaggattccctctttttctattgattggaatagtttcagaaggaatggtaccagttcctccttgtacctctggtagaattcggctgtgaatccatctggtcctggactctttttggttggtaaactattgattattgccacaatttcagagcctgttattggtctattcagagattcaacttcttcctggtttagtcttgggagagtgtatgtgtcgaggaatgtatccatttcttctagattttctagtttatttgcgtagaggtgtttgtagtattctctgatggtagtttgtatttctgtgggatcggtggtgatatcccctttatcattttttattggtctatttgattcttctctctttttttctttattagtcttgctagcggtctatcaattttgttgatcctttcaaaaaaccagctcctggattcattgattttttgaagggttttttgtgtctctatttccttcagttctgctctgattttagttatttcttgccttctgctagcttttgaatgtgtttgctcttgcttttctagttcttttaattgtgatgttagggtgtcaattttggatctttcctgctttctcttgtaggcatttagtgcaataaatttccctctacacactgctttgaatgcgtcccagagattctggtatgtggtgtctttgttctcgttggtttcaaagaacatctttatttctgccttcatttcgttatgtacccagtagtcattcaggagcaggttgttcagtttccatgtagttgagcggctttgagtgagattcttaatcctgagttctagtttgattgcactgtggtctgagagatagtttgttataatttctgttcttttacatttgttgaggagagctttacttccaactatgtggtcaattttggaataggtgtggtgtggtgctgaaaaaaatgtatattctgttgatttggggtggaaagttctgtagatgtctattagggctgcttggtgcagagctgagttcaattcctgggtatccttgttgactttctgtctcattgatctgtctaatgttgacagtggggtgttaaagtctcccattattaatgtgtgggagtctaagtctctttgtaggtcactgaggacttgctttatgaatctgggtgctcctgtattgggtgcataaatatttaggatagttagctcctcttgttgaattgatccctttaccatgatgtaatggccttctttgtctcttttgatctttgttggtttaaagtctgttttatcagagactaggattgcaacccctgcctttttttgttttccattggcttggtagatcttcctccatccttttattttgagcctatgtgtgtctctgcacgtgagatgggtttcctgaatacagcacactgatgggtcttgactctttatccaacttgccagtctgtgtcttttaattgcagaatttagtccatttatatttaaagttaatattgttatgtgtgaatttgatcctgtcattatgatgttagctggtgattttgctcattagttgatgcagtttcttcctagtctcgatggtctttacattttggcatgattttgcagcggctggtaccggttgttcctttccatgtttagcgcttccttcaggagctcttttagggcaggcctggtggtgacaaaatctctcagcatttgcttgtctataaagtattttatttctccttcacttatgaagcttagtttggctggatatgaaattctgggttgaaaattcttttctttaagaatgttgaatattggcccccactctcttctggcttgtagggtttctgccgagagatccgctgttagtctgatgggctttcctttgagggtaacccgacctttctctctggctgcccttaacattttttccttcatttcaactttggtgaatctgaccattatgtgtcttggagttgctcttctcgaggagtatctttgtggcgttctctgtatttcctgaatctgaacgttggcctgccttgctagattggggaagttctcctggataatatcctgcagagtgttttccaacttggttccattctccacatcactttcaggtacaccaatcagacgtagatttggtcttttcacatagtcccatatttcttggaggctttgctcatttctttttattcttttttctctaaacttcccttctcacttcatttcattcatttcatcttccattgctgataccctttcttccagttgatcgcatcggctcctgaggcttctgcattcttcacgtagttctcgagccttggttttcagctccatcagctcctttaagcacttctctgtattggttattctagttatacattcttctaaatttttttcaaagttttcaacttctttgcctttggtttgaatgtcctcccgtagctcagagtaatttgatcgtctgaagccttcttctcttagctcgtcaaagtcattctccatccagctttgttctgttgctggtgaggaactgcgttcctttggaggaggagagacgctctgcgttttagagtttccagtttttctgttctgttttttccccatctttgtggttttatctacttttggtctttgatgatggtgatgtacagatgggttttcggtgtagatgtcctttctggttgttagttttccttctaacagacaggaccctcagctgcaggtctgttggaataccctgccgtgtgaggtgtcagtgtgcccctgctggggggtgcctcccagttaggctgctcgggggtcaggggtcagggacccacttgaggaggcagtctgccggttctcagatctccagctgcgtgctgggagaaccactgctctcttcaaagctgtcagacagggacacttaagtctgtagaggttactgctgtctttttgtttgtctgtgccctgcccccagaggtggagcctacagaggcaggcaggcctccttgagctgtggtgggctccacccagttcgagcttcccggctgctttgtttacctaagcaagcctgggcaatggcgggcgcccctcccccagcctcgttgccgccttgcagtttgatctcagactgctgtgctagcaatcagcgagattccgtgggcgtaggaccctctgagccaggtgtgggatatagtctcgtggtgcgccgtttcttaagccggtctgaaaagcgcaatattcgggtgggagtgacccgattttccaggtgcgtccgtcacccctttctttgactcggaaagggaactccctgaccccttgcgcttcccaggtgaggcaatgcctcgccctgctttggctcgcgcacggtgcgcacacacactggcctgcgcccactgtctggcactccctagtgagatgaacccggtacctcagatggaaatgcagtaatcacccgtcttctgcgtcgctcacgctgggagctgtagaccggagctgttcctattcggccatcttggctcctccccca

SEQ ID NO: 10565 - DNA, 5497 bp, Homo sapiens
ttttttctttctttctttcttttttattattattatactttaagttttagggtacatgtgcacaatgtgcaggtttgttacatatgtatacatgtgccgtgttagtgtgctgcacccattaactcatcatttagcattaagtatgtctcctaatgctatccctaccccctccccccaccccacaacagtccccggagtgtgatgttcctcttcctgtgtccaagtgttctcattgttcaattcccacctatgagtgagaacatgtggtgtttggttttttgtccttgcgatactttgctgagaatgatggtttccagtttcatccatgtccctacaaaggacatgaactcatccttttttatggctgcatagtattccatggtgtatatgtgccacattttcttaatccagtctattgttcttggacatttgggttggttccaagtctttgctattgtgaatagtgccgcaataaacatacgtgtgcatgtgtctttatagcagcatgatttataatcctttgggtatacacccagtaatgggatgcctgggtcaaatggtattcctagttctagatcactgaggaattgccacactgacttccacaatggttgaactagtttacagtcccaccaacagtgtaaaagtgttcctatttctccacatcctctccagcacctgttgtttcctgactttttaatgatggccattctaactggtgtaagatggtatctcattgtggttttgatttgcatttctctgatggccagtgatgatgagcattttttcatgtgttttttggctgcataaatgtcttcttttgagaagtgtctgttcatatccttccacccactttttgatggggttgtttgtttttttcttgtaaatttgtttgagttcattgtagattcttcatattagccctttgtcagatgagtaggttgcgaaaattttctcccattttgtaggttgcctgttcactctgatggtagtttcttttgctgtgcagaagctctttagtttaattagatcccatttgtcaattttggcttttgttgccattgcttttggtgttttagacatgaagtccctgcccatgcctatgtcctgaatggtattgcctaggttttcttctagggtttttatggttttaggtctaacatttaagtctttaatccatcttgaattaaattttgtctaaggtgaaaggaagggatccagtttcagctttctacatatggctagccagttttcccagcaccatttattaaatagggaatcctttccccatttcttgtttttgtcaggtttgtcaaagatcagatggttgtagatacatggtattatttctgagggctctgttctgttccattgatctatatttctgttttggtaccagtaccatgctgttttggttactgtagccttgtagtatagtttgaagtcaggtggcgtgatgcctctggctttgttcttatggcttaggattgacttggccatgtgggctcttttttggttccatatgaactttaaagtagttttttccaattatgtgaagaaagtcattggtagcttgatggggatggcattgaatctataaattaccttgggcagtatggccattttcacgatattgattcttcgtacccatgagcatggaatgttcttccatttgtttgtatcctcttttatttcattgagcagtggtttgtagttctccttgaagaggtccttcatatcccttgtaagttggattcctaggtattttattctctttgaagcaattgtgaatgggagttcactcatgatttggctctctgtttgtctgttattggtgtataagaatgcttgtgattattgtatgttgattttgtatcctgagactttgctgaagttgcttatcagcttaaggagattttgggctgagacaatggggtgttctagatatacaatcatgtcatctgcaaacagggacaatttgacttcctcttttcctaattgaataccctttatttccttctcctgcctgattgccctggccagaacttccaacactatgttgaataggagtggtgagagagggcatccctgtcttgtgcgagttctcaaagggaatgcttccagtttttgcccattcagtatgatactggctgtgggtttgtcatagatagctcttattattttgagatacgtcccatcaatacgtaatttattgagagtttttagcatgaagggttgttgaattttgtcaaaggtcttttctgcatctattgagataatcatgtggtttttgcctttggttctgtttatatgctggattatatttattgatttgcatatattgaaccagccttgcatcccagggatgaagcccacttgatcatggtggataagctttttgatgtgctgctggattcagtttgccagaattttattgaggatttttgcatcaatgttcatcaaggatattggtctaaaattctcttttttggttgtgtctctgccaggctttggtatcagaatgatgctggcctcataaaatgagttagggaggattccctctttttctattgattggaatagtttcagaagaaatggtaccagctcctccttgtacctttggtagaattcggctgtgaatccatctggtcctggactctttttggttgataagctattgatcattgccacaatttcagagcctgttatttgtctattcagagattcaaattcttcctggtttagtcttgggagggtatatgtgttgaggaatttatccatttcttctagattttctagtttatttgcgtagaggtgtttgtattattctctgatggtagcttgtatttctgtgggatcggtggtgatatcccgtttttcattttttattgcgtctatttgattcttctctcttttcttctttattagtcttgttagcagtctatcgattttgttgatcttttcaaaaaaccagttgctggattcattaattttttgaagggttttttgtgtctcaatttccttcagttctgctctgattttagttatttcttgccttctgctagcttttgaatgtgattgctcttgcttttctatttcttttaattgtgacgttagggtgtcaattttggatctttcctgctttctcttgtgggcatttagtgctataaatttccctctacacactgctttgaatgtgtcccagagattctggtatgttgtgtctttgttctcgttggtttcaaagaacatctttatttctgccttcatttcgttatgcacccagtagtcattcaggagcaggttgctcagtttccaggtagttcagcagttttgagtgagtttcttagtcctgagttctagtttgattgcactgtggtctgagagacagtttgttataatttctgttcttttacatttgctgaggagtgctttacttccaactatgtggtcaattttggaacaggtgtgatgtggtgctgaaaaaaatgtatattctgttgatttggggtggagagttctgtagatgtctattaggtccacttggtgcagagctgagttcaatttctggatatcctttttaactttctgtctcgttgatctgtctaatgttgacagtgaggtgttaaaatctcccattattattgtgttggagtctaagtctctttgtaggtcactcaggacttgctttgtgaatctgggtgctcctgtattgggtgcatatatatttaggatagttagctcttcttgttgaattgatccctttaccattatgtaatggccttctttgtctcttttgatctttgttggtttaaagtctgttttatcagagactaggattgcaacccctgccttcttttgttttccgtttgcgtggtagatcttcctccatccctttattttgagcctatgtgtgtctctgcatgtgagatgggtttcctgaatacagcacactgatgggtcttgactctttatccaatttgccagtctgtgtcttttaattggagcatttagcccatttacatttaaagttaatattgttatgtgtgtatttggtcttgtcattatgatgttagctggttattttgctcgttagttgatgcagtttcttcctagccttgatggtctttacattttggcatgtttttgcagtggctggtaccggttgttcctttccatgtttagtgcttccttcaggagctcttttagggcaggcctggtggtgacaaaatctctcagcatttgcttgtctgtaaagtattttacttctccttcacttgtgaagcttagtttggctggatatgaaattctgggtggaaaattcttttctttaagaatgttgaatattggcccccactctcttctggcttgtagagtttctgctgagagatccactgttagtttgatgggcttgcctttgtgggtaacccaacctttctctctggctgcccttaacgttttttccttcatttcaactttggtgaatctgacaattatgcgtcttggagctgctcttctcaaggagtatctttgtggcattctctgtatttcctgagtctgaatgttggcctgccttgctagattggggaagtgctcctggttaatagcctgcagaatgttttccaacttggttccattctccctgtcactttcaggtacaccaatcagacgtagatttggtcttttcacatagtcccatatttcttggggctttgttcatttctttttattcctttttctctaaacttcccgtctcgtttcatttcattcatttcatcttccatcactgataccctttcttccagttgattgaatcggctcctgaggcttctgcattcttcacgtagttctcgagccttggctttcagctccatcagctcctttaaggacttctctgctttggttattctagttatccattcgtctaattttttttcacagtttttaacttctttgccattggtttgaatttcctcctgtagcttggagtactttgattgtctgaagccttctttttcagctcatcaaagtccttctccatccagctttgttccattgctggtgaggagctgcgttcctttggaggaggagacgtgctctgctttttagagtttccagtttttctgctctgttttttcccaatctttgtggttttatctacttttggtctctgatgatggtgacgtacagaagggtttttggtgtggatgtcctttctgtttattagttttccttcgaacagacaggaccctcagctgcaggtcttttggagtttgctagaggtccactccagactctgtttgcctgggtatcagcagcggtgactgcagaacagcggtggctgtagaacagcggatcttggtgaaccacaaatgctgctgcctaatcgttcctctggaagttttgtctcagaggggtacccggccatgtgaggtgtctgtctacccctactggggggtgcctcccagttatgctgctcaggggtcaaggacccact

SEQ ID NO: 10566 - DNA, 6068 bp, Homo sapiens
  SITE (2497): n equals a,t,g, or c
ttttttttttttttttttgccaattaaggaatttatttttttttttttatactttaagttttagggtacatgtgcacattgtgcaggttagttacatatgtataaatgtgccatgctggtgcgctgcacccactaactcgtcatctagcattaggtatatctcccaatgccacccctcccccctccccccaccccaccacagtccccagagtgtgatattccccttcctgtgaccatgtgatctcattgttcaattcccacctatgagtgagaatatgcagtgtttggttttttgttcttgcgatagtttactgagaatgatggtttccaatttcatccatgtccctacaaaggacatgaactcatcattttttatggctgcatagtattccatggtgtatatgtgccacattttcttaatccagtctatcattgttggacatttgggttggttccaagtctttgctattgtgaataatgccgcaataaacatacgtgtgcatgtgtctttatagcagcatgatttatagtcatttgggtatatacccagtaatgggatggctgggtcaaatggtatttctagttctagatccctgaggaatcgccacactgacttccacaatggttgaactagtttacagtcccaccaacagtataaaagtgttcctatttctccacatcctctccagcacctgttgtttcctgactttttaatgattgccattctaactggtgtgagatggtatctcattgtggttttgatttgcatttctctgatggccagtgatggtgagcattttttcatgtgttttttggctgcataaatgtcttcttttgagaagtgtctgttcatgtccttcgcccactttttgatggggttgtttgtttttttcttgtaaatttgtttgagttcattgtagattctggatattagccctttgtcagatgagtaggttgcgaaaattttctcccattctgtaggttgcctgttcactgtgatggtagtttcttttgctgtgcagaagctctttagtttaattagatcccatttgtcaattttggcttttgttgccattgcttttggtgttttagacatgaagtccttgcccacgcctatgtcctgaatggtaatgcctaggttttcttctagggtttttatggttttaggtctaacgtttaaatctttaattcatcttgaattgatttttgtataaggtgtaaggaagggatccagtttcagctttctacatatggctagccagttttcccagcaccatttattaaatagggaatcctttccccattgcttgtttttctcaggtttgtcaaagatcagatagttgtaggtatgcggcattatttctgagggctctgttctgttccattgatctatatctctgttttggtaccagtaccatgctgttttggttactgtagccttgtagtatagtttgaagtcaggtagtgtgatgcctccagctttgttcttttggcttaggattgacttggcgatgcgggctcttttttggttccatatgaactttaaagtagttttttccaattctgtgaagaaagtcattggtagcttgatggggatggcattgaatctgtaaattaccttgggcagtatggccattttcacgatattgattcttcctacccatgagcatggaatgttcttccatttgtttgtatcctcttttatttccttgagcagtggtttgtagttctccttgaagaggtccttcacatcccttgtaagttggattcctaggtattttattctctttgaagcaattgtgaatgggagttcactcatgatttggctctctgtttgtctgttgttggtgtataagaatgcttgtgatttttgtacattgattttgtatcctgagactttgctgaagttgcttatcagcttaaggagattttgggctgagatgatggggttttctagataaacaatcatgtcgtctgcagacagggacaatttgacttcctcttttcctaattgaataccctttatttccttctcctgcctgattgccctggccagaacttccaacactatgttgaataggagcggtgagagagggcatccctgtcttgtgccagttttcaaagggaatgcttccagtttttgcccattcagtatgatattggctgtgggtttgtcatagatagctcttattattttgaaatacgtcccatcaatacctaatttattgagagtttttagcatgaagggttgttgaattttgtcaaaggctttttctgcatctattgagataatcatgtggtttttgtctttggctctgtttatatgctggattacatttattgatttgcatatattgaaccagccttgcatcccagggatgaagcccacttgatcatggtggataagctttttgatgtgctgctggattcggtttgccagtattttattgaggatttttgcatcaatgttcatcaaggatattggtctaaattctcntttttggttgtgtctctgcccggctttggtatcagaatgatgctggcctcataaaatgagttagggaggattccctcttttctattgattggaatagtatcagaaggaatggtaccagttcctccttgtacctctggtagaattcggctgtgaatccatctggtcctggactctttttggttggtaaactattgattattgccacaatttcagctcctgttattggtctattcagagattcaacttcttcctggtttagtcttgggagagtgtatgtgtcaaggaatttatccatttcttctagattttctagtttatttgcgtagaggtgtttgtagtattctctgatggtagtttgtatttctgtgggatcggtggtgatatcccctttatcattttttattgtgtctatttgattctcctctctttttttctttattagtcttgctagcggtctatcaattttgttgatcctttcaaaaaaccagctcctggattcattgattttttgaagggttttttgtgtctctatttccttcagttctactctgattttagttatttcttgccttctgctagcttttgaatgtgtttgctcttgcttttctagttcttttaattgtgatgttagggtgtcaattttggatctttcctgctttctcttgtgggcatttagtgctataaatttccctctacacactgctttgaatgcgtcccagagattctggtatgttgtgtctttgttctcgttggtttcaaagaacatctttatttctgccttcatttcgttatgtacccagtagtcattcaggagcaggttgttcagtttccatgtagttgagcggctttgagtgagattcttaatcctgagttctagtttgattgcactgtggtctgagagatagtttgttataatttctgttcttttacatttgctgaggagagctttacttccaactatgtggtcaattttggaataggtgtggtgtggtgctgaaaaaaacatatattctgttgatttggggtggagagttctgtagatgtctattaggtccgcttggtgcagagatgagttcaattcctgggtatccttgttgactttctgtctcattgatctgtctaatgttgacagtggggtgttaaagtctcccattattaatgtgtgggagtctaagtctctttgtaggtcactcaggacttgctttatgaatctgggtgctcctgtattgggtgcatatatatttaggatagttagctcctcttgttgaattgatccctttaccattatgtaatggccttctttgtctcttttgatctttgttggtttaaagtctgttttatcagagactaggattgcaacccctgcctttttttgttttccatttgcttggtagatcttcctccatccttttattttcagcctatgtgtgtctctgcacgtgagatgggtttcctgaatacagcacactgatgggtcttgactctttatccaacttgccagtctgtgtcttttaattggagaatttagtccatttacatttaaagttaatattgttatgtgtgaatttgatcctgtcattatgatgttagctggtgattttgctcgttagttgatgcagtttcttcctagtctcgatggtctttacattttagcatgattttgcagcggctggtaccggttgttcctttccatgtttagcgcttccttcaggagctcttttagggcaggcctggtggtgacaaaatctctcagcatttgcttgtctgtaaagtattttatttctccttcacttatgaagcttagtttggctggatatgaaattctgggttgaaaattcttttctttaagaatgttgaatattggcccccactctcttctggcttgtagggtttctgctgagagatccgctgttagtctgatgggcttccctttgagggtaacccgacctttctctctggctgcccttaacattttttccttcatttcaactttggtgaatctgacaattatgtgtcttggagttgctcttctcgaggagtatctttgtggcgttctctgtatttcctgaatctgaacgttggcctgccttgctagattggggaagttctcctggataatatcctgcagagtgttttccaacttggttccattctccgcatcactttcaggtacaccaatcagacgtagatttggtcttttcacatagtcccatatttcttggaggctttgctcatttctttttattcttttttctctaaacttcccttctcgcttcatttcattcatttcatcttccattgctgataccctttcttccagttgatcgcatcggctcctcaggcttctgcattcttcacgtagttctcgagccttggttttcagctccatcagctcctttaagcacttctctgtattggttattctagttatacattcttctaaatttttttcaaagttttcaacttctttgcctttggtttgaatgtcctcccgtagctcagagtaatttgatcgtctgaaaccttcttctctcagctcgtcaaagtcattctccatccagctttgttccattgctggtgaggaactgcgttcctttggaggaggagaggcgctctgcgttttagagtttccagtttttctgttctgttttttccccatctttgtggttttatctacttttggtctttgatgatggtgatgtacagatgggttttcggtgtggatgtcctttctgtttgttagttttccttctaacagacaggaccctcagctgcaggtctgttggaataccctgccgtgtgaggtgtcagtgtgcccctgctggggggtgcctcccagttaggctgctccggggtcagggtcagggacccacttgaggaggcagtctgcccgttctcagatctccagctgcgtgctgggagaaccactgctctcttcaaagctgtcagacagggacatttaagtctgcagaggttactgctgtctttttgtttgtctgtgccctgcccccagaggtggagcctacagacgcaggcaggcctccttgagctgtggtgggctccacccagttcgagcttcccggctgctttgtttacctaagcaagcctgggcaatggcgggctcccctcccccagccttgctgccgccttgcagtttgatctcagactgctgtgctagcaatcagcgagattccgtgggcgtaggaccctccaagccaggtgtgggatatagtctcgtggtgcgccgttttttaagccggtctgaaaagcgcagtattcgggtgggagtgacccgattttccaggtgcatccgtcacccctttctttgactcggaaagggaactccctgaccccttgcgcttcccaggtaaggcaatgcctcgccctgcttcggctcgcgcacggtgcgcacacccactggcctgcgcccactgtctggcactccctagtgagatgaacctggtacctcagatggaaatgcagaaatcacccgtcttctgcgtcgctcacgctgggagctgtagaccggagctgttcctattcggccatcttggctcctcccccaacatat

SEQ ID NO: 10567 - DNA, 6028 bp, Homo sapiens
ttttgttttttttttttttttttttttttttttttattatactctaagttttagggtacatgtgcacattgtgcaggttagttacatatgtatacatgtgccatgctggtgcgctgcacccactaatgtgtcatctagcattaggtatatctcccaatgctatccctcccccctcccccgaccccaccacagtccccagagtgtgatattccccttcctgtgtccatgtgatctcattgttcaattcccacctatgagtgagaatatgcggtgtttggttttttgttcttgcgatagtttactgagaatgatggtttccaatttcatccatgtccctacaaaggatatgaactcatcattttttatggctgcatagtattccatggtgtatatgtgccacattttcttaatccagtctatcattgttggacatttgggttggttccaagtctttgctattgtgaatagtgccgcaataaacatacgtgtgcatgtgtctttaatagcagacaaatgaatttatacttcatttgggtaatacccagtaatgggatggctgggtcaaatggatttctagttctagatcctgaggaatcaccacactgacttccacatggttgaactagtttacagtcccaccaacagtgtaaaagtgttcctatttctccacatcctctccagcacctgttgtttcctgactttttaatgattgccattctaactggtgtgagatgatatctcatagtggttttgatttgcatttctctgatggccagtgatgatgagcattttttcatgtgttttttggctgcataaatgtcttcttttgagaagtgtctgttcatgtccttcgcccactttttgatggggttgtttgtttttttcttgtaaatttgtttgagttcattgtagattctggatattagccctttgtcagatgagtaggttgcgaaaattttctcccatgttgtaggttgcctgttcactctgatggtagtttcttttgctgtgcagaagctctttagtttaattagatcccatttgtcaattttggcttttgttgccattgcttttggtgttttggacatgaagtccttgcccacgcctatgtcctgaatggtaatgcctaggttttcttctagggtttttatggttttaggtttaacgtttaaatctttaatccatcttgaattgatttttgtataaggtgtaaggaagggatccagtttcagctttctacatatggctagccagttttcccagcaccatttattaaatagggaatcctttccccattgcttgtttttctcaggtttgtcaaagatcagatagttgtagatatgcggcattatttctgagggctctgttctgttccattgatctatatctctgttttggtaccagtaccatgctgttttggttactgtagccttgtagtatagtttgaagtcaggtagtgtgatgcctccagctttgttcttttggcttaggattgacttggcaatgcgggctcttttttggttccatatgaactttaaagtagttttttccaattctgtgaagaaagtcattggtagcttgatggggatggcattgaatctgtaaattaccttgggcagtatggccattttcacgatattgattcttcctacccatgagcatggaatgttcttccatttgtttgtgtcctcttttatttccttgagcagtggtttgtagttctccttgaagaggtccttcacatcccttgtaagttggattcctaggtattttattctctttgaagcaattgtgaatgggagttcacccatgatttggctctctgtttgtctgttgttggtgtataagaatgcttgtgatttttgtacattgattttgtatcctgagactttgctgaagttgcttatcagcttaaggagattttgggctgagacgatggggttttctagataaacaatcatgtcgtctgcaaacagggacaatttgacttcctcttttcctaattgaataccctttatttccttctcctgcctgattgccctggccagaacttccaacactatgttgaataggagcggtgagagagggcatccctgtcttgtgccagttttcaaagggaatgcttccagtttttgcccattcagtatgatattggctgtgggtttgtcatagatagctcttattattttgaaatacgtcccatcaatacgtaatttattgagagtttttagcatgaagggttgttgaattttgtcaaaggctttttctgcatctattgagataatcatgtggtttttgtctttggctctgtttatatgctggattacatttattgatttgcgtatattgaaccagccttgcatcccagggatgaagcccacttgatcatggtggataagctttttgatgtgctgctggattcggtttgccagtattttattgaggatttttgcatcaatgttcatcaaggatattggtctaaaattctcttttttggttgtgtctctgcccggctttggtatcagaatgatgctggcctcataaaatgagttagggaggattccctctttttctattgattggaatagtttcagaaggaatggtaccagttcctccttgtacctctggtagaattcggctgtgaatccatctggtcctggactcttttttgttggtaaactattgattattgccacaatttcagagcctgttattggtctattcagagattcaacttcttcctggtttagtcttgggagagtgtatgtgtcgaggaatgtatccatttcttctagattttctagtttatttgcgtagaggtgtttgtagtattctctgatggtagtttgtattgctgtgggatcggtggtgatatcccctttatcattttttattgtgtctatttgattcttctctctttttttctttattagtcttgctagcggtctatcaattttgttgatcctttcgaaaaaccagctcctggattcattgattttttgaagggttttttgtgtctctatttccttcagttctgctctgattttagttatttcttgccttctgctagcttttgaatgtgtttgctcttgcttttctagttcttttaattgtgatgttagggtgtcaattttggatctttcctgctttctcttgtaggcatttagtgctataaatttccctctacacactgctttgaatgcgtcacagagattctggtatgtggtgtctttgttctcgttggtttcaaagaacatctttatttctgccttcatttcgttatgtacccagtagtcattcaggagcaggttgttcagtttccatgtagttgagcggctttgagtgagattcttaatcctgagttctagtttgattgcactgtggtctgagagatagtttgttataatttctgttcttttacatttgctgaggagagctttacttccaactatgtggtcaattttggaataggtgtggtgtggtgctgaaaaaaatgtatattctgttgatttggggtggagagttctgtagatgtctattaggtctgcttggtgcagagctgagttcaattcctgggtatccttgttgactttctgtctcgttgatctgtctaatgttgacagtggggtgttaaagtctcccattattaatgtgtgggagtctaagtctctttgtaggtcactcaggacttgctttatgaatctgggtgctcctgtattgggtgcataaatatttaggatagttagctcctcttgttgaattgatccctttaccattatgtaatggccttctttgtctcttttgatctttgttggtttaaagtctgttttatcagagactaggattgcaacccctgcctttttttgttttccattggcttggtagatcttcctccatccttttattttgagcctatgtgtgtctctgcacgtgagatgggtttcctgaatacagcacactgatgggtcttgactctttatccaacttgccagtctgtgtcttttaattgcagaatttagtccatttatatttaaagttaatattgttatgtgtgaatttgatcctgtcattatgatgttagctggtgattttgctcattagttgatgcagtttcttcctagtctcgatggtctttacattttggcatgattttgcagtggctggtaccggttgttcctttccatgtttagcgcttccttcaggagctcttttagggcaggcctggtggtgacaaaatctctcatcatttgcttgtctgtaaagtattttatttctccttcacttatgaagcttagtttggctggatatgaaattctgggttgaaaattcttttctttaagaatgttgaatattggcccccactctcttctggcttgtagggtttctgccgagagatccgctgttagtctgatgggctttcctttgagggtaacccgacctttctctctggctgcccttaacattttttccttcatttcaactttggtgaatctgacaattatgtgtcttggagttgctcttctcgaggagtatctttgtggcgttctctgtatttcctgaatctgaacgttggcctgccttgctagattggggaagttctcctggataatatcctgcagagtgttttccaacttggttccattctccccatcactttcaggtacaccaatcagacgtagatttggtcttttcacatagtcccatatttcttggaggctttgctcatttctttttattcttttttctctaaacttcccttctcgcttcatttcattcatttcatcttccattgctgataccctttcttccagttgatcgcatcggctcctgaggcttctgcattcttcacgtagttctcgagccttggttttcagctccatcagctcctttaagcacttctctgtattggttattctagttatacattcttctaaatttttttcaaagttttcaacttctttgcctttggtttgaatgtcctcccgtagctcagagtaatttgatcgtctgaagccttcttctctcagctcgtcaaaatcattctccatccagctttgttctgttgctggtgaggaactgcattcctttggaggaggagaggcactctgcgttttagagtttccagtttttctgttctgttttttccccatctttgtggtttatctacttttggtctttgatgatggtgatgtacagatgggttttcggtgtagatgtcctttctggttgttagttttccttctaacagacaggaccctcagctggaggtctgttggaataccctgccgtgtgaggtgtcagtgtgcccctgctggggggtgcctcccaattaggctgctcgggggtcaggggtcagggacccacttgaggaggcagtctgcccgttctcagatctccagctgcgtgctgggagaaccactgctctcttcaaagctgtcagacagggacatttaagtctgcagaggttactgctgtctttttgtttgtctgtgccctgcccccagaggtggagcctacagaggcaggcaggcctccttgagctgtggtgggctccacccagttcgagcttcccggctgctttgtttacctaagcaagcctgggctatggcgggcgcccctcccccagcctcgttgccgcctggcagtttgatctcagactgctgtgctagcaatcagcgagattccgtgggcgtaggaccctctgagccaggtgtgggatatagtctcgtggtgcgccgtttcttaagccggtctgaaaagcgcaatattcgggtgggagtgacccgattttccaggtgcgtccgtcacccctttctttgactcggaaagggaactccctgaccccttgcgcttcccaggtgaggcaatgcctcgccctgcttcggctcgcgcacggtgcgcgcacacactggcctgcgcccactgtctggcactccctagtgagatgaacctggtacctcagatggaaatgcagaaatcacccgtcttctgcgtcgctcacgctgggagctgtagaccggagctccac

SEQ ID NO: 10568 - DNA, 5229 bp, Homo sapiens
ttatttttttttttaattttattattattatactttaagttttagggtacatgtgcacaatgtgcaggtttgttacatatgtatacatgtgccatgttggtgtgctgtacccattaactcgtcatttagcattaggtatatctgctaatgctatccctcccccgctcccccaaccccacaacagtctccggagtgtgatgttccccttcctgtgtccatgtgttctcactgttcaattcccacctatgagtgagaacatgcagcgtttggttttttgtccttgcgatagtttgctgagaatgatggtttccagtttcatccatgtccctacaaaggacatgaactcatcattttttatggctgcatagtattccatggtgtatatgtgccacattttcttaatccagtctatcgttgttggacatttaggttggttccaagtctttgctattgtgaatagtgctgctataaacatatgtgtgcatgtgtctttatagcagcatgatttataatcctttgggtatatacccagtaatgggatggctgggtcaaatggtatttctagttctagatccctgaggaatcaccacactgacttccacaatggttgaactagtttacagtcccaccaacagtgtaaaagtgttcctatttctccacatcctctccagcacctgttgtttcctgactttttaatgatcgccattctaactggtgtgagatggtatctcattgtggttttgatttgcatttctctgatggccagtgatgatgagcattttttcatgtgatttttggctgcataaatgtcttcttttgagaagtgtctgttcatgtcgttcacccactttttgatggggttgtttgtttttttcttgtaaatttgtttgagttcattgtagattctggatattagccctttgtcagatgagtaggttgcaaaaattttctcgcattctgtaggttgcctgttcactctgatggtactttcttttgctgtgcagaagctctttagtttaattagatcccatttgtcaattttggcttttgttgccattgcttttggtaattgaagtccttgcccatgcctatgtcctgaatggtaatgcctaggttttcttctaggatttttatggttttaggtctaacatgtaagtctttaatccatcttgaattaatttttgtatgaggtgtaaggaagggatccagtttcagctttctacatatggctagccagttttcccagcaccatttattaaatagggaatcctttccccattgcttgtttttctcaggtttgtcaaagatcagatggttgtagatatgcggcattatttctgagggctcttttctgttccattgatctatatctctgttttggtaccagtaccatgctgttttggttactgtagccttgtagtatagtttgaagtcaggtagtgtgatgcctccagctttgttcttttggcttaggattgacttggtgatgtgggctcttttttggttccatatgaactttaaagtagttttttccaatctgtgaagaaagtcattggtagcttgatggggatggcattgaatctataaattaccttgggcagtatggccattttcacgatattgattcttcctacccatgagcatggaatgttcttccatttgtttgtatctgttcattgagcagtggtttgtagttctccttgaagaggtccttcacatcccttgtaagttggattcctaggtattttattctctttgaagcaattgtgaatgggagttcactcatgatttggctctctgtttgtctgttattggtgtataagaatgcttgtgatttttgtacattgattttgtatcctgagactttgctgaagttccttatcagtttaaggaggttttgggctgagacaatggggttttctagaggtacaatcatgtcatctgcaaacagggacaatttgacttcctcttttcctaattgaataccctttatttccttctcctgcctcattgccctggccagaacttccaacactatgttgaataggagtggtgagagagggcatccctgtcttgtaccagttttcaaagggaatgcttccagtttttgcccattcagtatgatattggctgtgagtgtgtcatagatagctcttattattttgagataggtcctatcaatacctaatttattgagagtttttagcatgaaggttgttgaattttgtcaaaggccttttctgcatgtattgagataatcatgtggtttttgtctttggttctgtttatatgctggattacattcattgatttgcatatgttgaaccagccttgcatcccagggatgaagcccagttgatcatggtggataagctttttgttgtgctgctggattcagtttgccagtattttattgaggatttttgcatcaatgttcatcaaggatattggtctaaaattctcttttttggttgtgtctctgtcaggctttggtatcaggatgatgctggcctcataaaatgagttagggaggattctctctttttctattgattggaatagtttcagaaggaatggtaccagctcctccttgtacctctggtagaattcggctgtgaattcatctggacctggactttttttggttggtaagcaattgattattgccacaatttcagagcctgttattggtctattcatagattcaacttcttcctggtttagtcttgggagggtgtatgtgtccaggaatttatccatttcttctagattttctagtttatttgcgtagaggtgtttgtagtattctctgatggtagtttgtatttctgtgggatcggtggtgataccccctttatcattttttattgcgtctatttgattcttctctcttttcttctttattagtcttgctagcggtctatcaattttgttgatcttttcaaaaaaccagctcctggattcattgatttttttgaagggttttttgtgtttctatttccttcatttctgctctgattttagttatttcttgccttctgctagcttttgaatgtgtttgctcttgctttcctagttcttttaattgtgacgttagggtgtcaattttggatctttcctgctttctcttgtgggcatttagtgctataaatttccctctacacactgctttgaatgtgtcccagagattctggtatgttgtgtctttgtttttgttggtttcaaagaacatctttatttctgccttcatttcgttatatacccagtagtcattcaggagcaggttgttcagtttccatgtagttgagcggttttgagtgagtttcttaatcctgagttctagtttgattgcactgtggtctgagagacagtttgttataatttctgttcttttacgtttgctgaggagtgttttacttccaagtatgtggtcaattttggaataggtgtggtgtggtgctgaaaaaaatgtatattctgttgatttggggtagagagttctgtagatgtctgttagatctgcttggtgcagagctgagttcaattcctgggtatccttgttaactttctgtctcattgatctgtctaatgttgacaatggggtgttaaagtctcccattgttattgtgtgggagtgtaagtctctttgtaggtcactaaggacttgctttatgaatctaggtgctcctgtattgggtgcgtatatatttaggatagttagctcttcttgttgaattgatccctttaccattatataatggccttctttgtctcttttgatctttcttggttgaaagtctgttttatcagagactaggattgcaacccctgcctttttttgttttccatttgcttggtagatcttcctccatccctttattttgagcctatgtgtgtctctgcatgtgagatgggtttcctgaatacagcacactgatgggtcttgactccttatccaatttgtcagtctgtgtcttttaattggagcatttagcccatttacatttaaagttaatattgttatgtgtgaatttggtcctgtcattatgatgttagctggtgattttgctcgttagttgatgcagtttcttcctagccttgatggtctttacattttggtatgtttttgcagtggctggtaccagttgttcctttccatgtttggtgcttccttcaggagctcttttaggccaggcctggttggtgacaaaatctgtcagcatttgcttgtctgtaaagtattttatttctccttcacttatgaagcttagtttggctggatatgaaattccgggttgaaaattcttttctttaagaatgttgaatatcggcccccactctcttctggctggtagagtttctgccgagagatcagctgttagtctgatgagcttccctttgtgggtaacccgacttttctctctggctgcccttaacattttttccttcatttcaactttggtgaatccgacaattatgtgtcttggagttgctcttctcgaggactatctttgtggcattctctgtatctcctgaatctgaatgttggcctgccttgctagattggggaagttctcctggataatatcctgcagagtgttttccaacttggtgccattcttcccgtcactttcaggtacaccaatcagacgtagatttggtcttttcacatagtcccatatttcttggaggctttgttcgtttctttttattcttttttctctaaacttcccttctcacttcatttcattcatttcgtcttccatcactgataccctttcttccagttgatcgcatcggctcctgaggcttctgcattcttcacgtagttcttgagccttggctttcagctccatcagctcctttaaggacttctctgcattggatattctaggtagccattcgtctaattttttttcaaagtttttaacttctttgccattggtttgaatttcctcctgtagctcagagtagtttgatcgtctgaagccttcttctctcaactcgtcaaagtcattctccgtccagctttgttctgttgctggtgaggaactgcgttcctttggaggaggagaggtgctctgctttttagagtttccagtttttctgctctattttttccccatctttgtggtttttgtctacttttggtctttgatgatggtgacgtacagatgggtttttggtgtggatgtcctttctgtttgttagttttccttctaacagaca

SEQ ID NO: 10569 - DNA, 4723 bp, Homo sapiens
aatggaattctttttttttttattctttaagttttagggtacatgtgcacaatatgcaggtttgttacatatgtatatatgtgccatgttggtgtgctgcacccattaactcgtcatttacattaggtatatctcctaatgctatctctccccctccccccaccccacaacaggccccagtgtgtgatgttccccttcccgtgtccatgtgttctcattgttcaattcccacctatgagtgagaacatgcggtgtttggttttttgtccttgcgatagtttgctgagaatgatggtttccagcttcatccatgtccctacaaaggacatgaactcatccttttttatggctgcatagtattccatggtgtatatgtgccacattttcttaatccagtctatcactgatggacatttgagttggttccaagtctttgctattgtgaatagtgctgcagtaaacatatgtgtgcatgtgtctttataacagcatgatttataatcctttgggtatatacccagtaatgggatggctgggtcaaatggtatttctagttctagatccctgaggaatcgccacactgacttccacaatggttgaactagtttacagttccaccaacagtgtaaaagtgttcctatttctccacatcctctccagcacctgttgtttcctgactttttaatgatggccattctaactggtgtgagatggtatctcattgtggttttgatttgcatttctctgatggccagtgatgatgagcattttttcatgtgtcttttggctgcataaatgtcttcttttgagaagtgtctgttcatattcttcgcccacttgctgatggggttgtttgtttttttcttgtaaatttgtttgagttcattgtagattctggatattagccctttgtcagatgactagattgcaaaaattttctcccattctgtaggttgcctgttcactctcatggtagtttcttttgctgtgcagaagctctttagtttaattagatcccatttgtcaattttggcttttgttgccattgcttttggtgttttagctgtgaagtccttgcccatgcctatgtcctgaatggtattgcctaggttttcttctagggtttctatggttttaggtctaacatttaagtctttaatccatcttgtattaatttttgtataaggtgtaaggaagggatccagtttcagctttctacatatggctagccaattttcctggcacgatttattaaatagggaattctttcccccatttcttatttttgtcaggtttgtcaaagatcagatagttgtagatatgaggcattatttctggcgcctctgttctgttccattggtctatatctctgttttggtgccagtaccatgctattttggttactgtagccttgtagtatagtttgaagtcaggtagtgtgatgccttcagctttgttctttttgcttaggattgacttggctatgcaggctcttttttggttccatattaactttaaagtagttttttccaattctttgaagaaagtcattggtagcttgatggggatggcattgaatctataaattaccttgggtggtatggccattttcacaatattgattcttcctacccatgagcatggaatgttcttccatttttttgtatcctcttttatttcattgagcagtggtttgtagttctccttgaagaggtccttcacgtcccttgtaaattggattcctaggtattttattctctttgaagcaattgtgaatgggaggtcactcatgatttggctctctgtttgtctgttattggtgtataagaatgcttgtgatttttgcacattgattttatatcctgagacttggctgaatttgcttatcagcttaaggagattttgggctgagacgactggagttttctagatatacaatcatgtcatctgcaaacagggacaatttgacttcctcttttcctaattgaataccctttatttccttctcctgcctgattgccctagccggaacttccaacactatgttgaataggagtggtgagagaggacatccctgtcttgtgccagttttcaaagggaatgcttccagtttttgcccactcagtatgatattggctgtgggtttgtcattgatagctcttattattttgagatatgtcccatcaatacttaatttattgagagttttttagcatgaagtgttgttgaattttgtcaaaggccttttctgcatcttttgagataatcatgtggtttttgttgttggttctgtgtatatgctggattacgtttattgatttgtgtatgttgaaccagccttgcatcacagggatgaagcccacttgatcatggtggataagctttttgatgtgctgctggattcagtttgccagtattttattgaggatttttgcatcgatgttcatcagggatattggtgtaaaattctcttttttttgttgtgtctctgccaggctttggtatcaagatgatgctggcctcataaaatgagttagggaggattccctctttttctattgattggaatagtttcagaaggaatggtatcagctcctccttgtacctctggcagaattcggctgtgaatccatctggtcctagactttttttggttggtaagctattaatgattgtctcaatttcagagcctgttattggtctattcagagattctacttcttcctggtttagtcttgagagggtgtatgtgtccaggaatttatccatttcttctagattttcaaatttatttgcgtagacgtgtttatagtattttctgatggtagtttgtatttctgtgggatcggtggtgatatcccctttatcattttttattgtgtctgtttgattcttctctcttttgttctttattggtcttgctagcagtctttcaattttgttgatcttctcaaaaaaccagctcctggattcattgattttttgaagggttttttgtgtctctatctccttcagttctgctctgatcttatttatttcttgccttctgctagcttttgaatgtgtttgctcttgcttctctacttcttttaattgtgatgttagggtgtcaattttagatctttcctgctttctcttgtgggcatttagtgctataaatttccctctacacaatgatttaaatgtgtcccagagattctggtatgttgtgtctttgttctcattggtttcaaagaacatctttatttctgccttcatttcgttatgtacacagtagtcattcaggagcaggttgttcagtttccatatagttgagtggttttgagggagtttcttaatcctgagctctagtttgattgcactgtggtctgagagacagtttgttacaatttctgttcttttacatttgctgaggagtgctttacttccaactatgtggtcaattttggaataagtgtgttgtggtactgagaagaatgtatattctgttgatttggggtagagagttctgtagatatctattaggtccacttggtgcaaagctgagttcaattcctggatatcctcattaagtttctgtctcgttgatctgtctaatgttgacagtggggtgttaaagtctcccattattattgtgtgggagtctaagtctctttgtaggtctttaaggacttgctttatgaatctgggttctcctgtattgggtgcatatatatttaggatagtcagctcttcttgttgaattgatccctttaccattatgtaatggccttgtctcttttgatctttgttggtttaaagtctgttttatcagagactaggattgcaacccctgcctttttttgttttccatttgcttggtagatcttcctccatccttttattttgagcctatgtgtgtctctgcatgtgagttgagtttcctgaatacagcacactgatgggtcttgactgtttatccaatttgctagtctgtgtcttttaattggagcatttagcccatttacatttaagggtaatattgttatgtgtgaatttgatcatgtcattatgatgttagctgcttattttgctcgttagttgatgcagttacttcctagcctcaacagcctttacaacttggcatgtgtttgcagtggctggtactggttgttcctttccatgtttagtgcttccttcaggagctcttttagggcaggcctggtggtgacaaaatctctcagcatttgcttgtctgtaaaggattttatttctccttcacttatgaagcttagtttggctggatatgaaattctgggttgaaaattcttttctttaagaatgttgaatattggcccccactctctcctggcttgtagcatttctgccaagagatcagctcttagtctgatgggcttccctttgtgggtaacccgacctttctctctggctgcccttgatattttttccctcatttcaactttggtgaatctgagaattatttgtcttggagttgctcttctcgacgagtatctttgtggcgttctctgtatttcctgaatttggatgttggcctgccttgctaggttggggaagttctcctggataatatcctgcagagtgtttcccaacttggttccattctccccgtcactttcaggtacaccaatcagatgtacatttggtcttttcacttagtcccatatttcttggaggctttgttcatttctttttattatttttt

SEQ ID NO: 10570 - DNA, 5645 bp, Homo sapiens
tatatagatatattttttattatactttaagttctagggtacatgtgcacaacgtgcaggtttgttacatatgtatacatgtgacatgttggtgtgctgcacctgttaactcatcatttacattaggtatttctcctaatgctatctctcccccctccccccaccccacaacaggccccagtgtgtgatgttccccgccctgcgtccaagtgttctcattgttcaattcccacctatgaatgagaacatgcggtgtttggttttttgtccttgcgatagtttgctcagaatgatggtttccagcttcatccatgtccctacaaaggacatgaactcatcattttctatggctgcatagtattccacggtgtatatgtgccacattttcttaatccagtctatcactgttggatatttgggttggttccaagtctttgctattgtgaatagtgccacaataaacatacatgtacatgtgtctttatagcagcatgatttataatcctttgggtatatacccagtaatgggatggctgggtcaaatggtatttctagttctagatccctgaggaatcgccaaaatgtcttccacaatggttgaactagtttacagtcccaccaacagtgtaaaagtgttcctatttctccacatcctccccagcacctgttgtttcctgactttttaatgatcaccattctaactggtgtgagatggtatctcattgtggttttgatttgcatttctctgatggccagtgatgatgagcattttttcatgtgttttttggctgcataaatgtcttcttttgaaaagtatctgttcatatcctttgcccacttgttgatggggttgtttttttcttgtaaatttgtttgagttctttgtagattctagatattagccctttgtcagatgagtagattgcaaaaattttctcccattctgtaggttgcctgttcattctgatggtagtttcttttgctgtgcagaagctctttagtttatttagattgcatttgtcaattttggctttcgttgccattgcttttggtgttttaggcatgaagtcttcgcccatgcctatgtcctgaatggtattgcctaggttttcttctagggtttttatggttttaggtctaacatttaagtcttcaaaccatcttgaattaatttttgtataaggtgtaaggaagggatccagtttcagctttctacatatggctagccagttttcccagcaccatttattaaatagggaatcctttccccattgcttgtttttctcaggtttgtcaaagatcagatagttgtagatgtgtggtattatttctgagggctctgttctgttctattggtctatatctctgttttggtatcagtaccatgctgttttggttactgtagccttgtagtatagtttgaagtcaggtagcatgatgcctccagctttcttcttttggcttaggaatatcttggaaatgcaggctcttttttgtttccacatgaactttaaagtagtttttttccaattctgtgaagaaagtcattggtagcttgatggggatggcattgaatctataaattaccttgggcagtatggccattttcacgatattgattcttcctacccatgagcatggaatgttcttccatttctttgtatcctcttttatttcattgagcagtggtttgtagttctccttgaagaggtccttcacatcccttgtaagttggattcctaggtattttattctctttgaagcaattatgaaagagaattcactcatgatttggctctctgtttgtctgttattggagtataagaatgcttgtgatttttgcacattgattttgtatcctgagactttgctgaagttgtttatcagcttaaggagattttgggctgagacaatggggttttctagatatacaatcatgtcatctgcaaacagggacaatttgacttcctcttttcctaattgaataccctttatttctttctcctgtctgattgccctggccagaaattccaacactatgttgaataggagtggtgagagagggcgtccctgtcttgtgccagttttcaaagggaatgcttctagtttttgtccattcagtatgatattggctgtgggtttgtcataaatagctctcattattttgaggtacgtcccatcaatacctaatttattgagagtttttagcaggaagggctgctgaattttgtcaaaggccttttctgcatctattgagacagtcatgtggtttttgtctttggttctgtttatatgctggattacatttattgacttgcgtatattgaaccagccttgcatcccagggatgaagcccacttgatcacggtggataagctttttgatgtgctgctggattcagtttgccagtattttattgaggatttttgcattgatgttcatcagggatattggtttaaaattttcttttttggttgtgtctctgccaggctttggtaccaggatgatgctgacctcgtaaaatgagttagggaggattctctctttttctattgattggaatagtttcagaaggaatggtatcagctcctccttgtacctctggtagaatttggctgtgactccgtctggtcctggactttttttggctggtaagctattgattattgcctcaatttcagagcctgttattggtctattcagacattcaacttcttcttggtttagtcttgggagggtgtatgtatggaggaatttatccatttcttctagattttctagtttatttgcatagaggtggttatagtattctctgatggtagtttgaatttctgtgggatcggtggtgatatcccctttatcattttttattgtgtctattggattcttccctcctttcctctttattagtcttgctagtggtctatcaattttgttgatcttttcaaaaaaccagctcctggattcgttgattttttgaagggtttttttgtgtctctatctccttcagttctgctctgatcttagttatttcttgccttctgctagcttttgaatgtgtttgttcttgcttctctagttcttttaattgtgatgttagggtgtcaattttagatctttcctgctttctcttgtgggcatttagtgctataattttccctctacacactgctttaaaggtgtcccagagattctggcgtgttgtgtctttgttctcgttggtttcaaagaacatctttatttctgccttcatttcattacgtacccagtagtcattcaggagcaggttgttcagtttccatgcagttgagcggttttgagtaagtttcttaatccagagttctagtttgattgcactgtggtctgagagacagtttgttataatttctgttcttttacatttgttgaggagtgctttacttccacctatgtggtcaattttggaacaggtgtggtgtggtgctgaaaagaatgtatattctgttgatttggggtggagagttctgtagatgtctattaggtctgcttcgtgcagagctgagttcaattcctggatatccttgttaactttctgtctggtggatctgtcgaatattgacagtggggtgttaaagtctcccattattattgtgtgggagtctaagtctctttgtaggtctctaaggacttgctttatgatctgggtgctcctgtattgggtgcatatatatttaggatagttagctcttcttattgaattgatccctttaccattatgtaatggctttctttgtctcttttgatctttattggcttaaagtctgttttatcagagactaggattgcaacctctgcctttttttgttttccatttgcttggttgatcttcctccatccctttattttaagcctatgcgtgtctctgcacgtgagatgggtttcctgaatacagcacactgatgggtcttgactctttatccaatttgccagtctgtgtcttttaattggagcatttagcccatttacatttaaggttaatattgttatgtgtgaatttaatcctgtcattatgatgttagctggtttttgctcattagttgacacagtttcttcctagcatcgatgggctttacaatttgacatgtttttgcagtggctggtactggttgttcctttccatgtttagtgcttacttcaggagctcttttagggcaggcctggcagtgacaaaatctcttagcatttgcttgtctgtaaaggattttatttctccttcacttatgaagcttagtttggctggatatgaaattctgggttgaaaattcttttctttaagaatgttgaatattggcccccactctcttctggcttgtagagtttctgccgagagatcagctgttagtctgatgggcttccctttgtgggtaacccgacctttctctctggctgcccttaacatttttttccttcatttcaactttggtgaatgtgacaattatgtgtcttggagttgctcttctcgaggagtatctttgtggcgttctctgtatttctggaatttgagtgttggcctgccttgctaggttggggaagttctcctggataatatcctgcagagtgttttccaacttggtttcattctctacgtcactttcaggtacaccaatcagacgtagatttggtcttttcacatagtcccatatttctttgaaggtttgtttgtttctttttattcttttttctctaaacttctctgctcgcttcatttcattcatttgatcttccatcacagataccctttcttccagttgattgaatcggctactgaagcttgtgcattcgtcacgtagttctcgtgccgtggttttcagctccatcaggtcctttaaggacttctctgcattggttattctagttagccattcatctaatcttttttcaaggtttttaacttctttgccattggttcgaacttcctcctttagctcagagtagtttgatcgtctgaagccttcttctctcagctcgtcaaagtcattctctgtccagctttgttcctttgctggtgaggagctgctttcctttggaggagaagaggtgctctgatttttagaattttcagtttttctgctctgttttttccccatctttgtggttttatctacctttgatctttgatgatggtgacgtacagatggggttttgatgtggatgtccattctgtttgttagttttccttttaacagtcaggaccctcagctgcaggtctgttggagtttgctggaggtccactccagacctgtttgcctgggtaccagcagcagaggctgcagaacagtgaatattgctgaacagcaaatgttgctgcctgatcgttcctctggaagttttgtctcagaggggtacccagctgtgtgaggtgtcagtctgcccctactggggggtgcctcccagttaggctacttgggggtcagggacccacttgaggaggcagtctgtccattctcagatctcaaactccatgctgggagaaccactactctcttcaaagctgtcagacagggacacttaagtctgcagaggtttctgctgccttttgttcggctatgccttgcccccagaggtgcagtctacagaggcatgcaggcctccttgagctgcgttgg

SEQ ID NO: 10571 - DNA, 5229 bp, Homo sapiens; identical to SEQ ID NO: 10568

SEQ ID NO: 10572 - DNA, 6021 bp, Homo sapiens
aaaacatttttttaaaattattattatactttaagttttagggtacatgggcacaatgtgcaggttagttacatatgtatacatgtgccatgctggtgtgcagcacccactaactcgtcatctagcattaggtatatctcccaatgctaaccctccccctccccccaccccacgacagtccccagagtgtgatgttccccttcctgtgtccatgtgttctcattgttcaattcccacctatgagtgagaatatgcggtgtttgtttttttgttcttgtgatagtttactggaatgatgatttccaatttcatccatgtccctacaaaggacatgaactcatcattttttatggctgcatagtattccatggtgtatatgtgccacattttcttaatccagtctatcattgttggacatttgggttggttccaagtctttgctattgtgaataatgccacaataaacatacgtgtgcatgtgtctttatagcagcatgatttatagtcctttgggtatatacccagtaatgggatggctgggtcaaatgatatttctagttctagatccctgaggaatcgccacactaacttccccaatggttgaactagtttacagtcccaccaacagtgtaaacgtgttccaatttctccacatcctctccagcacctgttgtttcctgactttttaatgattgccattctaactggtgtgagatggtatctcattgtggttttgatttgcatttctctgatggccagtgatggtgagcattttttcatgtgttttttggctgcatagatgtctttttttgagaagtgtctgttcatatcctttgcaaactttttgatggggttgtttgtttttttcttgtaaatttgtttgagttcattgtagattctggatattagccctttgtcagatgagtaggttgcgaaaattttcccccattttgtaggttgcctgttcactctgatggtagtttcttttgctgtgcagaagctctttagtttaattagatcccatttgtcaattttggctttggttgccattgcttttggtgttttagacatgaagtccttgcccatgcctatgtcctgaatggtaatgcctaggttttcttctagggtttttatggttttaggtctaatgtttaagtctttaatccatcttgaattgatttttgtataaggtgtaaggaagggatccagtttcagctttctacatatggctagccagttttcccagcaccatttattaaatagggaatcctttccccattgcttgtttttctcaggtttgtcaaagatcagatagttgtagatatgcagcgttatttctgagggctctgttctgttccattgatctatatctctgttttggtaccagtaccatgctgttttggttactgtagccttgtagtatagtttgaggtcaggtagtgtgatgcctccagctttgttcttttggcttaggattgacttggcgatgcaggctctattttggttccatatgaactttaaagtagttttttccaattctgtgaagaaagtcattggtagcttgatggggatggcattgaatctgtaaattaccttgggcagtatggccattttcatgatattgattcttcctacccatgagcatggaatgttcttccatttgtttgtatcctcttttatttccttgagcagtggtttgtagttctccttgaagaggtccttcacatcccttgtaagttggattcctaggtattttattctctttgaagcaattgtgaatgggagttcactcatgatttggctctctgtttgtctgttgttggtgtttaagaatgcttgtgatttttgtacattgattttgtatcctgagactttgccgaagttgcttatcagcttaaggagattttgggctgagacaatggggttttctagatatacaatcatgtcatctgcaaacagggacaatttgacttcctcttttcctaattgaataccctttatttccctctcctgcctaattgccctggccagaacttccaacactatgttgaataggagtggtgagagagggcatccctgtcttgtgccagttttcaaagggaatgcttccagtttttgcccattcagtatgatattggctgtgggttcgtcatagatagctcttattattttgagataagtcccatcaatacctaatttattgagagtttttagcatgaagggttgttgaattttgtcaaaggccttttctgcatctattgagataatcatgtggtttttgtctttggttctgtttatatgctggattacatttattgatttgcatatattgaaccagccttgcatcccagggatgaagcccacttgatcatggtggataagctttttgatgtgctgctggatttggtttgccagtattttattgaggatttttgcatcaatgttcatcaaggatattggtctaaaattctcttttttggttgtgtctctgcccggctttggtatcaggatgatgctggcctcataaaatgagttagggaggattccctctttttctattgattggaatagtttcagaaggaatggtaccagttcctccttgtacctctggtagaattcggctgtgaatccatctgatcctggactctttttggttggtaagttattgattattgccacaatttcagctcctgttattggtctattcagagattcaacttcttcctggtttcgtcttgggagagtgtatgtgtcgaggaatttatccgtttcttctagattttctagtttatttgcgtagaggtgtttgtagtattctctgatggtagtttgtatttctgtaggatcggtggtgatatcccctttatcattttttattgcatctatttgattcttctcgctttttttctttgttagtcttgctagcggtctatcaattttgttgatcctttcaaaaacccagctcctggattcgttaattttttgaagggttttttgtgtctctatttccttcagttctgctctgattttagttatttcttgccttctgctagcttttgaatgtgtttgctcttgcttttctagttcttttaattgtgatgttagggtgtcaattttggatctttcctgctttctcttgtgggcatttagtgctataaatttccctctacacactgctttgaatgcatcccagagattgtggtatgttgtgtctttgttctcattggtttcaaagaacatctttatttctgccttcatttcgttatgtacccagtagtcattcaggagcaggttgttcagtttccatgtagttgagcagttttgagtgagattcttaatcctgagttctagtttgattgcactgtggtctgagagatagtttgttataatttctgttcttttacatttgctgaggagagctttacttccaagtatgtggtcaattttggaataggtgtggtgtggtgctgaaaaaaatgtatattctgttgatttggggtggagagttctgtagctatctatgaggtccgcttggtgcagagctgagttcaattcctgggtatccttgttgactttctgtctcgttgatctgtctaatgttgacagtgggatgttaaagtctcccattattaatgtgtgggagtcgaagtctctttgtaggtcactcaggacttgctttatgaatctgggtgctcctgtattgggtgcatatatatttaggatagttagctcttcttgttgaattgatccctttaccattaagtaatggccttctttgtctcttttgatctttgttggtttaaagtctgttttatcagagactaggattgcaacccctgcctttttttgttttccatttgcttggtagatcttcctccatccttttattttgagcctatgtgtgtctctgcacgtgagatgggtttcctgaatacagcacactgatgggtcttgactctttatccaatttgccagtctgtgtcttttaattggagcatttagtccatttacaatttaaagttaatattgttatgtgtgaatttgatcctgtcattatgatgttagctggttattttgcttgttagttgatgcagtttcttcctagtctcgatggtctttacattttggcatgttttgcagcggctggtaccggttgttcctttccatgtttagcacttccttcaggagctcttttagggcaggcctggtggtgacaaaatctctcagcatttgcttgtctgtgaagtattttatttctccttcacttatgaagcttagtttggctggatatgaaattctggattgaaaattcttttctttaagaatgttgaatattggcccccactctcttctggcttgtagagtttctgccgagagatctgctgttagtctgttgggcctccttttgagggtaacccgatctttctctctggctgcccttaacattttttccttcatttcaactttggtgaatctgacaattatgtgtcttggagttgctcttctcgagaagtatctttgtggcgttctctgtatttcatgaatctgaatgttggcctgccttgctagattggggaagttctcctggataatatcctgcagagtgttttccaacttggttccattctccccgtcactttcaggtacaccagtcagacgtagatttggtcttttcacatagtcccatatttcttggaggctttgctcgtttctttttattcttttttctctaaacttcccttctcacttcatttcattcatttcatcttccatcactgataccctttcttccagttgatcgcatcggctcctgaggtttctgcattcttcacgtagttctcaagccttggttttcagctccatcagctcctttaagcacttctctgtattggttattctagttatacattcttctaaatttttttcaaagttttcaacttctttgcctttggtttgaatttcctcccgtagctcggagtaatttgatcgtctgaaggcttcttctctcagctcgtcaaagtcattttctgtccagctttgttctgttgctggtgaggaactgcgttcctttggaggaggagaggctctctgctttttacagtttccagtttttctgctctgttttttccccatctttgtggttttatctacttttggtctttgatgatggtgacgtatagatggggttttggtgtggatgtccttcctgtttgttagttttccttctaacagacaggaccctcagctgcaggtctgttggagtacccggccgtgtgaggtgtcagtctgcccctgctagggggcgcctcccagttaggctgctcgggggtcaggggtcagggacccacttgaggaggcagtctgcccgttctcagatctccagctgtgtactgggagaaccactgctctcttcaaagctctcagacagggacatttaagtctgcagaggttactgctgtctttttgtttgtctgtgccctgcccccagaggtggagcctacagaggcaggcaggcctccttgagctgtggtgggctccacccagttcgagcttcccggctgttttgtttacctaagcaagcctgggcaatggcgggcgccccttccccagcctcgttgccgccttgcagtttgatctcagactgctgtgctagcaatcagcgagactccgtgggcgtaggaccctccgagccaggtgggggatataatctcgtggtgcgccgttttttaagcccgtcggaaaagcgcagtattcgggtgggagtgacccgattttccaggtgccgtctgtcaccactttctttcactaggaaagggaactcttgcgcttcccagtgaggcaatgcctcgccctgcttcaccttgtgcacggtgcgcgcacccactgacctgcacccactgtctggcacttcctagtgagatgaacccggtacctcagatggaaatgcagaaatcacccgtcttctgcgtcgctcacgctgggagctatagactggagctgttcctattcggtcatcttggc

SEQ ID NO: 10573 - DNA, 6245 bp, Homo sapiens
ttttttgtgcttttagtagagacgggttttcactgtgttagccaggatggtctcgatctcctgacctcgtgatccgcccgcctcagcctcccaaagtgctgggattacaggcgtgagccaccacgcccagccaaaagattctttttttttgaaaatatgcaagatgtaaatatttttcttttatttatttatttatttatttatttatttattattatactttaagttttagggtacatgtgcacattacgcaggttagttacatacgtatacatgtgccatgctggtgtgctgcacccactaactcgtcatttagcattaggtatatcgcccaatgctatccctcccccctccccccaccccacaacagtccccagagtgtgatgttccccttcctgtgtccatgtgatctcattgttcaattcccacctatgagtcagaatatgcggtatttggttttttgttcttgtgatagtttactgagaatgatggtttccaatttcatccatgtccctacaaaggacatgaactcatcattttttatggctacatagtattccatggtgtatatgtgccacattttcttaatccagtctatcattgttggacatttgggttggttccaagtctttgctattgtgaataatgccgcaataaacatacgtgtgcatgtgtctttatagcagcatgatttatagtcctttgggtatatacccagtaatgggatggctgggtcaaatggtatttctagttctagatccctgaggaatcgccacactgacttccacaatggttgaactagtttacagtcccaccaacagtgtaaaagtgttcgtatttctccacatcctctccaccacctgttctttcctgacttttcaatgatcgccattctaactggtgtgagatagtatctcattgtggttttgatttgcatttctctgatggccagtgatggtgagcattttttcatgtgttttttggctgcataaatgtcttcttttgagaagtgtctgttcatgtccttcgcccactttttgatggggttgtttgtttttttcttgtaaatttgtttgagttcattgtagattctggatattagccctttgtcagatgagtaggttgcaaaaattttctcccattttgtaggttgcctgttcactctgatggtagtttcttttgctgtgcagaagctctttagtttaattagatcccatttctcaattttgtcttttgttgccattgcttttggtgttttaaacatgaagtccttgcccatgcctatgtcctgaatggtaatgcctaggttttcttctagggtttttatggttttaggtctaacgtttaagtctttaatccatcttgaattgatttttgtataaggtgtaaggaagggatccagtttcagctttctacatatggctagccagttttcccagcaccatttattaaatagggaatcctttccccattgcttgtttttctcaggtttgtcaaagatcagatagttgtagatatgcggcgttatttctgagggctctgttctgttccattgatctatatctctgttttggtaccagtaccatgctgttttggttactgtagccttgtagtatagtttgaagtcaggtagtgtgatgcctccagctttgttcctttggcttaggattgacttggcaatgggggctcttttttggttccatatgaactttaaagtagttttttccaattctgtgaagaaaggcattggtagcttgatggggatggcactgaatctgtaaattaccttgggcagtatggccattttcacgatattgattcttcctacccatgagcatggaatgttcttccatttgtttgtatcctcttttatttccttgagcagtggtttgtagttctccttgaagaggtccttcacatcccttgtaagatggattcctaggtattttattctctttgaagcaattgtgaatgggagttcactcatgatttggctctctgtttgtctgttattggtgtataagaatgcttgtgatttttgcacattgattttgtgtcctgagactttgctgaagtcgcttatcagcttaaggagattttgggctgagacaatggggttttctagatatacaatcatgtcatctgcaaacagggacaatttgacttccttttttcctaattgaataccctttatttccttctcctgcctaattgccctggccagaacttccaacactatgttgaataggagtggtgagagagggcatccctgtcttgtgcccccctgtcttgtgcccgttttcaaagggaatgcttccagtttttgcccattcagtatgatattggctgtaggtttgtcatagatagctcttattattttgaaatatgtcccatcaatacctaatttattgagagtttttagcatgaaaggttgttgaattttatcaaaggccttttctgcatctattgagataatcatgtggtttttgtctttggctctgtttatatgctggattacatttattgatttgcgtatattgaaccagccttgcatcccagggatgaagcccacttgatcatggtggataagctttttgatgtgctgctggatttggtttgccagtattttattgaggatttttgcatcaatgttcatcaaggatattggtctaaaattctcttttttggttgtgtctctgcccggctttggtatcagaatgaagctggcctcataaaatgagttagggaggattccctctttttctatcaattggaatagtttcagaaggaatggtaccagttcctccttgtacctctggtagaattcggctgtgaatccatctggtcctggactccttttggttggtaagctactgattattgccacaatttcagatcctgttattggtctattcagagattcaacttcttcctggtttagtcttgggagagtgtatgtgtcaaggaatttatccatttcttctagattttctagtttatttgcatagaggtgtttgtagtattctctgatggtagtttgtatttctgtgggatcggtggtgatatcccctttatcattttttattgcatctatttgattcttctctctttttttctttattagtcttgttagcagtctatcaattttgttgatcctttcaataaaccagctcctggattcatcaattttttgaagggttttttgtgtctctatttccttcagttctgctctgattttagttatttcttgccttctgctagctttggaatgtgtttgctcttgcttttctagttcttttaattgtgatgttagggtgtcaattttagatctttcctgctttctcttgtgggcacttagtgctataaatttccctctacacactgctttgcatgcgtcccagagattctggtatgttgtgtctttgttctcattggtttcaaagaacatctttatttctgccttcatttcgttatgtacccagtagtcattcaggagcaggttgttcagtttccatgtagttgagtggttttgagtgagattcttaatcctgagttctagtttgattgcactgtggtctgagagatagtttgttataatttctgttcttttacatttgctgaggagagctttacttccaactatgtggtcaattttggaataggtgtggtgtggtgctgaaaaaaatgtatattctgttgatttggggtggagagttctgtagatgtctattaggtccgcttggtgcagagctgagttcaattcctgggtatccttgttgactttctgtctcgttgatctgtctaatgttgacagtggggtgttaaagtctcccattattaatgtgtgggagtctaagtctctttgcaggtcactcaggacttgctttatgaatctgggtgctcctgtattggatgcatatatatttaggatagttagctcttcttgttgaaatgatccctttaccattatgtaatggccttgtctcttttgatctttgttggtttaaagtctgttttatcagagactaggattgcaacccctgcctttttttgttttccatttgcttggtagatcttcctccatccttttattttgagcctatgtgtgtctctgcacatgagatgggtttcctgaatacagcacactgatgggtcttgactctttatccaatttgccagtctgtgtcttttagttggagcatttagtccatttacatgtaaagttaatagtgttatgtgtgaatttgatcctgtcattatgatgttagctggttattttgctcgttagttgatgcagtttcttcctagtctcgatggtctttacattttggcatgattttgcagcggctggtaccggttgttcctttccatgtttagcgcttccttcaggagctcttttagggcaggcctggtggtgacaaaatctctcagcatttgcttgtctgtaaagtattttctttctccttcacttctgaagcttagtttggctggatatgaaattctggattgaaaattcttttctttaagaatgttgaatattggcccccactctcttctggcttgtagggtttctgcagagagatccgctgttagtctgatgggcttccctttgagggtaacccgacctttctctctggctgcccttaacattttttccttcatttcaactttggtgaatctgacaattatgtgtcttggagttgctcttctccaggagtatctttgtgccgttctctgtatttcctgaatctgaacgttggcctgccttgctagattggggaagttctcctggataatatcctgcagagtgttttccaacttggttccattctccccatcactttcaggtacaccaatcagacgtagatttggtctcttcacatagtcccatatttcttggaggctttgctcgtttctttttattcttttttctctaaactttccttctcgcttcatttcattcatttcatcttccattgctgataccctttcttccagttgatcacgtcggctcctgaggcttctgcattcttcacgtagttctcgagccttggttttcagctccatcagctcctttaagcacttctctgtattggttattctagttatacattcttctaaatttttttcaaagttttcaacttctttgcctttggtttgaatgtcctcccgtagctcagagtaatttgatcgtctgaagccttcttctctcagctcgtcaaagtcattctctgtccagctttgttctgttgctggtgaggagctgcgttcctttggaggaggagaggcgctctgatttttagagtttccagtttttctgttctgttttttccccatctttgtggttttatctacttttggtctttgatgatggtgatgtacagatgggtttttggtgtggatgtcctttctgtttgttagttttccttctaacagacaggaccctcagctgcaggtctgttggagtaccctgcagtgtgaggtgtcagtgtgcccctgctggagggtgcctcccagttaggctgctcgggggtcaggggtcagggacccacttgaggagggagtctgcccattctcagatctccagctgcgtactgggagaaccactgctctcttcaaagctgtcagacagggacacttaagtctgcagaggttactgctgtctttttgtttgtctgtgccctgcccccagaggtggagcctacagaggcaggcaggcctccctgagctgtggtgggctccacccagttcgagcttccaggatgctttgtttacctaatcaagcctgggcaatggtaggcgcccctcccccagcctcgctgccaccttgcagtttgatctcagactgctgtgctagcaatcagcgagactccgtggggtaggaccctccgagccaggtgggggatataatctcgtggtgcgccattttttaagcccgtcggaaaagcgcagtattcgggtgggagtgacctgattttcccggtgctgtctgtcaccccttctttgattaggaaagggaactaactccctgactccttgcgcttcccaagtgaggcaatgcctcgccctgcttcggctggcgcagggtgcgcgcacccactgacctgcgcccactgtctggcactccctagtgagatgaacccggtacctcagatggaaatgcagaaatcacccgtcttctgtgtcgctcaggctgggagctgtagaccagagctgttcctattcggccatcttggctcctcccc

SEQ ID NO: 10574 - DNA, 4832 bp, Homo sapiens
tgttaatttttttttattatactttaagttttagggtacatgtgcacaaagtgtaggtttgctacatatgtacacatgtgccatgttggtgtgctgcacccattaactcctcatttaacattaggtatatctcctaatgctatccctaccccctccacccaccccacaacagtccccagtgtgtgatgttccccttcctgtatccatgtttcctcattgttcaattcccacctatgagtgagaacatgtggtgtttggttttttcccttgcaatagtttgctgagaatgatggtttccagcttcatccatgtccctacaaaggacatgaactcatcattttttatggctgcatggtattccatggtgtatatgtgccacattttcttaatccagtctatcattgttggacatttgggttggttccaagtctttgctattgtgaatagtgccacaataaacatacgtgtgtatgtgtcttttgagcagcatgatttgtaatcctttgggtatatacccagtaatgggatggctgggtcaaatggtatttctagttctagatccctgaggaatcaccacactgacttccacagtggttgaactagtttacagtcccatcaacagtataaaagtgttcctatttctccacatcttctccagcacctgttgtttcctgactttttaatgatcgccattctaactggtgtgagatggtatctcattgtggttttgatttgcatttctctgatggccagtgatgatgagctttttttcatgtgtcttttggctgcataaatgtcttcttttgagaagtgtctgttcatttcctttgcccacattttgatggggttgtttgttttcttcttgtgaatttgtttgagttcattgtagattctggatattagccatttgtcagatgagtaggttgcaaaacttttctcccattctgtaggatgtctattcactctgatgatagtttcttttgctgtgcagaagctccttagtttaattagatcccatttgtcaattttgtcttttgttgccattgcttttggtgttttagacatgaagtccctgcccatgcctatgtcctgaatggtattgcctaggttttcttctagggtttttatggttttaggtctaacatgtaagtctttaatccatcttgaattaatttttgtataaggtgtaaggaagggatccagtttcagctttctacatatggctagccagttttcccagcaccatttattaaatagggaatcctttccctatttcttgtttttgtcaggtttttcaaagatcagatagttgtagatatgtggcattatttctgagggctctgtcctgttccattggtctatatctctgttttggtactagtaccatgctgttttggttactgtagccttgtagtatagtttgaagtcaggtagcatgatgcctccagctttgttcttttgccttagaattgatttggcaatgcaggctcttttttggttccatatgaactttaaagtagtttttttccaattctgtgaagaaagtctttggtagtttgatggagatggcattgaatctttaaattaccttgggcagtatggccattttcaagatattgattcttcctacccatgagcatggaatgttcttccatttgtttgtatccttttttatttcattgagcagtgatttgcagttctccttgaagaggtccttcacatcccttgtaagtggtattcctaggtattttattctctttgaagcaattgtgaatgggagttcactcatgatttggctctctgtttgtctgttattggtgtataagaatgcttgtgatttttgcacattgattttgtatcctgagactttgctgaagttgtttatcagcttaacgagattttgggctgagatgatggggttttccacattcacaatcatgtcatctgcaaacagggacaatttgactgcctcttttcctaattgaatgccctttatttccttttccttcctgattgccctggccagaacttccaacactatgttgaataggagtggtgagagagggcatccctgttttgtgccagttttcaaagggaatgcttccagtttttgccattcagtatgatattggctgtgggtttgtcatagatagctcttattattttgagatacgttctatcaatccctaatttattgacagtttttagcatgaagatttgctgaattttgtcaaaggacttttctgcgtctattgagataatcatgtggtttttgtctttggtcctgtttatatgctggattacgtttactgattttcatatgttgaaccagcctttcatcccagggatgaaacccgcttgatcatggtggataagctttttgatgtgttgtaggattctgtttgccagtattttattgaggatttttgcatcactgttcatcaaggatattggtctaaaattctctttttttgttttgtctctgccaggctttggtatcaggatgatactggcctcataaaatgagttagggaggattccctctttttctattgattggaatagtttcagaaggaatggtaccagctcctccttgtgccactggtagaatttggctgtgaatccatctggtcctggactttttttggttggtaagctattaattattgcctcaatttcagagcctgttattggtctattcagagattcagcttcttcctggtttagtcttgggagagtatacgtgtcgaggaatttatccatttcttctatattttctagtttatttgtgtagaggtgtttatagtattctctgatggtagtgtgtatttctgtgggatcggtggtgatatcccctttgtcaatttttattgcatctatttgattcttctttcttttcttctttattagtcttgctggtggtctatcaattttgttgatcttttcaaaaaaccagctcctggattcattgattttttgagggttttttgtgtctctatttccttcagttctgctctgatctaagttacttcttgccttctgttatcttttgaatgtgtttgttcttgcttctctagttcttttaattgtgatgttaggatgtcaattttagttctttcatgctttctcttgtgggcatttagtgctataaatttccctccacacactgctttgaatgtgtcccagagatactggtatgttgtgtctttgttcttgttggtttcaaataaaatctttatttctgccttcatttcgttatgtacccagtagtcattcaggagcaggttgttcagtttccatgtagttgagtggtcttgagtgagtttttaaatcctgagttgtagtttgattgcactgtgttccgagagacagtttgttatactttctgttcttttacatttgctaaggagtgctttacttccaattatgtgctcaattttggaataggtgtggtgtggtgctgaaaagaatacatattctgttgatttggggtacagagttctgtagatgtctattaggtctgcttagggcagagctgagttcaattcctgtatatccttgttaactttctgtctcgttgatctgtctaatgttgacagtggggtgttaaagtctcccattattattgtgtggaagtctaaatcactttgtaggtcactaaggacttgctttatgaatctgggtgcttctgtattgtgtgcatatatatttagaatagttagttcttgttgaattgatccctttaccattatgtaatggccttctttgtctcttttgatctttgttggattaaagtctgttttatccgagactaggattgcaacccctgcctttttttgttttccatttgcttggtagatcttcctccatccctttattttgagcctatgtgtgtctctgcacgtgagatgggtttcctggatacagcacactgatgggtcttgactctttatccaatttgcctgtctgcaccttttaattggagcatttaacccatttacatttaaggttagtattgttatgtgtgaatttgatcctgtcattatgacgttagctggttattttcctcgttagtttatgcagtttcttcctagccttgatggtctttacaatttggcatggttttacagtggctggtaccagttgttcctttccatgtttagtgcttccttcaggagatcttttagggcaggcctggtggtgacaaaatctctcagcatttgcttgtctgtggagcatattatttctccctcacttatgaaggttagtttggctggatatgaaattctgggttgaaaattctttcctttaagaatgttgaatattggcccctactctcttctggcttatagagtttctgcagagagatcagcagttagtctgatgggcttccttttgtgggtaacccgacctttctctctggctgcctttaaaattttttctttcatttcaactttggtgaatctggcaattatgtgtcttggaattgctcttctcgaggagtatctttgtggcattctctgtatttcctgaatgtgaatgttggcctgccttgctagattggggaagttctcctggataatatcctgcagagtgttttccaacttggttccattctccccgtcactttcaggtaaaccaaatagacgtagatttgttctattgacatagtcccatatttcttggaggctttgttcatttctttttattcttttttctctaaacttctcttcatgcttcatttcattcatttcatcttccatcgctgataccctttcttcccgttgatcacatcggttactgaggcttatgcatttgtcgtgtagttctcg

SEQ ID NO: 10575 - DNA, 8371 bp, Homo sapiens
tttttttttttttttttttttttttttttttaagacagagtctctgtcacccaggctggagggcagtggcacgatcttggctcattgcaacctccgcctcccaggttcaagcgattctcgtgcctcagcctcccaaacacctggggattacaggtgcccaacaccaggcccagctaatttttatatttctagtagagatggggtttcatcatgttggccaggcttgtcttgaactcctgacctcagatgatccaacagcctcagcctcccaaagtgttcagattaaggcgtgagctaccgcgcccagccagacagatcttgatgtgagttcttgttttgctaccgactagcatgggcaagttatacaacccttgtagatctctattctttcatctcaaaacagactaactttaccctcttcatagagttatcatgagaataaatgatagaatgcaactgaagtgcttgcaagagtatgtggcacatagtaagtgttcagtatgcaccagctattgcattattatcttagatcttagaggagaagtaacttgcctgagtcacccagttagagctagagccagggctagaatctaggcttcctgacaccatgcctgggtgctttctactatcccatggcattgtgaaagctgcttgtgacgatctaatatggctgttggctgggatggatgcagggggtgcttacaaatactgggcagtaaaaaatgagaaatgtggctgggactggtggctcacacctgtaatcccagtgctttgggaggccgaggcaggcaaattgcctgaggtcaggagtttgagaccagcctggccaacatggtaagactctatctctactaaaaatacaaaaattagctgggcatggtggcgcatggctatagtcccagctactcaggaagctgaggcaggagaatcacttgaacctgggaggcagatgtggcagtgagccaagatcatgccactgcattccagcctgggggacagaatgagactccatctcaaaaaaaaagagagagagaaatgtggatccaaattctatcttggccttcactggcctatgttgacctagatgggaggagccacttgaagcatctctctgactcttttctcttctcagagagaagtggtccatctgagtaagtttccagggcaccagtcagaatgcattagtaacagggggtagaccatgtcctaaagtccgtggatatgggcgtagctgggtctctcttatcacttccacccaaggggatggaggaataaatttacccccaggtaggtacctccagaggtttcttttctttcgctttgttttttttgagatggagtttcactcttatctcctaggctgagtgcaacggcgctatctccggccaccacaacctctgcctcccacattcaactgattcttctgccttagcctcctgagcagctgagtgggattacaggtacatgccaccatgcccggctaatttttgtatttttagtagagatggggtttcaccacattggacaggctgatctcgagctcctgacctcaggtgatttgcccaccttggcctcccaaagtgctgggattataggtgtgagccgccacacccggcccagaggtttctattctaaaaagcacaccccacatgtatatctgctggcatttaccttgagattgtcgggcagttcagccctgccagcatacccggggttcatggtgatgaacacagcgcaggttgggttcagagagagctcagtcccttcaaagatgaatgtctttagcttccgaatgatggcttgttggatgctgaggatctgctgagcgaccacagacagcacttctacctggggtgagaatgcccggctgataagagcatctgcttctgtctgacaaccaccctactctaccggagtcctcccacatagcaaagaaagaacccaatcacccaaaaaccgcacctgcacattcaaaattaggagcatgatttggggttttggtaagaaaaaagaatataggtttgtgcatgtgtgcatgtgcgtgtgtgtgtgtgttaatagtttccatagtactttatctttgtttcaacacctagcatagtacttgacacacagtaggtattctgtgtttattggttcaaagatcagggatttttatatttcctgatctttattcatcatccaaagagaattatacactcttttgtgatgcatcttttgtacttctactatagacttttagcacgttggtatttgtttcattaaattttttatttccctttactagatcgcaacagtctagacagcaagatcttttttcttttttttaattattatactttaagttttagggtacacgtgcacattgtgcaggttacatatatatacatgtgccatgctggtgcgctgcacccactaactcgtcatctagcattaagtatatctcccgatgctatccctccccactcccaccaccccacaacagtccccagagtgtgatattccccttcctgtgtccatgtgatctcactgttcagttcccacctatgagtgagaatatgcggtgtttggttttttgttcttgcgatagtttactgagaatgatgatttccaatttcatccatgtacctacaaaggacatgaactcatcattttttatggctgcatagtattccatggtgcatatgtgccacattttcttaatccagtctatcattgttggacatttgggttggttccaagtctttgctattgtgaataatgctgcagtaaacatacgtgtgcatgtgtctttatagcagcatgatttatagtcatttgggtatatacccagtaatgggatggctgggtcaaatggtatttccagttctagatccctgaggagtcgccacactgacttccacaatggttgaactagtttacagtcccaccaacagtgtaaaagtgttcctatttctccacatcctctccagcacctgttgtttcctgactttttaatgattgccattctaactggtgtgagatggtatctcattgtggttttgatttgcatttctctgatggccagtgatgatgagcattttttcatgtgtcttttggctgcataaatgtcttcttttgagaagtgtctgttcatgtcctttgcccactttttgatggggttgtttgtttttttcttgtaaatttgtttgagttcattgtagattctggatattagccctttgtcagatgagtaggttgcaaaaattttctcccattttgtaggttgcctgttcactctgatggtagtttcttttgctgtgcagaagctctttagtttaattagatcccatttgtcaattttgtcttttgttgccattgcttttggtgttttagacatgaagtccttgcccatgcctatgtcctgaatggtaatgcttaggttttcttctagggtttttatggttttaggtctaacgtttaagtctttaatccatcttgaattgatttttgtataaggtgtaaggaagggatcaagtttcagctttctacatatggctagccagttttcccagcaccatttattaaatagggaatcctttccccattgcttgtttttctcaggtttgtcaaagatcagatagttgtagatatgcggcattatttctgagggctctgttctgttccattgatctatatctctgttttggtaccagtaccatgctgttttggttactgtagccttgtagtatagtttgaagtcaggtagggtgatgcctccagctttgttcttttggcttaggattgacttggcgatgcgggctcttttttggttccatatgaactttaaagtagttttttccaattctgtgaagaaagtcattggtagcttgatggggatggcattgaatctgtaaattaccttgggcagtatggccattttcatgatattgattcttcctacccatgagcatggaatgttcttccatttgtttgtgtcctcttttattttgttgagcagtggtttgtagttctccttgaagaggtccttcacatcccttgtaagttggattcctaggtattttattctctttgaagcaattgtgaatgggagttcactcatgatttggctctctgtttgtctgttgttggtgtataagaatgcttgtgatttttgtacattgattttgtatcctgagactttgctgaagttgcttatcagcttaaggagattttgggctgagacaatggggttttctagatatacaatcatgtcgtctgcaaacagggacaatttgacttcctcttttcctaattgaataccctttatttccttctcctgcctaattgccctgggcagaacttccaacactatgttgaataggagtggtgagagagggcatccctgtcttgtgccagttttcaaagggaatgcttccagtttttgcccattcagtatgatactggctgtgggtttgtcatagatagctcttattattttgaaatacgtcccatcaatacctaatttattgagagtttttagcatgaagggttgttgaattttgtcaaaggctttttctgcatctattgagataatcatgtggtttttgtctttggctctgtttatatgctggattacatttattgatttgcggatattgaaccagccttgcatcccagggatgaagcctacttgatcagggtggataagctttttgatgtcctgctggattcggtttgccagtattttattgaagatttttgcatcgatgttcatcaaggatattggtctaaaattctctttttttgttgtgtctctgcctggctttggtatcagaatgatgctggcctcataaaatgagttagggaggattccctctttttctattgattggaatggtttcagaaggaatggtaccagttcctccttgtacctctggtagaattcggctgtgaatccatctggtcctggactctttttgattggtaagctattgattattgccacaatttcagctcctgttattggtctattcagagattcaacttcttcctggtttagtcttgggagagtgtatgtgtccaggaatttatccatttcttctagattttctagtttatttgcgtagaggtgtttgtagtattccctgatggtagtttgtatttctgtgggatcggtggtgatatcccctttatcattttttattgtgtctatttgattcttctctctttttttctttattagtcttgctagcagtctatcaattttgttgatcctttcaaaaaaccagcttctggattcattaattttttgaagggttttttgtgtctctatttccttcagttctgctctgattttagttatttcttgccttctgctagctttcgaatgtgtttgctcttgcttttctagttcttttaattgtgaagttagggtgtcaattttggatctttcctgctttctcttgtgggcatttagtgctataaatttccctctacacactgctttgaatgcgtcccagagattctggtatgttgtgtctttgttctcgttggtttcaaagaacatctttatttctgccttcatttcgttatgtacccagtagtcattcaggagcaggttgttcagtttccatgtagttgagcggttttgagtgagattcttaatcctgagttctaatttgattgccctgtggtctgagagatagtttgttataatttctgttcttttacatttgctgaggagagctttacttcccagtatgtggtcaattttggaataggtgtggtgtggtgctgaaaaaaatgtatattctgttgatttggggtggagagttctgtagatgtctattaggtccgcttggtgcagagctgagttcaattcctgggtatccttgttgactttctgtctcattgatctgtctaatgttgacagtggggtgttaaagtctcccattattaatgtgtgggagtctaagtctctttgtaggtcactcaggacttgctttatgaatcttggtgctcctgtattgggtgcaaatatatttaggatagttagctcttcttgttgaattgatccctttaccattatgtaatggccttctttgtctcttttgatctttgttggtttaaagtctgttttatcagagactaggattgcaacccctgcctttttttgtttttcattggcttggtagatcttcctccatccttttattttgagcctatgtgtgtctctgcatgtgagatgggtttcctgaatacagcacactgatgggtcttgactctttatccaattttccagtctgtgtcttttaattggagcatttagtccatttacatttaaagttaatgttgttatgtgtgaatttgatcctgtcatgatgatgttagctggttattttgctcgttagttgatgcagtttcttcctagtctcgatggtctttacattttggcatgatttcgcagcggctggtaccggttgttcctttccatgtttagtgcttccttcaggagctcttgtaaggcaggcctggtggtgacaaaatttctcagcatttgcttgtctgtaaagtattttatttctccttcacttatgaagcttagtttggctggatatgaaattctgggttgaaaattcttttctttaagaatgttgaatattggcccccactctcttctggcttgtagggtttctgcagagagatccgctgttactctgacacgcttccctttgagggtaacccgacctttctctctggctgcccttaacattttttccttcatttcaactttggtgaatctgacaattatgtgtcttggagttgctcttctcgaggagtatctttgtggcattctctgtatttcctgaatctgaacgttggcctgccttgctagattggggaagttctcctggataatatcctgcagagtgttttccaacttggttccattctccccatcactttcaggtacaccaatcagacgtagatttggtcttttcacatagtcccatatttcttggaggctttgctcatttctttttattcttttttctctagacttcccttctcgcttcatttcattcatttcatcttccatcgctgataccctttcttccagttgatcgcaccggctcctgaggcttctgcattcttcacgtagttctctagccttggttttcagctccatcagctcctttaagcacttctctgtattggttattctagttatacattcttctaaatttttttcaaagttttcaacttctttgcctttggtttgaatgtcctcccatagctcagagtaatttgatcgtctgaagccttcttctctcagctcgtcaaagccattctccatccagctttgttccgttgctggtgaggaactgcgttcctttggaggaggagaggtgctctgctttttagagtttccagtttttctgttctgttttttccccatctttgtggttttatctacttttggtctttgatgatggtgatgtacagatgggtttttggtgtggatgtcctttctgtttgttagttttccttctaacagagaggaccctcagctgcaggtctgttggagtaccctgccgtgtgaggtgtcagtgtgcccctgctggggggtgcctcccagttaggctgctcgggggtcaggggtcagggacccacttgaggaagcagtctgcccgttctcagatctccagctgcgtgctgtgagaaccactcctctcttcaaagctgtcagacagggacatttaagtctgcagaggttactgctgtctttttgtttgtctgtgccctgcccccagaggtggagcctgcagaggcaggcaggcctccttgagctgtggtgggctccacccagttcgagcttccaggctgctttgtttacctaatcaagcctgggcaatggcgggcgcccctcccccagccaggctgccgtcttgcagtttgatctcagactgctgtgctagcaatcagcgagactccgtgggcgtaggaccctccgagccaggtgcaggatataatctcgtggtgccccgttttttaagcccatcagaaaagcgcagtattcgggtgggagtgacccgattttccaggtgccgtctgtcacccctttctttgactcagaaagggaactccctgaccccttgcgcttcccaggtgaggcaatgcctcgccctgcttcggctggcgcacggtgcacgcacccactgacctgcgcccactgtctggcactcccgagtgagatgaacccggtacctcagatggaaatgcagaaatcacccgtcttcttcgtcgctcacgctgggagctgtagaccggagctgttcctattcggccatcttggctcctccctccttttttttttttttaaacagag

SEQ ID NO: 10576 - DNA, 4958 bp, Homo sapiens
gttattttctttttttattttttattttattattattatactttaagttttaggatacatgtgcacaatgtgcaggttagttacatatgtatacatgtgccatgcggggtgtgctgcacccattaactcgtcatttagcattaggtatatctcctaaagctatccctcctccctccccccaccccacaacagtcctcagagtgtgatgttccccttcctgtgtccatgtgttctcattgttcaattcccacctatgagtgagaatatgcggtgtttggttttttgttcttgcgatagtttactgagaatgatgatttccaatttcatctatgtccctacaaaggacatgaactcatcattttttatggctgcatagtattccatggtgtatatgtgccacattttctttttttttttttttttttttgagacggagtctcgctctgtcgcccacccgggaggcggagcttgcagtgagccgagatcccgccactgcactccagccacattttcttaatccagtctatcattgttggacatttgggttggttccaagtctttgctattgtgaatagtgccgcaataaacatatgtgtgcatgtgtctttatagcagcatgatttatagtcctttgggtatatacccagtaatgggatggctaggtcaaatggtatttctagttctagatccctgaggaatggccacactgacttccacaatggttgaactagtttacagtcccaccaatagtgtaaaagtgttcctatttctccacatcctctccagcacctgtcgtttcctgactttttaatgattgccattctaactggtgtgagatggtatctcattgtggttttgatttgcatatctctgatggccagtgatggtgagcattttttcatgtgttttttggctgcataaatgtcttcttttgagaagtgtctgttcatacccttagcccactttttgatggggttgtttgtttttttcttgtaaatttgtttgagttcattgtagatactggatattagccccttgtcagatgagtaggttgcgaaaatgttctcccatgttgtaggttgcctgttcactctgatggtagttttttttgctgtgcagaagctctttagtttaattagatctcatttgtcaattttggcttttgttaccattgcttttggtgttttagtcatgaagtccttgcccatgcctatgtcctgaatggtattgcctagattttcttctagggtttttatggttttaaatctaacatttaagtctttaatccatcttgaattaatttttgtataaggcgtaaggaaaggatccagtctcagctttctacatatggctagccagttttcccagcaccatttattaaaaatggaatcctttccccatttcttgtttttgtcaggtttgtcaaagagcagatggttgtagatgtgtggtgttatttctgagggctctgttctgttccactggtctatacctctgttttggtaccagtaccatgctgttttggttactgcagccttgtagtatagttcgaagtcaggtagcatgatgcctccagctttgttctttttacttaggagtgtcttggcaatgtgggctcttttttggttccatatgaactttaaagtagtttttttccaattttgtgaagaaagtcattggtagcttgatgggaatggcattgaatctataaattaccttgggcagtatggacattttcatgacattgattcttcctatccgtgagcatggaatgttcttccatttgtttgtgtcctcttttatttcattgagcagtggtttgtagttctccttgaagaggtccttcacatcccttgtaagttggattcctaggtgttttattctctttgaagcaattgtgaatgagggttcactcatgagttggctgtctgtctgttattggtgtataggaatgcttgtgattttttgcacattgattttgtatcctgagactttgctgaagttgcttatcagcttaaggagattttgggctgagacagtggggttttctagatacacaatcatgtcatctgcaaacagggatgatttgacttcctcttttcctaattgaataccctttatttccttctcttgcctgattgccctggccagaacttccaacactatattgaataggagtggtgagagagggcatccctgtcttgtgctggttttcaaagggaatgcttccagttttcgtccattcagtatgatattggctgtgggttggtcataaatagctcttattattttgagatacgtcccatcaatacctagtttatttagagtttttagcatgaagggctgttgaattttgtcgaaggccttttctgcatctattgagataatcctgtggtttttgtctttggttctgtttatatgctggattacatttattgatttgcgtatgttgaaccagccttgcatcccagggataaagcccacttgatcttggtggataagctttttgatgtactgctggattcggtttgcccgtattttattgaggatttttgcatcgatgttcatcagggatattggtctaaaattctgttttttttgttgtgtctctgccaggctttggtatcaggatgatgctggcctcataaaatgagttagggaggattccctctttttctgttgattagagtagtttcagaaggaatggtaccagctcctctttgtacctctggtagaattcggctgtgaatccgtctgttcctggactttttttggttggtaggctattaattattgcctaatttcagagcctgttattggtctattcagggattcagcttcttcctggtttagtcttgggagggtgtatgtgttgaggaatttatctatttcttctagattttctagtttatttgcgtagaagtatttatagtattctctgatggtagtttgtatttctgtgggatcggtggtgatatcccctttataattttttattgcgtccatttgattcttctctcttttcttctttattagtcttgctagcagtctatcaattttgttgatcttttcaaaaaatcagctcctggattcattaattttttgaagggttttttgtgtctctatccccttcagttctgctctgatcttagttatttcttgccttctgctagcttttgaatgtgtttgctcttgcttctctagttcttttaattgtgatgttagggtgtcaattttagatcttgccggctttctcttatgggcatttagtgctacaaatttccctctacacaccgctttaaatgtgtcccagagattctggtactttgtgtctttattcttattggtttcacacaacatctttatttctgccttcatttcgttatgtacccagtagtcattcaggagcaggttgttcagtttccatgtagttgtgtagttttgagtgagtttcttaatcctgagttctaatttgattgcactgtggtctgagtgacagtttgttgtgatttctgttcctttatatttgatgaggagtgctttacttccaattatgtggtcagttttaaaataagttagatgtggtgctgagaagaatgtatattctgttgattttgggtggagagttctgtagatgtctattaggtccacttggtgcagagctgagttcaagtcctggatatccttgttaactttctgtcctgttcatctgtctaatattaacagtgaggtgttaaagtctcccattattattgtgtgggagtctaagtctctctgtaggtcactcaggacttgctttatgaatctgggtgctcctgtattgggtgcatatatgtttaggaaagttagctcttcttgttgaattgatccctttaccattatgtaatggccttctttgtctcttttgatctttgttggtttcaagtctgtttcatcagagactaggattgcaacccttgcttttttttttgctttccatttgcttggtagatcttcctccatccctttattttgagtctatgtgtgtctctgcacatgagatgggtctcctgaatacagcacggtgatgggtcttgattctttatccaatttgccagtctgtgtcttttaattggggcatttagcccatttacatttaaggttaacattgttatgtgtgaatttgatcctgtcattatgacgttagctggttattttgctcgttcgttgatgcagtttcttcctagcattgatggtctttataatttggcatgtttttgcagaggctggtaccaattttcctttccatgtttagtgcttccttcaggagctcttgtagggcaggcctggtggtgacaaaatctctcagcatttgcttgtctgtaaaggattttatttctccttcacttatgaagcttagtttggctggatatgaaattctgagttgaaaattcttttctttgagattgttgaacgttggactccactctcttctggcttgtagagtttctgccgagagatccgctgttagtctgatgggcttccctttgtgggtaacccgacctttctctctggctgcccttgacattttttccttcatttcaaccttggcgaatctgacaattatgtgtcctgaggttgctgttctcgaggagtatctttgtggtgttctctgtatttcgtgaatttgaatgttggcctgccttgtaggctggggaagttctcctggacaatatcctgaagagtgttttccaacttggttccattctccctgtcactttcaggtacaccaatcaaacgcagatttggtcttttcacatagtcccatatttcttggaggctttgttcatttatttttgcttttttctctaaacttctcttcttgcttcacttcattaatttgatcttcaatcactgataccctttcttccacttgatcgaattggctactgaagcttgtgcatgcgtcacgtagttct

SEQ ID NO: 10577 - DNA, 6180 bp, Homo sapiens
tttatggtcttaacttttttttttttattattatacattaagttttagggtacatgtgcacattgtgcaggttagttacatatgtatacatgtgccatgctggtgcactacacccactaactcgtcatctagcattaggtatatctcccaatgctgtccctcccctctcgccccaccccacaacagtccccagagtgtgatattccccttcctgtgtccatgtgatctcattgttcaattcccacctatgagtgagaatatgcggtatttgttttttgttcttgcgatagtttactgagaatgatgatttccaatttcatccatgtccctacaaaggacattaactcatcattttttatggctgcatagtattccatgttgtatatgtgccacattttcttaatccagtctatcattgttggacatttgggttggttccaagtctttgctattgtgaataatgccgcaataaacatacgtgtgcatgtgtctttatagcagcatgatttatagtcctttgggtatatacccagtaatgggatggctgggtcaaatggtatttgtagttctagatccctgaggaatcgccacactgacttccacaatggttgaactagtttacagtcccagcaacagtgtaaaagtgttcctatttctccacatcctctccagcacctgttgtttcctgactttttaatgattgccattctaactggtgtgagatggtatttcatagtggttttgatttgcatttctctgatggccactgatgatgagcattttttcatgtgttttttggctgcataaatgtcttcttttgagaagtgtctgttcatgtccttcacccactttttgatggcgttgtttgtttttttcttgtacatttgtttgagttcattgtagattctggatattagccctatgtcagatgagttggttgcaaaaattttctcccatgttgtaggttgcctgttcactctgatggtagtttcttttgctgtgcagaagctctttagtttaattagatcccatttgtcaattttgtcttttgttgccattgcttttggtgttttagacatgaagtccttgcccatgcctatgtcctgaatggtaatgcctaggttttcttctagggtttttatggttttaggtctaacgtttaaatctttaatccatcttgaattgatttttgtataaggtgtaagggagggatccactttcagcttcctacatatggctagccagttttcccagcaccatttattaaatagggaatcctttccccattgcttgtttttctcaggtttgtcaaagatcagatagttgtagttatgcggcgttatttctgagggctctgttctgttccattgatctatatctctgttttggtaccagtaccatgctgttttggttactgtagccttgtagtatagtttgaagtcaggtagtgtgatgcctccagctttgttcttttggcttaggattgacttggcaatgcgggctcttttttggttccatatgaactttaaagtagttttttccaattctgtgaagaaaatcattggtagcttgatggggatggcattgaatctgtaaattaccttgggcagtatggccattttcacgatattgattcttcctacccatcagcatggaatgttcttccatttgtttgtatcctcttttatttccttgagcagtggtttgtagttctccttgaagaggtccttcacatcccttgtaagttggattcctaggtattttattctctttgaagcaattgtgaatgggagttcactcatgatttggctctctgtttgtctgttgttggtgtataagaatgcttgtgatttttgtacattgattttgtatcctgagactttgctgaagttgcttatcagcttaaggagattttgggctgagacaatggggttttctagatatacaatcatgtcatctgccaacagggacaatttgacttcctcttttcctaattgaataccctttatttccttctcctgcctaattgccctggccagaacttccaacactatgttgaataggagtggtgagagagggcatccctgtcttgtgccagttttcaaagggaatgcttccaggttttgcccattcagtatgatattggctgtgggtttgtcatagatagctcttattattttgaaatacgtcccatcaatacctaatttattgagagtttttagcatgatgggttgttgaattttgtcaaaggctttttctgcatctattgagataatcatgtggtttttgtctttggctctgtttatatgctggattacatttcttgatttgcgtatattgaaccagccttgcatcccagggatgaagcccacttgatcatggtggataagctttttgatgtgctgctggattcggtttgccagtattttattgaggatttttgcatcaattttcatcaaggttattggtctaaaattctcttttttggttgtgtctctgcctgactttggtatcaggatgatgctggcctcataaaatgagttagggaggattccctctttttctattgattggaatagtttcagaaggaatggtaccagttcctccttgtacctctggtagaattcggctgtgaatctatctggtcctggactctttttggttggtaaactattgattattgccacaatttcagctcctgttattggtctattcagagattcaacttcttcctggtttagtcttgggagagtgtatgtgtcgaggaatttatccatttcttctagattttctagtttatttgcgtagaggtgtttgtagtattctctgatggtagtttgtatttctgtgggatcggtggtgatatcccctttatcattttttattatgtctatttgattcttctctctttttttctttattagtcttgctagcggtctatcaattttgttgatcctttcaaaaaaccagctcctggattcattgattttttgaagggttttttgtgtctctatttccttcagttctgctctgattttagttatttcttgccttctgctagcttttgaatgtgtttgctcttgcttttctagttcttttaattgtgatgttagggtgtcagttttggatctttcctgctttctcttgtgggcatttagtgctataaatttccctctacacactgctttgaatgcgtcccagagattctggtatgttgtgtctttgttctcattggtttcaaagaacatctttatttctgccttcatttcgttatgtacccagtagtcattcaggagcaggttgttcagtttccatgtagttgagcggctttgagtgggattcttaatcctgagttctagtttgattgcactgtggtctgagagatagtttgttataatttctgttcttttacatttgctgaggagagctttacttccaagtatgtggtcaattttggaataggtgtggtgtggtgctgaaaaaaatgtatattctgttgatttggggtggacagttctgtagatgtctattaggtctgcttggtgcagagctgagttcaattcctgggtatccttgttgactttctgtctcgttgatctgtctaatgttgacagtggggtgttaaagtctcccgttattaatgtgtgggagtctaagtctctttgtaggtcactcaggacttgctttatgaatctgggtgctcctgcattgggtgcatatatatttaggatagttagctcttcttgttgaattgatccctttaccattatgtaatggccttctttgtctcttttgatctttgttggtttaaagtctgttttatcagagactaggattgcaacccctgcctttttttgttttccatttgcttggtagatcttcctccatccttttattttgagcctatgtgtgtctctgcacatgagatggttttcctgaatacagcacactgatggatcttgactctttatccaatttgccagtctgtgtcttttaattggagaatttagtccatttatatttaaatttaatattgttatgtgtgaatttgatcctgtcattatgattatagctggtgattttgctcgttagttgatgcagtttcttcctagtctcgatggtctttacattttggcatggttttgcagtggctggtaccggttgttcctttccatgtttagtgcttccttcaggagctcttttagggcaggcctggtggtgacaaaatcggtcagcatttgcttgtctgtaaagtattttatttctccttcacttatgaagcttagtttggctggatatgaaattctgggttgaaaattcttttctttaagaatgttgaatattggcccccactctcttctggcttgtagggtttctgccgagagatctgctgttagtctgatgggcttccctttgagggtaacctgacctttctctctggctgcccttaacattttttccttcatttcaactttggtgaatctgacaattatgtgtcttggagttgctcttcttgaggagtatctttgtggcgttctctctatttcctgaatctgaacattggcctgccttgctagattggggaagttctcctggataatacatgcagagtgttttccaacttggttccattctccccatcactttcaggtacaccaatcagacgtagatttggtcttttcacatagtcccatatttcttggaggctttgctcatttgtttttattcttttttctctaaacttcccttctcgcttcatttcattcatttcatcttccattgctgataccctttcttccagttgatcgcattggctcctgaggcttctgcattcttcacgtagttctcgagccttggtttgcagctccatcagctcctttaagcacttctctgtattggttattctagttatacattcttctaaatttttttcaaagttttcaacttctttgccttcggtttgaatgtccttccatagctcagagtaattcgatcgtctgaagccttcttctctcagctcgtcaaagtcattctccatccagctttgttctgttgctggtgaggaactgcgttcctttggaggaggagagacgctctgtgttttagagtttccagtttttctgttctgttttttccccatctttgtggttttatctacttttggtctttgatgatggtgatgtacaggtgggtttttggtgtggatgtcctttctgtttgttagttttccttgtaacagacaggaccctcagctgcaggtctgttggaataccctgctgtgtgaggtgtcagtgtgcccctgctggggggtgcctcccagttaggctgctcgggggtcaggggtcagggacccacttgaggaggcagtctgcaggttctcagatctccagctgtgtgctgggagaaccactcctctcttcaaagctgtcagacagggacatttaagtctgcagaggttactgctgtctttttgtttgtctgtgccctgcccccagaggtggagcctacagaggcaggcagacctccttgagctgtggtgggctccacccagttcgagcttcctagctgctttgtttacctaagcaagcctgggcaatggcggacgcccctcccccagcctcgctgctaccttgcagtttgatctcagactgctgtgctagcaatcagcgagattccgtgggcataggaccctccgagccaggtgtgggatatagtctcgtggtgcgccgttttttaagccggtctgaaaagcgcaatattcgggtgggagtgacccgattttccaggtgcgtccgtcacccctttctttgactcggaaagggaactccctgaccccttgcgcttcccaggtgaggcaatgcctcgccctgcttcggctcgcgcacggtgcgctcacccactggcctgcgcccactgtctggcactccctagtgagatgcacccagtacctcagatggaaatgcagaaatcacccgtcttctgcgtcgctcacgctgggagctgtagactggagctgttcctattcggccatcttggctcctcctggtcttaacttttatgaactcttatacagccacttgtccaattttccaaaacagcaattctaaacttttctctccagctaattattaaacttaatatcctatcctgatgctattggaagattgtcactccagagac

SEQ ID NO: 10578 - DNA, 6703 bp, Homo sapiens
atatgttctttcttttttttttttttttttttttttttggagacagagtttcgctcttgttgcccaggctggagtgcaatggcacaatctcggctcaccgcaacctctgcctcccaggttcaagcaattctcctgcctcagcctcccgagtagctgggattacaggcatgtaccaccacgcctggctgattttgtatttttagtagagacggggtttctccatgttcaggctggtctcgagctcctgacctcaggtgatccgcccgcctcggcctcccaaagtgctgggattacaggcgtgagccaccgcgcccagccgggatatgttcttttattaataaaaactatatgctaattatggaaggaacattcataggactaataagagaataggcatgaacaaaaattttctaagactcctgacatccattaattagaaaaatacacttttcatgctggattatgaataagtaaagtttttagaatcataatatgttagaaccacaataaattttagaaattatgtagtatcaagcctcttttgcacattaaaaagctggtcatttagaatttttttttttttatactttaagttttagggtacatgtgcacaatgtgcaggttagttacatatgtatacatgtgccatgatggtgtgctgcacccattaactcgtcgtttagcattagttatatctcctaatgctatccctcgcccctcccccaactccacaacagcgccccagagtgtgatggtccccttcctgtgtccatgtgttctcattgttcaattcccatctatgagtgacaacatgcagtgtttggttttttgtccttgcgatagtttgctgagaatgatgatttccagtttcatccatgtccctgtaaaggacatgaactcatcattttttatcgctgcatactattccacggtgtacatgtgcccaattttcttaatccagtctgtcattccgggacatttgggttggttccaagtctctgctatcgtgaatagtgccgcaataaacatacgtgtgcatgtgtctctataccagcatgatctatagtcctttgagtatatacacagtaatgcgatggctgggtcaactggtacttctacgtctagactcctgaggaatcgccacactgacttccacaatggttgaactagtctacacgtccaccaacagtgtaaaagcgctcctatcttcccacactctctctagcacctgttgtctcctgactttctaatgattgccattctaactggtgtgagatggtatctcattgtggttttgatttgcatttctctgatggccagtgatgatgagcattttttcatgtgtcttttgactgcataaatgtcttcttctgagaagtgtctgttcatatcctttgcccactttttgatggggttgtttgtttttttcttgtaaatttgtttgagttcattgtagattctggatattagccctttgtcagatgagtaggttgcgaaaattttctcccattctgtagcttccctgttcactctgatggtagtttcttttgctgtgcagaagctccttagtttaattagatcccatttgtcaattttggcttttgttgccattgcttttggtgttttagacatgaagtccttacccatgcctatgtcctgaatggtaatgcctaggttttcttctagggtttttatggttttaggtctaacgtttaagtctttaatccatcttgaattaatttttgtataaggtgtaaggaagggatccagtttcagctttctacatatggctagccagttttcccagcaccatttattaaatagggaatcctttccccattgcttgtttttgtcaggtttgtccaaagatcagatagttgtagatatgtggcattatttctgagggctctgttctgttccattgatctatatctctgttttggtaccagtaccatgctgtttggttactgtggccttgtagtatagtttgaagtcaggtagcatgatgcctccagctttgttcttttggcttaggattgacttggtgatgcgggctcttttttggttccatatgaactttaaagtagttttttccaattctgtgaagaaagtcattggtagcttgatggggatggcattgaatctataaattaccttgggcagtgtggccattttcacgatattgattcttcctacccatgagcatggaatgttcttccatttctttgtatcctcttttatttcctcgagcagtagtttgtagttctccttgaagaggtccttcacgtcccttgtaagttggattcctaggtattttattctctttgaagcaattgtgaatgggagttcactcatgatttggctctctgtttgtctgttatcggtgtataagaatgcttgtgatttttgtacattgattttgtatcctgggactttgctgaagttgcttatcagcttaaggaagttttgggctgagacagtggggttttctagatatacaatcatgttgtctgcaaacagggacaatttgacttcctcttttcctaactgaataccctttatttccttctcctgcctgattgccctggccagaacttccaacactatgttgaataggagtgttgagagagggcatccctgtcttgtgccagttttcaaagggaatgcttccagtttttgcctattcagtatgatactggctgtgggtttgtcatagatagctcttattattttgagatatgtcccatcaatacctaatttattgagagtttttagcatgaaggttgttgaattttgtcaaaggccttttctgcatctattgagataatcatgtggtttttgtctttggttctgtttatatgctggattacatttattgatttgcatatattgaaccagccttgcatcccagggatgaagcccgcttgatcatggtggataagctttttgatgtgctgctggattcggtttgccagtattttattgaggatttttgcatcaatgttcatcaaggagattggtctaaaattctcttttttggttgtgtctctgcccggctttggtatcaggatgatgctggcctcataaaatgagttagggaggattccctctttttctattgattggaatagtttcagaaggaacggtaccagttcctccttgtacctctggtagaattcggctgtgaatccatgtggtcctggactctttttggttggtaagctattgattattgccacaatttcagatcctgttattggtctattcagagattcaacttcttcctggtttagtcttgggagggtgtatgtgtcgaggaatgtatccatttcttctagattttctagtttatttgcgtagaggtgtttgtagtattctctgatggtagtttgtatttctgtgggatcggtgctgatatcccctttatcattttttattgcgtctatttgattcttctctctttttttctttattagtcttgctagcggtctatcaattttgttcatccttccaaaaaaccagctcctgggttcattaatgttttgaagggtttttttatgtctctatttccttcagttctgctctgatcttagttatttcttgccttctgctagcttttgaatgtgtttgctcttgcttttctagttcttttaattgtgttgttagggtgtcaattttggatctttcctgctttctcttgtgggcatttagtgctataaatttccctctacacactgctttgaatgtgtcccagagattctggtatgttgtgtctttgttctcgttggtttcaaagaacatctttatttctgccttcatttcgttatgtacccagtagtcattcaggagcaggttgttcagtttccatgtagttgagcagttttgagtgagtttcttaatcctgagttgtagtttgattgcactgtggtctgagagacagtttgttataatttctgttcttttacatttgctgaggagagctttacttccaactatgtggtcaattatggaataggtgtggtgtggtgctgaaaagaatgtatattctgttgatctggggtggagagttgtgtaggtgtctattaggtccacttgttgcagagatgagttcaattcctgggtatccttgttaactttctgtcttgttgatctgtctaatgttgacagtggggtgtgaaagtctcccattattattgtgtgggcgtctaagtctctttgtaggtcactcaggacttgctttatgaatctgggtgctcctgttttgggtgcatatatatttaggatagttagctcttcgtgttgaattgatccctttaccattatgtaatggccttctttgtctcttttgatctttgttggtttaaagtctgttttatcagagactaggattgcaagccctgcctttttttgttttccatttgcttggtagatctccctccatccttttattttgagcctatgtgtgtctctgcacgtgagatgggtttcctgaatacagcacactgatgggtcttgactctttatccagtttgccagtctgtgtcttttaattggagcatttagtccatttacatttaaagttaatatcgttatgtgtgaatttgatcctgtcattatgatgttagctggttattttgctcattagttgatgcagtttcttcctagtctcaatggtctttacattttggcatgattttgcagcagctggtaccggttgttcttttccatgtttagtgtttccttcaggagctcttttagggcaggcctggtggtgacaaaatctctcagcatttgcttgtctgtaaagtattttatttctccttcacttatgaagcttagtttggctggatatgaaattctgggttgaaaattcttttctttaagaatgttgaatattggcccccactctcttctggcttgtagagtttctgccgagagaatcgctgttagtctgatgggcttcctttgtgggtaactgacctttctctctggctgctcttaacatttgtccttcatttaactttggtgaatctgacaattatgtgtcttggaattgctcttctcgaggagtatctttgtggcgttctctgtatttcctgaatctgaatgttggcctgcctcgctagattggggaagttctctttgataatatcctgcagagtgttttccaacttggttccattctccccgtcactttcaagtacaccaatcagacgtagatttggtcttttcacatagtcccatatttcttggatgctttgtttgtttctttttattcttttttctctaaacttcccttcttgcttcatttcattcatgtcatcttccatcactgataccctttcttccagttgatcgcatcggctcctgaggcttttgcattcttcacgtagttctcgagccttggctttcagctccatcagctcctttaagcacttctctgtattggttattctagttatacattcgcctaaatttttttcaaagttttcaacttctttgcctttggtttgaatttcctcccgtagctcggagtagtttgatcgtctgaagccttcctctctcaacttgtcaaagtcattctccgtccagctttgttctgttgctggtgaggaactgcgttcctttggaagaggagaggcactctgctttttagagtttccagtttttctgctctgttttttccccatctttgtggttttatctttgtttggtctttgatgatggtgatgtacaggtgggtttttggtgtggatgtcctttctgtttgttagttttccttctaacagacagggccctcagctgcaggtctgttggagtttgctagaggtccactccagaccctgtttgcctgggtatcaacagcggtgtctgcagaacagtggattttcctgaaccgcgaatgctgctgtctgatcgttcctctggaagttttgtctcagaggaatacccggccgtgtgaggtgtcagtctgcccctactgggggtgcctcccagttaggctgctcgggtgtcaggggtcagggacccacttgaggaggcagtctgcctgttctcagatctccagctgcgtgctgggagaaccacggctctcttcaaagctgtcagacagggacatttaagtctgcagaggttactgctgtctttttgtttgtctgtgccctgcccccagaggtggagcctacagaggcaggcaggcttccttgagctgtggtgggctccacccagttcaagcttccgggctgcggctgctttgtttactgaagcaagcctgggcaatggcgggcgcccctcccccagcctcactgccgccttgcagtttgatctcagactgctgtgctagcaatcagcgagactccgtgggcgtaggaccctccgagccaggtgcgggatataatctcctggtgcaccgtttcctaagcccatcggaaaagcgcggtattagggtgggagtgacccgatattccaggtgctgtctgtcacccctttccttgaccagcaaagggaactccctgaccccttgcacttcccgagtgaggcaatgcctcaccctgcttcggctcgcacacggtgcgctgcacccactgtcctgcacccactttctggcactccctagtgagatgaacctggtacctcagatggaaatacagaaatcacctgtcttctgtgttgctcacgctgggagctgtagaccggagctgtt

SEQ ID NO: 10579 - DNA, 4875 bp, Homo sapiens
ttctttttttttgtccttcctttttctttttcttttctttttcaaaaaaaattttttattatactttaagttctagggtacatgtgcacaacatgtaggtttgttacataggtatgcgtgaaccatgttggtttgctgcacccactaacttgtcatttacattaggtatttctcctaatgctatccctctcccagccccccaccccatgacaggccccagtgtgtgatattccccgccctgtgttcaagtgttctcattgttcacttcccatccatgagtgagaacatttggtgtttggttttctgtccttatgatagtttgctgagaatgatggttttcagcttcatccatgtgcctgcaaaggacatcaactcatccttttttatggttgcacagtattctatggtgtttatgtgccacattttcttaatccagtctatcattgatggacatttggcttggttccaagtctttcctattgtgaatagtgccacaataaatatacatgtgcgtgtctctttatagtagcatgatgtataatcctttgggtatatacccagtaatgggatcgctgggtcaaatgttatttctagttctagatccttgaggaatcaccacactgtcttccacaatggttgaactagtttacactcccaccaacagtgtaacagcgttcctgtttctccacatcctctccagtatctgttgtttcctgactttttaatgatcaccattctaactggcatgagatggtatctcattgtggttttgatttgcatttctctaatgaccagtgatgatgagattttttttcatatgtttgttggctgcaaaaatgtcttcttttgagaagtgtctgttcatatcctttgcccactttttgatggggttgtttgttttttttcttgtaaatttgtttaagttctttgtagattctggatattagccctttgtcagatgggtagattgtaaaaattttctcccattctgtaggttgcctgttcactctgagggtagtttcttttgctgtgcagaagctcttcagtttaattagatcccatttgtcaatttcggcttttgttgccattgctgttggtgttttagtcatgaattctttgcccatgcctatgtcctgaatggtattggctaggttttcttctagggtttttatggttttaggtctaacatttaagcctttaatccatcttgagttaatttttgtgtaaggtgtaaggaagggatgcagtttcagctttctacatatggctaaccagttttcccagcaccatttattaaatagggaatcctttccccatttcttgtttttgtcaggtttgtcaaagatcagatggttgtagatgtgtggtgttatttctgaggcctctgttctgttccattgatctatatctctgttttggtaccagtaccaggctgttttggttactgtagccttgtatatagtttgaagtcaggtagtgtgatgcctccagctttgttctttttgcttaggattgtcttggcaatgtgggctcttttttggttccgtatgaactttaaagtagttttttccaattctgtgaagaaagtcattggtagcttcatggggatggcattgaatctataaaattaccttgggcagtatggccattttcacaatattgattcttcctatccatgagcatgaaatgttcttccatttgtttgtgtcctcctttatttcgttgagcagtggtttgtagttctccttgaagaggtccttcacatcccttgtaagttggattcctaggtattttattctctttgtagcaattgtgaatgggagttcactcatgatttggctgtttgtctgttattggtgtataggaatgtttgtgatttttgcacattgattttgtatcctgagactttgctgaagttgcttatcagcttaaggagattttgggctgagacgatggggttttctaaatatacaatcatgtcatctgcaaacagggacaatttgactttctcttttcctaattgagtacccttcatttctttctattgcctgcttgctctggccagaacttccaatactttgttgaataggaatggtgagagagggcatccctgtcttgtgcaggttttcaaagggaatgcttccagtttttgcccattcagtatgatagtggctgtgggtttgtcataaatagctcttattattttgagatacattccatcagtgcgtagttttttgagagtctttagcatgaagggctgttgaattttgtcaaagtccttttctgcatctattaagatagtcatgtggtttttgtcattggttctgtttatgtgatggattacatatagtgatttgggtatgttgaaccagtcttgcatcccagggatgaagccaacttgatcgtggtggataaactttttgatgtgctgctggattcagtttgccagtattttattgaggattttagcattgatgttcatcagggatattgttctaaaattctctttttttgttgtgtctctgccaggctttggtatcaggatgatgctggcctcataaaatgagttagggaggattttctctttttctattgattgaaatcgtttcagaaggaatggtaccagctcctgttcatacctctggtagaattccactgtgaatccgtctggtcctggacattttttggttggtaggctgtttattattgcctcaatttcagagcctgttattggtctattcagagattgaacttcttccttgtttagtcttgggagggtgtatgtgtccaggaatttatcaattttttctagattttctattttatttgcatagagatgtttacagtattctctgatggtagtttgtatttctgtgtcatcggtggtgctatcccctttatcatctttattgtgtctatttgattcttctctgttttcttctttattagtcttgctagcggtccatcaattgtgttgatcttttcaaaaaaccagctcccagattcattgattttttgaagggttttttgtgtctctatctccttcagttctgctctgatcttagttatttcttgccttctgctagttattgaatttgtttgctcttgcttctctagttcttttaattgtaatgttagggtgtcaattttagatctttcctgctttctcttgtgggcatttagtgctataagtttccctctatacactgctttaaatgtgtcccagagattctggtacgttttgtcttcgttctcattggtttcaaagaacatctttatttctgccttcatttcgttatttacccagtagtcattcagaagtaagttgttcagtttccatgcacttttcaggatttgagtgagtttcttaatcctgagttctaatttgattgcactgtcatatgagagacagtttgttgtgatttctgttcttttacatttgctgaggagagctttgcttccaactatgtggtcaattttggaataagtgtgatgtggtgctgagaagaatgtatattctgttgatttggggtggagagttctgtagatgactatttagttggcttggtgcacagctgagttcaagtcctggatatccttgttaactttctgtctcgttgatctgtctaatattgacagtggggtgttatagtcttctgttattattgtgtgggagtctaagtctctttgtagttctctaatgacttgctttatgaatctgggtgctctggtattgggtacatatataattaggatagttagctcttcttgttgaattgatccctttaccattatgtagtggccttctttgtctcttttgatctttgttggtttaaagtctgttttatcagagactaggattgcaacccctgcttttttttttgttttccatttgcttggtagatcttcctccatccctttattttgagcctatgtgtgtctctgcacgtgagatgggtttcctgaatacagcacactgatgggtcttgactctttatctcattggccagtctgtgtcttttaattggggcatttagcccatttacatttaaggttaatattgttatgtgtgaattagatcctgtcattatgatgttagctggttattttgcctgttagttgatgcagtttcttcctagcattgatggtctttacaatttggcgtgtttttgcagtggctggtactggttgttcctttccgtgtttggtgcttccttcaggagctcttttagggcaggcctggtggtgacaaaatctctcagcatttgcttgtctagaaaggattttatttcctcttcacttgtgaagcttagttggctggatatgaaattctgggttgaaaattcttttctttaagaatgttgaatattggctctcactctcttctggcttgtagagtttctgctgagagatctgctgttagtctgatgggcttccctttgtgagtaacctgacctttctctctggctgcccttaacattgttttccttcaattcaatcttggtaaatctgacaattatgtgtcttggggttgctcttctcaaggaatatctttatggtgttctctgtatttcctgaatttgaatgttggcctgccttgctaggttggggaaattctcctggataatatcctgaagagtgttttccaacttggttccattctccctgtcactttcagtttcaccaatcaaacgtagatttggtcttttcacctagtcccatatttcttggaggctttgttcatttctgtttactcttttttctctaaacttctcctcttgctttatttcattcatttgatcttcagtcactgataccctttcttccacttgatcaaatcggctactgaagcttgtacatgcatcatgtagttct

SEQ ID NO: 10580 - DNA, 6198 bp, Homo sapiens
tttctattccattatttttttttattgttttattttttattttttattttattattattctactttaagttttagggtacatgtgcacaatgtgcagtttagttacatatgtatatatgtgccatgctggtgtgctgcacccattaactcgtcatttagcattaggtatatcttctaatgctatccctcccccctccccccaccccacaacagtccctagagtgtgatgttccccttcctgtgtccatgtgttctcgttgttcaattcccacctatgagtgagaacatgcggtgtttgggtttttgtccttgcgatagtttactgagaatgatatttccaatttcatccatgtccctacaaaggacatgaactcatcatttttttgtggctgcatagtattccgtggtgtatatgtgccacatttttttaatccagtctatcattgttggacatttgggttggttccaagtctttgctattgtgaataatgccgcaataaacatacgtgtgcatgtgtctttatagcagcatgatttatagtcctttgggtatatacccagtaatgggatggctgggtcaaatggcatttctagttctagatccctgaggaatcgccacactgacttccacaatggttgaactagtttacagtcccaccaacagtgtaaaagtgttcctatttctccacatcctctccagcacctgttgtttcctgactttttaatgattgccattctaactggtgtgagatggtatctcattgtggttttgatttgcatttctctgatggccagtgatggtgagcattttttcatgtgtcttttggctgcataaatgtcttcttttgagaagtgtctgttcatgtcctttgcccactttttgatggggttgtttgtttttttcttgtaaatttgtttgagttcattgtagattctggatattagccctttgtcagatgagtaggttgcgaaaattttctcccattttgtaggttgcctgttcactctgatggtagtttcttttgctgtgcagaagctctttagtttaattagatctcatttgtcaattttggcttttgttgccattgcttttggtgttttagacatgaagtccttgcccatgcctatgtcctgaatggtactgcctaggttttcttctagggtttttatggttttaggtctaagtttaagtctttaattcatcttgaattaatttttgtataaggtgtaaggaagggatccagtttcagctttctacatatggctagccagttttcccagcaccatttattaaatagggaatcctttccccattgcttgtttttgtcaggtttgtcaaagatcagatggttgtagatatgcagcattatttctgagggctctgttctgttccattgatctgtatctctgttttggtgccagtaccatgctgttttggttactgtagccttgtagtatagtttgaagtcaggtagtgtgatgcctccagttttgttcttttggcttaggattgacttggcaatgtgggctcttttttggttccatatgaactttaaagtacttttttccaattctgtgaagaaagtcattggtagcttgatggggatggcattgaatctataaattaccttgggcagtatggccattttcatgatattgattcttcttacccatgagcatggaatgttcttccatttgtttgtatcctcttttatttcattgagcagtggtttgtagttctccttgaagaggtccttcacgtcccttgtaagttagattcctaggtattttattctctttgaaataattgtgaatgggagtttgctcatgatttggctctctgtttgtctgttattggtgtataagaatgcttgtgatttttgtacattgattttgtatcctgagactttgctgaagttgcttatcaacttaaggagattttgggctgagacaatggggttttctagatatacaatcatgtcatctgcaaacagggacaatttgacgtcctctttcctaattgaataccctttatttccttctcctgcctaattgccctggccagaacttccaacactatgttgaataggagtggtgagagagggcatccctgtcttgtgccagttttcaaagggaatgcttccagttattgcccattcagcatgatattggctgtgggtttgtcatagatagctcttattattttgagatacgtcccatcaatacctaatttattgagagattttagcatgaagggttgttgaattttgtcaaaggccttttctgcatctattgagataatcatgtggtttttgtctttggttctgtttatatgctggattacatttattgatttgcgtatattgaaccagccttccatcctggggatgaagcccacttgatcatggtggataaggtttttgatgtgctgctggattcggtttgccagtattttattgaggatttttgcatcaatgttcatcaaggatattggtctaaaattcttttttttggttgtgtctctgcctggctttggtatcaggatgatgctggcctcataaaatgagttagggaggattccctctttttctattgattggaatagtttcagaaggaatggtaccagctcctccttgtacctctggtagaattcagctgtgaatccatctggtcctggactctttttggttggtaagctattgattattgccacaatttcagagcctgttattggtctattcagagattcaacttcttcctggtttagtcttgggagggtgtatgtgtcgaggaatttatccatttcttctagattttctagtttacttgtgtagaggtgtttgtagtattctctgatggtagtttgtatttctgtgggattggtggtgatatcccctttatcattttttattgcgtctatttgattcttctctcttttcttctttattagtcttgctagcggtctatcaattttgttgatcctttcaaaaaacaagctcctggattcattaattttttgaagggttttttgtgtctctatttccttcagttctgctctgattttagttatttcttgccttctgctagcttttgaatgtgtttgctcttgcttttctaattcttttaattgtgatgttaggatgtcaattttggatctttcctgctttctcttgtgggcatttagtgctataaatttccgtctacacactgctttgaatgtgttccagagattctggtatgttgtgtctttgttctcgttggtttcaaagaacatctttatttctgccttcatttcgttatgtacccagtagtcattcaggagcaggttgttcagtttccatgtagttgagtggttttgagtgagtttcttaatactgagttctagtttgattgcactgtggtctgagagatagtttgttataatttctgttcttttacatgtgctgaggagagctttacttcgaactatgtggtcaattttggaataggtgtggtgtggtgctgaaaaaaatgtatattctgttgatttggggtggagaattctgtagatgtctattaggtccacttggtgcagagctgagttgaattcctgggtatccttgttaactttctgtctcgttgatctgtctaatgttgacagtggggtgttaaagtctcccattattattgtgtgggagtctaagtctctttgtaggtcactaaggacttgctttatgaatctggatgctcttgtattgggtgcacatgtatttaggatagttaattcttcttgttgaattgatacctttaccattatgtaatggccttctttgtctcttttgatctttgttggtttaaaatctgttttatcagaggctaggattgcaacccctgcctttttttgttttccatttgcttggtagatcttcctccatccttttattttgagcctatgtgtgtctctgcacatgagatgggtttcctgaatacagcacactgatgggtcttgactctttatccaatttgccagtctgtgtcttttaattgaagcatttagtccatttacatttaaagttaatattgttatgtgtgaatttgatcctgtcattatgatgttagctggttattttgcttgttagttgatgcagtttcttcctagcctcaatggtctttacaatttggcctgattttgcagtggctgataccggtttttcctttccatgtttagtgcttccttcaggagctcttttagggcaggcctggtggtgacaaaatctctcagcatttgcttgtctgtaaagtattttatttctccttcacttatgaagtttagttggctcaatatgaaattctgggttgaaaattcttttctttaagaatgttgaatattggcccccactctcttttggcttgcagagtttctgccgagagatctgctgttagtctgatgggcttccctttgtgggtaacctgacctttctctctggctgcccttaacattttttccttcatttcaactttggtgaatctgacaattatgtgtcttggagttgctcttctcgaggagtatctttgtggcattctctgtatttcctgaatctgaatgttggcctgccttgctagattggggaagttctcctggataatatcctgcagagtgttttccaacttggttccattctccccgtcactttcaggtacaccaatcagacgtagatttggtcttttcacatagtcccatatttcttggaggctttgttcgtttctttttattcttttttctctaaacttcccttctcgcttcatttcattcatttcatcttccatcactgataccctttcttccagttgatcacatcggcccctgaggcctctgcattcttcatgtagttctcgagccttggctttcagctccatcggctcctttaagcacttcactgtattggttattgtagttatacattcatctaaatttttttcaaagtttttaacttctttgcctttggtttgaatttcctcctgtagctcggagtagtttgatcgtctgaagccttcttctctcaactcgtcaaagtcattctccgtccagctttgttctgttgctggtgaggaactgcattcctttggaggaggagaggcactctgctttttagagtttccagtttttctgctctgttttttccccatctttgtggttttatctacttttggtctttgatgatggtgatgtacagatgggtttttggtgtggatgtctttctgtttgttagttttccttctaacagacaggaccctcagctgtaggtctgttggagtttgctagaggtccactccagaccctgtttgcctgggtaacagcagcggtggctgcagaacagcggattttcgtgaaccacgaatgctgctgtctgatcgttcctctggaagttttgtctcagaggagtacccggccgtatgaggtgtcagtctgcccctactggggggtgcctcccagttaggctgctcgggggtcaggggtcagggacccacttgatgaggcagtctgcgtgttctcagatctccagctgcgtgctgggagaaccactgctcccttcaaagctgtcagacagggacatttaagtctgcagaggttactgctgtctttttgtttgtctgtgccctgcccccagaggtggaacctacagaggcagtctggcctccttgagctgtggtggtctccacccagtttgagcttcccggctgctttgtttacctaagcaagcttgggcaatggcaggcgcccctcccccagcctcgctgccgccttgcagtttgatctcagactgctgtgctagcaatcagtgagactccgtgggcgtagaaccctctgagccatgtgcgggatataatctcctggtgcgccgttttttaagcccgtcagaaaagcgcagtattagagtgggagtgacccgattttctaggtgctgtctgtcacccctttctttgactaggaaagggaacttcctgaccccttgcacttcccgaatgaagcaatgcgtcgccctgctttggctcgcgtacggtgcgctgcacccactgtcctgcgcccactgtctggcactccctagtgagatgaacccggtacctcagatggaaatgcagagatcacctgtcttctgcatcgctcacgctgggagctgtagaccagagctgttcctattcagccatattggctgcccc

SEQ ID NO: 10581 - DNA, 22713 bp, Homo sapiens
aaaagttttgtgagagctttaatggcacaaaatgtttatagctacaagttatacatgtattgtaaactgtatataacgatacaaagtgctaactaaaatagatgaagaatgcataatcactttggctcagttaattccaataatttccacaacgggttcatgaaaaaacttatctgactggctaagtcttcaattctcatttttttagaatagtaaatatttttactgcaatcacgggaacttgttgcactttccaatgtgcaagtttgtgcagttttgctcttgattctatttacaaacatcttgagccagttttcatcaaacatatgaaaaatgaagcctgcctttttgtccccaaattgtaaacaggtgtaaagctttttaaacattaacctcacaatttcaactattaattgttgaattctcctttccaaaccacaatgttttcgttcaacacaaatctgggtgtagcagtaaaacgttcatcccatgtgttagggctacagatacatactacatgctctcataataaattctactgtgatgatgtattcacgttttaagtaattttccataatttcactgatgctttaagaaaaagggcaacactatgtttctttttaacgctgaaagaaatcataaatatacccagtttcagtggcaccactgatagaactgctgctgaacttggaaagagcacaatgcactagctgtaagaagtcactttcaggtaaagtgtaattttacttttcccccctgtaataccaattgtaatagaaattgcatactgtagcagtttagctagtcagttctcctaactttccagtctttccaattttattcaggcttttcaaaaatcagtgagccatcagatttactttcttcccaaagaaattcaaatatgaacacttgaaataaataggttatagaaggcaaatcaagtgttaccaggtttaagagtaagacagaaacatggtctaggaaaaagatgtccaaaattatttagacatcaaatgctagaaagaaaaaagaaaattactttcaaacctagaatatatcatctttcttaaagatagccagctatatttcttgaaaaaagataaaaattttgtttaatctatatgttattttccactataacacatcaattttacaaatgttgatgtgagaaaagagttagtttctgcaaactggcaaacctgtctgtcatagtgtttttattcaagttgacctggtgcactttatagattgctagttttaaaattaacaacggttctctaaatagtcaatatcaatgtctatatcataaacagtaattatttatatataaaacatgtggtatccttcagagtcatgctagatgttctgaaatccaagaaaatctactcgagataactggtcatcctgatgctttctaacaatttggtcctaaagcttcacattttagaaatgaacgaacaagtatatcactgaaggaatctgttgagtgttctgaactttaagagtttaccataactgaaaagacagctacatgagaaaatgaccagtgcctgcagtcgcaggaatcaccttgggaagactgtacagtaaacattattcagtgagagatcagaaggaaacaaatggcatcttttcagaacgctgtcaactgttcccacaacccaagtctgtttttccaagttgcacaagtgcttggaataactctgaaacaattctcttcagagtttaaaggcttcagagtataggtgatgcttcctaaaacaagaagcctgtattaacatcacaaattggaactcattccaaagcctcttcttagagaaaaaaaaataaagaaataaaaaataaaaaatgtaaagaaggtcatgaaaaattcacatgcagctaattatcgtaaaaaatatcaaacacacacgcaaaaatctcaaaaagcaatttcatatatttctaagcctgagacgttccttatcagaaagaaagattctacaccatagaaaagacagcattacaacatactagtatgaaaatctgctgatgtattttacttcttattctatttcatacctatcatttatacagtttgcctcctataaattaaaagacgctattaggaggcttagacaaaaaagtggctccaaagctggtttaaaatattttttttattgcccaggatatttttttgttgtgccttgccttttttttttgttttgttttctttttaataactatcaactcaaacttagggaaacttgcctttgtcttgggggaaaaaaaacaactagacaataaagcttcttttacatcatttgctaacctgatctcgttttaagagagagatggtagttatgttgcaagagtaaaatttataccatgaatgatacaggtctagtctggtggcactaattagagataatagcattgctgacaaaattataatctgctggtggcatttgcggaaaagaagcccttgcaaatttctaaacaacagtaaactctgttaggaaattctaaaatgtcttcaggccaaaaagggtataaggttagtaaaatgcctcaacagagtttgaataaaatattgaatttgagagttactggaattggatatgtaaaaacagggtggtaggttgggtcatgcttacaatggtctcaagttcaaataagctactgtgacaatacaccacttcacaggtcacacgcatttccaggggcttttcctttccctcagtaggtgctggcagagggtgtgctcagtcgctttccaatatagatgctgaaaggaagcagaagcatcatgtttcacctgtttcaacagttctataccagcttgtccacaggttgaactctacttaaaactcttcagtctttgtaaaaggctctaaaggtttgtgggtaccgctccccaaacaccgtgaaatcatcactgactttcttaaaaccagtcaccagcccggccaaactggttttatatgagtttgtttactcattaaatatcggggctcgacagcaaaggggtagtgattagacaaagtaaagccagagagaacagatccctccacagagtaaataaagcagcccaactccttcaagatgttcctctttggtggacagaaggttctactgacatttcagacacaaaaatatagtaatatgtgaaattattctggtgctctatgtaggacaaaagaaaaaaaaaaccttaaaagctgccagtgctttaaagacagctcttactaataactcctaaggattaggggccttataatactttttcatgccaagaaagtatttggcctcttcaacagcaaaagcagaagggaagttaaggaaagtatgtaactagcttcacctccagtgcaattaaagcaacgaactttttaaacactctttttacattcatctatagcaatagttatacttacagccaagacaaacaatctgaagatgactgaaagagagacggcaaggtatagacaccaatcgcttaagggcaatgaactgctgtataggcagcaatgtattaaactcctacacctgccccacatcaacccccacgcaacagtcacacagtccccttctgcacaaaccccttctaggttgctgtttgttgattactgtccttgccctcacaaaagcagatcaagcacccaagagagacaagacgggtgtgtggaaagctgtatgcaagtttctgaggtcgtgactaagaatctctctccaatatgctgagctccttaaagggaagaaaaaggatgaccccatcttctgcatatcttatactgaaaatgacccactgggcatgcttagagcacaacatacgtcttgaaaaaaattaacagctactgtttaactcctaaaatctttcagaagtgtaattcctcaattgtttaaatcaaggaaaaaaagcaatttatttaaaagatgtggctaagaaactaatgaattacacgtaaatatgaggttgattttagcaaaataaatgaaaatactacaaagttaaaaaaggaaaaaattagcaccaatcaacctaccagtttcattaaaaaaaactattcaatgtaatcatgtattttcccatatgaaaaaaaggtatttgcactgaccacaaaatgtacatgctaaagattagtttagttcataaattactcaagattaaatattacacaacaaaacccaaaaagaaaaatcaatcacagaggagtccgcttacatttgatcatttaggggattattatgaacatcttcttttttttttttttttttccgagatggagtctcactctatcccccaggctggagtgcagtggcatgatctcggctcactgcaatttccgcctcccatgttcaagcgattctcctgcctcagcctcccaagtagctgggaccacaggcatgtaccaccatggccagctaatttttgtatttttagtagagaccgggtttcaccatgttggccaggctggtcttgaactcctggcctcaggtcatccacccatcttggcctcccaaagtgctgggattactggcatgagccaccacaccaggccaaacatcttattttcaaataagaaaacacactctactattattaaaaatgcttatttgtagaacaattgtgcacccacttttttaagttcaccttatttgcactaaaacattgaaagtaaagcaataaaaactgctttcacatacatttcttcaatctgaaaataagaggataaaatgaatggaaaaaacttcaggagttgaccggtacttaccctagccccaaagccaaaacatgagaaaggaagagagatggaatgaacaccttcagaaattctgcggagaaaataccccctttcttcatggctccacttttcctcatgcttaaagacacagaacgtttagggtgtctgaagtggaactccctgagaaagaaattcagaggcagatgtcatttgctgaaaatatcgtggggattaccaggcccattgcctgtaagcgtgcgcagatcaactgtgtccactgacaagaaacatgtgagaactcacttgggtggaatgttttcgggtctactggaccagtctgatacccagtccgcacttttcttcaaagcctcgacttccttctctccttctacaacttcttcttctgactgtaaagaagaattcaaactttaagaaaaaaaggaagaccaattcctcctaatacaaagaaaaatctagacagaaaagataccaaactcataaggttgtgtctcagaaattttagataacaaacatgttgcttttctaaaaaatgctgaaaaataatgtaagatcagagtatgtaatatcttcagaacaacctgagtgagcttcactgttgggatatctaagcacagcacaggaactgcataagactgtactttgggatgtaatgctaagggaagtatgaaaaacctcgataagagttaaatctgggcaatacttacatggaggtccattatattattctctcttgtatgcacttaaaattttcgtaattaggccgggtgcagtggctcatgcctataatcccagcactttgggaggctgaggcaggcggatcacttgaggtcagaagctggagaccagcctggccaacatggtaaaaccccgtctttactaaaaaaaaacacaaaacttacacgctgggtgcggtggctcacgcctgtaatcccagcactttgggaggccgaggtgagcggatcacaaggtcaggagatcgagaccatcctggctaacacagtgaaaccctgtgtctactaaaaatacaaaaaaattagctgggcgtgatggcgggcacctgtagtcccagctactcgggaggctgaggcaggagaatggcgtgaacccaggaggcggagcttgcagtgagcagagatcgcgccactacactcctgcctgggggaaagagcgagactccgcctcaaaaaacaaaacaaaacaaaacaaaaaaaaattagccgggcatggtggcgggcacctgtaatcccagctacttgagaggctgaggcagaagaatcgcttgagcctgggaggtggaggttgcttgagcctgggaggtggagccgagatccagccactacactccagcctgggtgatagagtgagattccatctcaacaaaaaaaagaaaaaaaaaaatttcataattaaaaaaataaaaggaaataaaaggatatgctaaaaataaaatgatgagaagtaaaacaaaaataagtgagagatgtgatgaggaaataaataatagtatttattgagcacttaaaggggcaaatattattccaagcatgttacatgcattttttttttttttctggagacagggtctcctgtgtcacccaggccagagtgcaatcacagcttactgcagcctcgaactcctgggctcaattaattctcccacctcaacctcccaagtagctgggactacaggtgtgtgccaccacgcccagctaatttttgtatttctttaaagagacagtgtttcactatgttgcccagcctggtcttgaactcccgggctcaagggatcttccctgcctcagcctcccaaagtgctgggattacaggtgtgagacactgcacccagccacatgcattaactttcaccttgcaacaaataaccctataaaaataattattaaaatcccattttacagatgaggagactgagacatagattaaataacttgcctaaggttccacaaccagtacatagcagggccagtattcaaacccagaatactgtatagagaggccctactgttaagcaccagggtttactctctggaaggagattatatttttaggacaaattgctatacaaacattttccaaggtttcgaaactatgttagccaaaagtttttgggaataatctataataagttgagtcagaatttaacatgtgtcatatcaaataaaataaaaaatgtgacttttaaaaattgcttattataactaaagtttcaggccaagaacaattaacatttccaatagctccccttttaatagaaccaaaaggaatgaaaaagtcctaaaaatgatatttatttattcagtattatttattcagttttctttttgagacggagtctcgctctgtcacccaggctggagtgcagtggcgcgaccttggctcactgcaacctctgcctcctgggttctagcaattctcctgcctcagcttccagagtagctgggattacaggcgcctggcactacacctggcaaatttttatatttttcgtagagacggggtttcaccatgttggccaggctggtctcgaactcctgacctcaagtgatctacacgcctcagcctcccaaagtgttgagattacaggcgtgagccaccgtgcctggtcatagtcagttttaagggatgtcatgctatgatcccaaacccaggggtctcaaaactaagaagcattttgacattttattttgtttgactaggattcactcaaaagaatgaccaaagctgtcattcttttcagtaggtagctaagaaatgcagagtctgacatattcacatgactcttgacaggtctagttctctgtgaaacagctaccccaggaaggagcttcagacagggcaaagtaaaacccctgtgcgttctgctgctcttgttagtaccaatcttatctagttctgctgaacttggcaaattccactgaatgacacaatgtagcatttaggattaagctccttccattggctattgagattactcagaatcatgagttggctctttggagtaacactgaaatcatcccaaatcaaaaacaataaactgttacaatttacttgcacatcagttcctgtacacacaatatctgactatactcaacacactgcaggtcgcttctgtttagtttcctgctttggcctcacagatctttctttaaacctgctcaaagatttaacaagttaatatttcataatttctgacagaatgaaacgcagtaagatttcacgctctaattttttttttcatgaggatggaattttctcagttgaatgaagcaaagttatctctggacaagtgttttaaaaagaaaacaaaacaaaaaagaactccataagtttcccaacttacaatactttaagaataagagtggtaagctttcctcattcactaccactctgtgcttccttttattaatcttaaatttgccactttcaggttttaaactgccttccaattcttagaattccagaatatggtaaaaatgtacttaatctaattacgtaagatttgtgcttttaaaatcaataatcctctctctatacctacatctattcaaagaagattctggctgggcaccatggctcatgcctgtaatcccagcacttagggaggccgaggtggacggatcacttgaggttaggagtttgagaccagcctggccagcacggcgaaaccctgtctctactaaaaatacaaaaattagccaggcgttgtggtgcacacctgtaatcccagcttcttgggcagctgaggcagcagaaccacctggaaacagaggttgcagtgagccgatgccactgcactccagcctggtgacagagtgaggtccatctcaaaaacaaaaaacaaaaacaaagaagattctgatcgttctagcctgttctctcacatggagttctttgttttctgatcacttaagtttttcttctctggtttacctcaaggtcactctgtcctctaaatatggatattaagctgtataccatgattcatgtacagataaaaatcacagttttacaagacaggaaatggaggatattttctgtttggatcatttttcagtaacactcaacattgtgctggcatttttggtcccagaaacacaatgcaaaaatgtcttcaataaataatctatatcgcttctcggacttttggctaagatcaagtgaagaaacaatctacagtctgttttctgatacaaaactgagactcttgaggatgatcatccgaaaagcagtttcatggtctttttcctaagtgcacactgccttaggcagattccccataccataactcagcagacatttttcagttcattctcatggctttgtgagctctcctgttatcaatcgaattcatttacttagttcagtagaaagaacaagggccacagactcagacctgctttgaatcctggctctaacagtgacttgctttgtgatcttagataagtaattagtacaaagcctcactttttccactggtccatggggataatatcattgctttcactggattgagaacattaaaagagaggtgggagtagtaactcatgtctgtaattccagcactttgggaggccgacatgggaggatcatttgaggccaggagtttgaaaacggcctgggcaatatagcgagactctgtctatacaaaaaaaaaataaaaaagtagccaggcgtggcagtgtgagcctgtagtcccagctactagggagactgaggcagaaagattgcttgagccgggaatcgaagtctgtggtgagctacaactgcaccactacactccagcctgggtgacaaagcaagaccctgagacgctgtctccaaaaaaaaaaaaaaagaaactgagtacctagaacatatctagttaatgttagtgactttacttcctcatcttagaaaagcttgaaaattatatatagtccttataaacacatataaaaacattctataagatcaagtacaataacagtcctttaactgcttttttaagtttcctaaccctaaactttcttcttattcaggaagaaaatcaattttcccaaatcctaaagaaattaatttttaaattattgtttcttccattaaaaaaaggcaatgtcaaaggtttttgaaagtttaaactatacctgctgacagctcccttattaagtcctactcaactgttatctctcacaggggttaggctgtctttccaaactcttccctttgttgaaactgaccgatctgattgtcaacataaagtaagtacctcctcttgatgatagcctatgctcttttagggatttggtcctgagaagggatcaacactggcaaacctaccaaaggccaaaaacctgacattttctttcctgaatttcaaaaattcctttggaattccagggtagatgcattcaactctagaattccatgtacattcaatattgagttaagcctgattgcacatctgcaactccatgagccaggaaagcacttaccacagtgctccacggagttattaagttcttaagggaaaaacgtatgcagagaagaggaagaaagtctaaggtcaaataagcttgggaaacatttggtttaattaaacccatttctttttttcttttttttagagacagagagtcttgctatgttgcccaggctggactcaaaaacttgtggggctcaagggatcctcccacctccacctcccaagtagctgagactacaggcaagtgccaccatgtccagcttaaactataatttctttactgcaggaactggtcagaattactcatgcgactactaaggtgagagtgtgggggaacctggggctgcattaccttccatttatttgacctttgaacaaatgttcttgaaaacacattttggaaaatgctaatctaaacttaaagctttctgtataaaaggtgatatagattgaagaaatcctcctcaggaaagaccacggcaaagaattcgatttctctcctggattccgtggtacactttctgctatggagactttgtaagctttcttctacatcagctatagcttactgcatgtggccaaactgacatacataagccagcaattcaaatgctccagtcagatcatcttatatacgacagcctgctattgtgagcttctctacagtataaagctcatcatcataaaataaatttgtgttgaatccaaagattttcgacatttcagagaaaagcaaaaatagagcatagtaaagtatagaggaattctgtggcctttggaaacagaaagaatactgggtggatctaagacacacaaaatatttctagtgcccaggacacagaatagtgagaacccgacaaaacaaggtttttgttgcgactcattcaaaggttcattaaacatttttcaagcaccctaaatacaggagaaaaagataatggttcccgtcctcaagaatttgtactctaatgacacttttaggtgatcttacatatcaataaagttaaaggctggctatgagtattctaaatcattagccacagttatatacttaccatattttaagtcttataacacaaacatttgtaagattttaatactatatccatctatgtttccaacattgtcaactcctagtaaacaatatttatcttgaaggaatcctgcataatttagataaatttaaaatttatctcaaaagccactgctttgatttcagatgcaaaaaaaagtcttcatgtctagttctaatacaaccttcatcttcatttattctgtggtctttttttttttttttattttgtacctccactggtaggtttttttttttgttttttttggggaatttaagttttagggtacatgtgcacattgtgcaggttagttacatatgtatacatgtgccatgctggtgtgctgcacccactaactcgtcatctagcattaggtatatctcccaatgctatccttcccccctccccgctccccaccacagtccccagagtgtgatattccccttcctgtgtccatgtgatctcattgttcaattcccacctatgagtgagaatatgcggtgtttggttttttgttcttgcgatagtttactgagaatgatggtttccaatttcatccatgtccctacaaaggacatgaactcatcattttttatggctgcatagtattccatggtgtatatgtgccacattttcttaatccagtctatcattgttggacatttgggttggttccaagtctttgctatcgtgaataatgccgcaataaacatacgtgtgcatgtgtctttatagcagcatgatttatagtcatttgggtatatacccagtaatgggatggctgggtcaaatggtatttctagttctagatacctgaggaatcgccacactgacttccacaatggttgaactagtttacagtcccaccaacagtgtaaaagtgttcctatttctccacatcctctccagcacctgttgtttcctgactttttaatgattgccattctaactggtgtgagatgacatctcatagtggttttgatttgcatttctctgatggccagtgatgatgagcattttttcatgtgttttttggctgcataactgtcttcttttgagaagtgtctgttcatgtccttcgcccactttttgatggggttgtttgtttttttcttgtaaatttgtttgagttcattgtagattctggatattagccctttgtcagatgagtaggttgcgaaaattttctcccatgttgtaggttgcctgttcactctgatggtagtttcttttgctgtgtagaagctctttagtttaattagatcccatttgtcaattttggctttggttgccattgcttttggtgttttggacatgaagtccttgcccacgcctatgtcctgaatggtaatgcctaggttttcttctagggtttttatggttttaggtctaacgtttaaatctttaatccatcttgaattgatttttgtataaggtgtaaggaagggatccagtttcagctttctacatatggctagccagttttcccagcaccatttattaaatagggaatcctttccccattgcttgtttttctcaggtttgtcaaagatcagatagttgtaggtaagcggcgttatttctgagggctctgttctgttccattgatctatatctatgttttggtaccagtaccatgctgttttggttactgtagccttgtggtatagtttgaagtcaggtagtgtgatgcctccagctttgttcttttggcttaggattgacttggcgatgcaggctcttttttggttccatatgaactttaaagtagttttttccaattctgtgaagaaagtcattggtagcttgatggggatggcactgaatctgtaaattatcttgggcagtatggccattttcacgatattgattcttcctacccatgagcatggaatgttcttccatttctttgtatcctcttttatttccttgagcagtggtttgtagttctccttgaagaggtccttcacatcccttgtaagttggattcctaggtattttattctctttgaagcaattgtgaatgggagttcactcatgatttggctgtttgtctcttgttggtgtataggaatgcttgtgatttttgtacattgattttgtatcctgagactttgctgaagttgcttatcagcttaaggagattttgggctgagaaaatggggttttctagataaacaatcatgtcatctgcaaacagggacaatttgacttcctcttttcctaattgaataccctttatttccttctcctgcctgattgccctggccagaacttccaacactatgttgaataggagcggtgagagagggcatccctgtcttgtgccagttttcaaagggaatgcttccagtttttgcccattcagtatgatattggctgtgggtttgtcatagatagctcttattattttgaaatacgtcccatcaatacctaatttattgagagtttttagcatgaagggttgttgaattttgtcaaaggctttttctgcatctattgagataatcatgtggtttttgtctttggctctgtttatatgctggattacatttattgatttgtgtatattgaaccagccttgcatcccagggatgaagcccacttgatcatggtggataagctttttgatgtgctgctggattcggtttgccagtattttattgaggatttttgcatcaatgttcatcaaggatattggtctaaaattctcttttttggttgtgtctctgcccggctttggtatcagaatgatgctggcctcataaaatgagttacagaggattccctctttttctattgattggaatagtttcagaaggaatggtaccagttcctccttgtacctctggtagaattcggctgtgaatccatctggtcctggactcttcttggttggtaaactattgattattgccacaatttcagctcctgttattggtctattcagagattcaacttcttcctggtttagtcttgggagagtgtatgtgtcgaggaatgtatccatttcttccagattttctagtttatttgcgtagaggtgtttgtagtatcattttttgtctatttgattcttctctctttttttctttattagtcttgctagcggtctatcaattttgttgatcctttcaaaaaaccagctcctggattcattgattttttgaagggttttttgtgtctctatttccttcagttctgctctgattttagttatttcttgccttctgctagcttttgaatgtgtttgctcttgcttttctagttcttttaattgtgatgctagggtgtcaattttggatctttcctgctttctcttgtgggcatttagtgctataaatttccctctacacactgctttgaatgcgtcccagagattctggtatgttgtgtctttgttctcgttggtttcaaagaacatctttatttctgccttcatttcgttatgtacccagtagtcattcaggagcaggttgttcagtttccatgtagttgagcggctttgagtgagattcttaatcctgagttctagtttgattgcactgtggtctgagagatagtttgttataatttctgttcttttacatttgctgaggagagctttacttccaactatgtggtcaattttggaataggtgtggtgtggtgctgaaaaaaatgtatattctgttgatttggggtggagagttctgtagacgtctattaggtctgcttggtgcagagctgagttcaattcctgggtatccttgttgactttctgtcttgttgatctgtctaatattgacagtggggtgttaaagtctcccattattaatgtgtgggagtctaagtctctttgtaggtcactcaggacttgctttatgaatctgggtgctcctgtattgggtgcatatatatttaggatagttagctcctcttgttgaattgatccctttaccattatgtaatggccttctttgtctcttttgatctttgttggtttaaagtctgttttatcagagactaggattgcaacccctgcctttttttgttttccatttgcttggtagatcttcctccatccttttattttgagcctatgtgtgtctctgcacgtgagatgggtttcctgaatacagcacactgatgggtcttgactctttatccaatttgccagtctgtgtcttttaattgcagaatttagtccacttacatttaaagttaatattgttatgtgtgaatttgatcctgtcattatgatgttagctggtgattttgctcgttagttgatgcagtttcttcctagtctcgatggtctttacattttggcatgattttgcagcagctggtaccggttgttcctttccatgtttagcgcttccttcaggagctcttttagggcaggcctggtggtgacaaaatcggtcagcatttgcttgtctgtaaagtattttatttctccttcacttatgaagcttagtttggctggatatgaaattctgggttgaaaattcttttctttaagaatgttgaatattggcccccactctcttctggcttgtagggtttctgccaagagatccgctgttagtctgatgggcttccctttgagggtaacccgacctttctctctggctgcccttaacattttttccttcatttcaactttggtgaatctgacaattatgtgtcttggagttgctcttctcgaggagtatctttgtggcgttctctgtatttcctgaatctgaacgttggcctgccttgctagattggggaagttctcctggataatatcctgcagagtgttttccaacttggttccattctccgcatcactttcaggtacaccaatcagacgtagatttggtcttttcacatagtcccatatttcttggaggctttgctcatttctttttattcttttttctctaaacttcccttcttgcttcatttcattcatttcatcttccattgctgataccctttcttccagttgatcgcatcggctcctgaggcttctgcattcttcacgtagttctcgagccttggttttcagctccatcagctcctttaagcacttctctgtattggttattctagttatacattcttctaaatttttttcagttttcaacttctttgcctttggtttgaatgtcctcccgtagctcactctaatttgatcgtctgaagccttcttctctcagctcgtcaaaatcattctccatccagctttgttccgttgctggtgaggaactgcgttcctttggaggaggagaggcgctctgtgttttagagtttccagtttttctgttctgttttttccccatctttgtggttttatctacttttggtctttgatgatggtgatgtacagatgggttttcggtgtggatgtcctttctgtttgttagttttccttctaacagacaggaccctcagctgcaggtctgttggaataccctgccgtgtgaggtgtcagtgtgcccctgctggggggtgcctcccagttaggctgctcgggggtcaggggtcagggacccacttgaggaggcagtctgcccgttctcagatctccagctgcgtgctgggagaaccactgctctcttcaaagctgtcagacagggacatttaagtctgcagaggttactgctgtctttttgtttgtctgtgccctgcccccagaggtggagcctacagaggcaggcaggcctccttgagctgtggtgggctccacccagttcgagcttcccggctgctctgtttacctaagcaagcctgggcaatggcgggcgcccctcccccagcctcgctgccgccttgcagtttgatctcagactgctgtgctagcaatcagcgagattccgtgggcataggaccctccgagccaggtgtgggatatagtctcgtggtgcgccgttttttaagccggtctgaaaagcacaatattcgggtgggagtgacccgattttccaggtgcgtccgtcacccctttctttgactcggaaagggaactccctgaccccttgcgcttcccaggtgaggcaatgcctcgccctgcttcggctcgcgcacggtgcgcgcacccactggcctgcgcccactgtctggcactccctagtgagatgaacccggtacctcagatggaaatgcagaaatcacccgtcttctgcgtcgctcatgctgggagctgtagaccggagctgttcctattcagccatcttggctcctccctattctgtggtcttaaagcatctatctcagtctttttctacttatacactcaagaaactagcctggagtattggcatgatttattatggacaagaattttccaattcgtttagagtgacagggcccaaaatccttagttgtaaaggagtgcgacaagaactatatcatcctaaataaattccaaaatcagaaactcaataatagcttcaaactattcctaaaagtcttcacatttattttagcaaaatatacttagagaatttacatctttcttaattgtttactgtaaatcagaatccccccgacacacctgagagctatggtccctgctggtgtgcatttccacatcaaacatgatctgcccatcttcttgtggcgaagggctagaagagaaggaattcagctattagttttaattctcactttgtcaaatgacttagtctctactagaaattagaaaattaaaagttacagcagtatggctttgaaaaagcaaatcagagaatatatcataaccctatacaagaaaaatttatgtgatattaaaaggctaaatgaaattgagcattcttactcccaaaatgttctgcactttttcagtagtaatgaaatccttcaaaatgataaatttgcaaaggaaatactatctacagacacaaactgtcacattctcttatatttactcttttgtccactaaaggtaaaataatcttcaaattcaggaacttcagagttctttttctcaaagttccctcatcattaaataattcaccagtagttctcaaagtgcataaggtagttctcaaagacgctttcagagggtctttgaggttacagttcctttctcaatactagtaggatttatttgcctttttcattctcattctcccatgtgtatagtggaattttccaaaggctacatgatgtgtgatagcacaacagttagaatgcaaacacagatgagaaccagctgtcttctattaagcttggtattagagatttgtaaatgtgtaaaacaatgccactattcttattaacttggagggtttatagaaaataggtattttcactaaaaaatgctacttatgttaaaatgtattatttttgaatgaatatatattttctcagttttaatttctaatatagtaaatatcaaaatatataaacccacaaacaagttttttggggtccctaatgatttttaagaatgtaaaggtatgtaatgaccaaaaactttgagaaccactattttacttatttcagaaatatttgctttgagatatttcagagtgaattatataacttatatattaatataaaacctttatgattgcacaaaatacattcttagaactgtaaaaatttacaaataagtttttagacaaaaacaacatgatcacaaactgcacttgatacaagagatgaacagaatgtgctaagttaatttcttagctttattaatgatttcttgtataaaaactgaaagtcactggggatccttcactacatacacaaaccctcccccaaaatctaaaatagaaataaaaaatatttggggcttaacttgctgaaaagaatagatattaactattaaagttatcaagagtatgtatataatgttaattaatgtatagagacgttggtgagactgactcagaaataagatcgtcagaaatttatcagacagattaggcctaggagtcttttagactagtataattgacataggagatttttaaatggggacaggaaaacagaaaagctggttctgtatcaaaccaacgtcatatatatttaggaaatttttgtcttgaactagcacaggagtcaacccgaactgggcactcctactggcctcagtttactatctttgtgctcataactgttgggttcacagctacacatcaagttaagggtcagccttacatagccgtgaccaggtcaaggcagtcagggtgacaaagtcaagaatcctatggaagcattgctctgcttctatatgcttcttcacactggtaccaacctcttctctaaactgtttactcctcctaacaatttggaatgcattagagcttcacccatggcacatattagaatcggctggggagcttttaaaatattgtgacgtctctaccctgcccctgtcaaccaaaatgagaagttcttgagatgcagtccatgtgctgccatttttaaaagctggtgggtgaatctagtgtgccgtcaaggtgaaaacccctgtgacagggtgaaaggcaaagcagaacacactggggttcccagctaacaacccctgcggcaacacaaatatttctatggaataatttttaagttgaaaatatacataaatcagctctaggactgatacccaacaaccctaaaacatttccccctacaagaaacactttccaattacttttcacatatagagacgcatggcaattcagatgatgtgagttttgaagacactcctcaatggtaaagcgtgttagtaggctatcccagaagactcgagttctagccattctctgaaagatgaccactaatctagggcctggagagacataagatgaggggtacgaaagtgttcaaaagcatttgccatgcctcctcatggcaacctaaacttaaacatgatcataggagggtgaaggcatattcagtcacacgtaaaactgcaccataaatgaagtaagatgaacagacaggtaagcaggtgactgttctctgctcattgacagcaccatgtgaacaacaggctcatggacaccatggtatcaatgatcaaggcccacacacctgaacgcagagtgaaagccttgttgacaggccataacaagcagaaaacttgagaaacccatcagcaagttccataatataaatataaatcttcattcggaaagacagactaatgctgtagctactggaatcaagggcaagctgttcagaagagagccatctgctctggttccgcttatgacaagagccatcccaggctctaagaagcacagggacaagtcagggatgacacgggggtggcgggggtgcacagtgtgccacagagccaacaaaccagtcccccgctgccttggcaacattagtggatcataagccactcaggaagttggacatgatttaactcatttctcctttttttcacttcttctgataagtaataatatgtgcaatatacacaatttttacaaaatacaaaaatgttaagaagaaacatatccatactgcattcctaaaaatagtcactgtttacatttccttaatctgcttcccgtgcatttgcattttctaaatggttaacatcagttaacaaccacccagaaggtcatccagtgccccataatgctaacagtgtagctgtcactgaaacaagaatttcttaaatgtcatttaatatctagcccttctgaaaaaaaaaaaaaaaaacagaaaagtttatactaaaaaataatgacctggtttcattccacacacatatctcgttgtattcttactctttcaccataagcagtccttaatccatgtaattagtttcttcagctcaaatatagaaaaatgaggtctgaaacaaaacatcccctgagaaagcagaggagacttcaaaactatctttacagaccttggttggtgcttccaactgtgcaaatattgctataacgtgaagcaacctgcagttcctatgaatcaaacatttactgagtgtctactacgtgccagcaccattactgtgaaggtaataaaaattaaacatggcccctgccctttgcaacgtcaacatctagaagggaagacacatatatacagaggtaactaattcaagaacagtctgtgatctgtaacacagggacacaaaggaaaatgggggaaagtcagattaattctataaattagcatttatgccactgaattttaaactgataaactgctagaaccaatataatctgggtaagaaaaatgacaatctggggaaaaacagtgggcactgaagcacctgtcaattagctgtctcatataaacacaatatatatctgtgcaatatatattatactacaatatatcaggaggcatattttgctaagtgaagatttaagcaaacagatttttcctagagtgaatgagccctgtaacccacctgtttcctgaattccaccaaaacatgggtctcacttacctgtcacagtgagaactgcctctggaactactctgtcctgattcatgttgtgcatccaaaagaatcttctccatgtctccattgtggatggaggatgaggatggtacgtgttccagccccccatttttcccattgccattatcattgccattgctgctgttcatgggtagctccacccaggaacctgttggacaagtcagataagttaaccacagcagaactgaaatctgtcatgtgcacacagatgtgaacatggtgaatccagataagaattctgactctcctcaaaccaaatgtaaaagtattctgaagaaaataaataagaagtaataaaagtctaaagatctatatagttctgttcctgaaatagctcatgccatcaactgagaaacagctcaaactctaaaacatctcagaaaacgtgtttttcagtcaatttctctctgggtaaagcttggtttataataacactctactgaaaactcaggttgcttttcaaaaaaaaattgctacttttaggctatttacctttaacattttagttggtgtatatatacacacacactttcttcatagtctacctaagctgctcagctgtatctgctccagaaatgaaataaatatatcacctacaaatttcataaaaggtcatctaagtaagttagcaactatatcctacttagtgcaaacaactgagaaactcctagagagggaacctaaatccaatagcaaaaatttcaatttgtgcacaaatcaggagcataaaattaatgcagctggttaactaaatcaggtaataatgctaaaaattcagaaaaaagctttatctctatctcactgattagtttcttcatttcctttgtatctcaggctttctagtccttctccttttttatacactaaacataccttgtgaacttgtcttttttcttttctctcccacgggtttctactttctagggttttcattaaaccctgttgatttgggagcagaaacaactgcacatcagc

SEQ ID NO: 10582 - DNA, 39380 bp, Homo sapiens
cagaataatatttttaaaattttattttctaagtttacctgaaattttaattttggtttcttatgtaataccagagttattaggaagttattagctaataacactattttcagtgatattttaagtatttgtcatagaaaaatttctatttttgaaaaatgtatatttaaaaatacattaaatttgtatatacatcaatcatatgtatcgatttatgttttttttgaattgcaaatgaaatttgtatttttgagttcctggaataaaataaacttgaatggattgtaatatattattcatgctgtaattcaatgtatttgaattctttaagaatgttacatttatagttaacagatattgacctataaattttctttcctataatgatgctgtgagacaatctaagaagaattaaaatttaaattcatgtattcctcctttttcctctgttctctaactgtaatatattttaattacagatggaggaacagatagatgttagataaataggtatataatatatagatcatccaaaattcttattcttatggttttatgtagtcagtatttacctctatttttctgcatgtttatccttccaatttagttcattacttcctgcacctttgatgtcatatacataaacaggaaataacacatggtggccaggatgtagagagagccacaggacttgtgaataaaatccacaggcaaggatgtggcgattcgttttgcaatattggagggaatgccaaaccctatgtttgctgtggaaaagagtatgttagttcgtcaaaacatcaaaatggtattgccatatgattcagcagctccacatctcaggatagcaaagtgactgaaagcaaagtcttgaaaaaatattttcacatccatgtttgcagcagcgttattggcaatagctaaaacgtagaagcaattgaagtgtccaacaacagatgaatggataagcacaatatgatatatacatacaatggaatattattcagccttaaacatgagggaaatattctgacgtatgttgcaacttggaagaaacttgaggatattatgccaagtgaaataagttagtcagtgaaggacaaatacagtataattccatttgtattaaagtggacagaatcatagagatggtacaatgatggttgccagaagctggggggaggaagaaatggagaagtattgtttaatgggtatagagtttcagttttacaagatgaaacgaattatggagatggatggtagggacggctgcacaatgttatgactatatttagtaccactgaactgtacacttaaaatggttaacagagtacattttatgttatgtgtattttaccacaataaaaaaataaaataccttaggaacattttcatgaaaaagcccacataaaattcattttaatgcatgtgtttatgcatagctttctatttttatcttttctctttgtattccaaattaaaaaaaagatgttttaattccaaattaaaaaggtgtttatattccaaattaaaaaaatccaaagttacagtcaactacacaaaaaaagcttagtctcattaatcattatgaaaatgcaaatggtaactgaaagaagataaaactacaattcaaagagaaagcctaaaatttcaaccccccaaaaagtctgagttttggagatctgggatggaatagggttcctaacctgacaacaatgaaacaaccaaactaacttcaaagtcatgactttatttttatagcaacgaggttgccaagaactgagtcaaaatgtgagggaaaacaagcacttgcaaggagaaagaggacagatgcacgtacataggatagatgcaaatagacaccactatgacaagtaaagctggaataatcaataaattcctaaagacaaagtggggctggtcagattgggagaccgctgacagctgcagaaattgggaaagatccatcatcttgaaaactttttccccacaaacccactgtgatctgtcaagcaattggtaaggaatccaagagagtctgtatatgacacagatcagggagagcagaacacttgggaggtgaccaggtcttgggagccgagcccttatgaatgggattagtgcctttataaaagaagctcaatggagttcttgtgtgccttccactatgtgaggacatagaaagaaggcaccatctatgaaccatgaaattggctctcatcaacactgaatttctgagcatcttgacctgagatcttacagcctcaagaagtgtgaaaaaagaaatatctgttgttttttagtcacccggtttatgttattttgttataagagtccaaatagaccaagatattccacttaatatgtaggggaaggcaacaaaaactgccacacttagaatactcctgatgctgggagtatgaaaacaggaaaaacaaaacaaaactgctcttgaaggtgaaggaggaatatcactgagctcaccaacacaaccaggaaaagaacagaagtgtgagaaggctacattcctgagaccctgagaaaaagtacctgcgtaagactgagatgaaattacataccctagttatgattgaaatcccaaaaagaaaagaggaaaaaataatggagcaaaagaaatatttttcaaaataactgcccaaaatattctaaaataagttacagaaaatcaaacttcaaatataggaaactcagagaatgtcaaatagaacaaaaagaaataagaattccatcttgaaaaatctttaaaaaatcaactctaaattttatatcttgctccaaatatatagagatataaataggttatcatcaagatgtggagaaagccatatcatggaaacactaaaataaagctgtggaaggactacattgatattagacacaacagagttcggaacaagaaatagtatcagagatgagagataatagataatagaataatcaattctcaagaagatgtaaacatcctactaattagggtatgcagctaacaacagaacctccaaatacatgaggtaaaacatgaaagaaataaaaggtgaactagaaaaatccaaaattatatttgcagacttcatctcttttgtcttagtaatggaaagactaggcacaaactcagtaatcatgtggaagttaagaacaacaatatcaccaacaagacatccaatcttcaatggcagatactctttcctttcaagtgaaaaaaaaaaaagtatggcatattctctaacaaacccagaatttttaatatttgcgttcttccttccttctttccatcttcctttctcttctcttcccttcccttgccttcttccttcctttcttcttttcctcttccttttcttttcttttttcttttcctttctttcttttctttcttttttctccttccttccttctttccttctctccctctttcctcttattcttccttccttcctccctcccttcctttctccctcccttttcttccttttctcataatctttctttctttctcacgttttctttccttttttctcccttcctcccgccctccttttcttccttcctccctcccttcctttcctctttttccttccttccttcgcctctttattttctttgtttctttgccttcctcccttttaccattctctcttcctcctttccttcctcccttcctcctttcttcctttctctgtttctgtttctttctctttctttccttctttctttcttgtgttcatgctttcttttttctcccttcctgcctttcttccttcctccctccctcccttccttccctcatttcctccttcttttctttcttctttctttctttatttccttccttccttctttttctttctttgttttcttttctttctttctctttactacaattcatattattttaaaaaaaattaagagagggagacagaaaaataaagaacgctttaatctgcaggtaaattgattatgtcttctgtaggcaaaagaatgtcctccccaaaattttcatgtcctaattcccagagtctaacatacaaatatgttaggttgcacggcagtgtgaaattagatttcaagtgaaattaaggttgcggaaaactgatagagagattgtcttaaatgggtgggatcaatgaaatcacaaacttccttataagtgaaagaagaaggcaaaagaaaggcaaccttggaggtggtggcatgagaaattactcaacatcactgaattttaagatacaagaatgaggacccagcatggtggctcacgcctaatcccagtactttgggaggctggggtgggtttatcacgaggtcaggagatcgagaccatcctggctaacatggtgaaaccccatccctactaaaaatacaaaaaattaactgggcatggtggcaagtgcctgtagtccaagctactcaggaagctgaggcagaagaatcacttgaagccgggaggcagaggttgcagtgagctgagattgtgccactgcactccagcctgggtgacagaaggagacttcatcacaaaaaaaaaaaaaaaaaagaaaaataggatataagaatgagttcatgttccaaggaataaaggtggcctctggatgccggaaaaaatcaagtaatagattctgctacatagccctcagaaagactgcagccctgtccaaaacttgatgttatccctgtgagtttcatttaaggcttctgaactacagaactgtaggattaacggtcactgtattgtaagatatgaagtttgtggtaattggttacagcagcaagaggaagtttatattgtaattgtatcatgaaaatgggaaccataatttacaactgcttttaatacttcacttggatgtttaaaatcatgtacatggaaatgatctctatgtgcatgagggatgatagcaaattgatgccaaaataatgcaaacgcaaatcttacactcatttctatgtaggtttcatttaatctttgaaattaaaatgaaattaaaagattgtgatcttttgatgaaattagactaaaatgaacaataacaaaataagaacttacttatattctttatatggtcaataaagaagtgatggtggaaaaaaacaagatcaaatgaaggtgatgatttaggaagttggaaagatagttgaaactacaaaatggtatataaccagtgaacacttagacacactgattgatgaacttcagcttttggcttgctgagagcataaaatgagagcagctgaggtttgcaaatttgtaatctccttgtggaaaaacaggggaaaacacatctcagcctaataagatttatctactaaagagtctagacttgatccatttgtccttgtaattcaaaagctaattcaaatactgatttgatgtattgtgtgaacaaccattgctgattatcatcgcatacctggcattctcttttatctgatatctaaaatatttggtaattcctggactttctcttttcaaacccagtatggtttaatttgagtcttagaacagtagtctttgagaaattcttccctctactgcatctgtgaatgggcatagcatagttacatacatactgtcactccatagaacatttgttaaattaaagccaaagtttaaagcaagagctttaacttactggttttactaatgtattcctccccaatagccacaacaatatttatactctcacaccttttagcataaagcttggtgttgtctatttttcaggtgctgtcatctatatgatctcagtattttaaaaaccagcttccagcccatatggtggttcatgcttgtaataccagcagttgagggggctgaaatgagaggattccttgagcccaggagttcaaaagcaacctgggcaacatagcaagacccagtctctatcaaaggttaaaaaaaaaagtgggcatggtgatgtgcacctgttatcctagctatttgggaggccaaggtggaaggattgcttgagcttgggaggctgaggctgcagtgatcagtgattgcaccactgcaatccagcctgggcaacaaagcaagaccctatctcaaaaaatatatataatgaaaatgaaaatcagctctcattgatttctatgtaaatatgcacaggtgatgtccatatagacataaataataatatttctgacaatgggtccatatgatcttcaaaatgtaaaatgcctatctgtgtaatttactggttagtctcattaatgaatatagattcaattctactttcttgttctagataaattatataatctagcttttcatttcacttatttactgataacaacaggaggaatgaaaagatatctattttggaaaattactctggtaggagtaaacatgaaacaatgatagaattgcacggaaaactagaaaaaagtatggtcttctgatattctatcacatcacatactaaagtcctcataaaactcagatattttatctaaaaatgttattttcatcataggaatgatcaaagcatgatactacaattgtattaaaatgtgcttgtatcacaagcacaggtgctaaaaaggaggggaaaacatcattactgatattttcaacgtatgttttactttccttcaacatgaacctcaacttgatatgatgcagattgaaggaaatcacccataattccatatgaagaaggcctgtgatattttatgggaaaataaatagagaaaatgctaacagaagccctattaagcatgaagctttatggagcaaacacaaatccagtggtgaaagatacacactagagttctgtttgttgtcctggaacaatacggtttagaggtgactggcgggtgaggagaacatatgcgagttcaccaaagagaaaagctgaatgaggcaatgcctcttcctgaccatatctcttactcagataactatataatttattgtccagtaaagggtatatttaaaaatcatattaaaagtcatgcagtgaagttgtccagggaaatcaagacttaacagtctcattctgacaaaaatgaacagggggtttccctcaagatagactaggacatgaccccacactggcagatagtagtaccagaaaagaacccatggaaaatttttaccttatgcaggctaaagtgaaagccagacataaaattctatctaaaataaatccacaatcgtagaaaatatgtggtgtacaggcatagaatgtctttactggatcattgaaatagtaagataaattcaactttttacattgttttcttttcctccagttagggcttgaggtttgtctctggagagtgactgtcaattggagccctgtctttctggggttctggtcagggggttgtggatgcttaacatgtgcctttcacaggacatttccttaccccagcagtggccaggtgtgcattccacgaccaggcctccctctcacagaacatctgttgagactaggagattcctggtgactgttgcctgacttgtgtcctgtgtatttctgacaagagcccctctcagagaccctggccaggaggagagttaggttccagtgtaggtcagctcagacccatggaggccacagaaccaaacatgggaaatcacagaagtaggtttattactcacagatccagagagaagagggtagctgagaagagggtttagctgtgtcctcagccaaatctcatcttaaattcccacatgttgtgggagggaacaggtgggaggtaattgaatcatgggggcaggtctttcccatgctgttcttctgatagtgaataagtctcacaagatctaatggttttataaaggggagtttccctgcacaagctctcgtcttgtctgctgccatgtgagacgtgcctttcaccttgtgccatgattgtgaggcctacccagccatgtggagctgtgcatctattaaacctctttcttctggaaattacccagtcttggacatgtctttactggtggtgtgaaaatggactaatacagtagcacacctcatagggctgaacaaaatggggaagatgagtggggagcaggagagagaaaagtggtctgtgggactccagcctttattgggtccagatcattacccatataagttttccacggggcactagtcggtggggtgagtgccagcaggcacatttcttgactcccgctgcaactgagcaggtcactctggcgtgtgggggctgtccatgtgcgctgtgaggtctgtggggtgagtcaggtaggttgtatccaacggttccatagctggtagtcaccaggaggaggcaactgtgtagggtcgatatctgggcaagccacactgaggaactgtgagggttagaactggaaattgtcaagagaatctgaacccagctaccatatgagagagttcaacttatgttcaatgtgaatgccatggcaatattaaaaagtaagaattcactccatacgtgcttgaggtaaataggagaaacctagaatttatgtaaacagtgagaagattggatgcgttttccatcacatattttaatactagcagcatatgatatatgtcaatccatcaggcattcagaaatacatgcttatgaaaaatttttgcaccatcagacaaaagacaagggtagaagacatttgtaaccctataaacactagtaaattaaaaacagaaggacctttatgtcctaacatatctgtgttgtgaaaggctgccctgtgaaatacgagatttcttaaacatattttaaaaatcataggtgtcaatattttttagaaatcaatttaaattttctcttgctattttacaatgcctatttatttatttagtggctctgctgattttgacgtatatcctaaactttatattttctttaaaggatgttttatacaactttatgtaaaatgtttcagtatcttcacattctctccctgtccttttgttttgctcttatatggtggtcttgagtcttttctctggcttttcaaacctagtaagactaagacactaaagtaactttgcccgtggtttggtaatgccttctaaagcacatcctaagctctcgtgcataggggggcctcctttgagctctgtgcttttgagatcccatatacctaaattccagtactccaaatcagtactgctcagttttagttactaagtttaaaaatgtaatttaatagcaagttagtttagtgcactcttgcttctttcttgactgcttgtatacatgtatattcctttaaatgaatcttggaacttatttaaaaattttaaattatactaatgaaactgtatattgttgtgaattcataagtgaatgtggaaagaatttgtctttatgatagtaaatcctttttatccaagaatcatatgtgtctttatatttattccagtctatatttatatcactgagtaaatatatagaaatgtagatacatacagctgtagttctagatacaaatatagatataacatgttaaatctatatctatcccatataacatatatacatgttatatttgtgtgtgtatatatatatgtttatattattaaagagctcccttaaaatttttcttttatttcctatataattttaggtcgagcttgaattttccttgtataaacaagcaaatatttatactagttttaatactgatgtttaggcattctatcttattttaacattgaatattttcacaattattataaatattatctaatattaataatgtacctgttaaaaatatttaaaattttacctttgaattattttattgttgaattaaaattcctttaatatgatagtaaatttctatttcatgctttctctttgcatatgcaaattaatctatccacttctctatctctatgtagtaacatatgaaaatcaggcctctcttcttctaatggacatacacatgtttgcatatagaatatcagactctttatagcatttaaaatctttaaagacatgaatattgccttttaacaaatatattttagcatgtactgagaatcccctatttatttttaatttgggctaatcaatatgattattaatattattggattaccaaatttggaaacacactttcatccccaaggtggatatttgttttttttttttttttgccaatttcttctcttactgtttcaaacattgttggatattatttttattttatttggcattttagtatcaacatttctaattgatgtactctacatattttttcttcaatatctggtgggttttataattactgctatgttggatttgtagtagccattgacaaaaattattcctgtatgttttatagctgtatgaaggaaactaatatattttacccctaaatatatttccttgatatatttcaaaatggctattgagaagggctggaaatgcaaccttagctgcaaagctgtcttggggatatttgcatcagtagagaatctgccttgatgcagccaggctttctctgaggtctgccccttgtctggatctaggaaaggttaactgagagtctgaggtccccaaaaggtctgaaagaaacattttctgtctattctctctgaggactgctcccagtgaggttccacctatgtaataagtccactgttgctagccagcgtcattttctcacataacctttttttttttttccctgtgatccaagaccccattctttctgttaacttcatgtggtaaataagcttctgcacgcatcgtgtgtctgggtcttcgttctaagggctccagtgtacacacattgcagaaacctgtatgccttttctatttatctgcctcctattagtgattttcagggaaacttcagaaggcaaaagggacattctcctttagcccattctcatacaaaatctcccaacatttaactgattcttaatagcttaaaatcactttgaaaaatccatatatttataaccttttcttccctctatgatttctggtcagcttgggttttgtttttcattccatttattcatcctcgaaaagatctattttacgtctatttattctcatttatggacattgagaaaagaaaataactttcatgtgagaaatgcaagtccttttaaataatcaggcccagagagatattcaaatgagacagcagttctgtcctgctcctctttgagctgtgtgttcatctaggctgcttgctgttgccactgtagctataaattaaccaataacgccacaccagacactataatccacacccaataatagtgtaacagtgtatagccagtcactaataaatgttatttccataagccaatgagaatttgtgacaaacctctttgcatcatcccacttctggacccttttttgcctttaagaaactgcttgttgcaaagctccaaagggagttcatatccaaggatacttgggtctgtttcttccaggcagctgtcctcgttttggctcaagtaaactctttgaattaccttttgtgcttcagccccttccacttagattaacaacatggatttgtgtcaccatgtacggcaattaaaatgtttacacttttcccctcgagggcactgatgtgttttcctgagcacttggaatagctacgtagtgtttgctgtctagattatggtttctcaaccttggtgctacttacctttaggaccagaggattctttgttgtgggaggctgccctagcaatgctaggtgtttcgtttgacctctaaatttcacacctccaccagtcttgacatccccacaataaccctagacattgacaaatgtctcctggggaaaactctccaccagttgacaggcaaagttctggaaatattggaattgtcaattgagattttatgttatccaaaacaaatatttttctttgtttttaaacatctacttccatctacttatctacttatttttacttttatttgtaacttaattccatcaaggagagagagtgcattttctgttatgctaaatttttgaagaatgtattgattttttatgacctgatatatggatgatatgtagatattacatgtttgtattatcaaatttcagggcgataataaaataaatacttataatatttatatagtcactgtatattagttattttctttcttcactacaggagtttttcaacctataggctatttttcaattctaggttatccagtagattttgaaatgttatgattaaatatctacttctgaagcattcatctttgcaaatgaaacaatcccaagctcttataatgcacatcatataaagggcagattagtcaatatatggttcagaaataattatgtaatatttataagaaaattaaaaatttagatccttaactcagataacaataatccaaattaaaatttgatttcattacataatgtaaaatgacaccagaatactagtaaaaatgtagataagtttatataatcttttttagctgtaggactttattagcataaattcaaatacaggaaccaaagtaagattgagacctatagtcaaaggttaaaatgtacacattataggggcatgattaaactaatttaaagcataataacatggagaaatattgcaaaacatacattttactgaattgttaatatctaatcattatgtgagaacaaaattaaagagtagctacacacgcacacacccacacacaaatgcaatattgtcaaataaacgatgttcagctacactagaaatcacaactgtgttttctccagagaaaagattaaaaatcacaataatatttattgtacatatggaggtaaagatactcaaaatattaccctaaaatacatttttttttgagatggagttttgcttttattgcccaggctagagtgcaatggcacaatcttggctcactgaaacctcagcctcccagggtcaagtaattctcctagctcagcctcccaagtagctgagattacaggcatgcaccaccacactctgctaatattttgtatttagtagagacggggtttcacgatgttggtcaggctggtctccaactcctgacttcaggtgatctacccacttcagcctcccaaagtgctgggattacaggcgtgtgcctgggcagctttttgacatatttcaagatggctactcggaagactggagatagcttcttctacaagaatagctgaaaagctgtgtttgttggggagatttgcattcgtagagaaaatctgcattgatatagacaggctttccctgagatactcacatgtctgggtttaggaaagattaactgagcctggcacgtttacatttctaaaaaccatttcctatctatactttccaagagaagggctgctccctgtgaggtttcatccatgtaacaagacaacctctgctgccaggctcctctttcttccttgtcgtcacctgtcttccgcaaagcctgatttaccaacctacagctctgtgttttctgtaacctcaagacagcataggcgagttgactaccttgcctttcctggagtttttatatatatagtatatatttgtatatctatttataatatacaaatatttgtatagatatatttatatatattatgtaaactccaagtgcatacttgtgtacatatctgtaaacctttctttcctgttaatttgtacattatcagtttgttttatagactcaaataattaaagcttcaagggaaaaagttaaactttcctatagagaaaagacaaatatataggtgacaaataatatttagagtgtaagatgctttttaaaggtatatttgcaatttgtgtcaaaacatttaaatatacatttgttattttaactataaaatttcaaataatttaagccaaatacatagtatatgcagaaaatttagcaatatatctatgtagcaccttactgtgcattactgtaaccagccgtctaatataaagaattaattaaggtagcagctacttttcaaatagcgcatttttttcacagacctattaaataagacaaataacatttaaactttatttttaaatttgcagaatagtagttttcagcagatggtttattttagcaaattccatcttcacattgtgctatgcttttatgagttccagctgttaacggataatattttagtgctgaaactatcatgtgtgatataattgctcattatgtgccttaaaacacaagcaatataattattttcaacttggagcaaattaaaatcttatcagcaatttaaaaactctagagtcgtcttcttctggttaattattttaaacttgtatttttctctttatgtttttagtgagttgtcttatcaaggagaagaactcaagctgattattctttttttttctcttccatccacctcgcaggtgtgttaataatttcatttctgagaaaatgttctttcatatccatcttacaagatgagagaccttttaacgtctttcattccgatgtgataccagtaatggaaaatattccagcttcacgaatatggtgatacaaatagttatccatctaacctctgtcagtgccaaatgtttactttactcagtgaattactcagttgactggtaatttcttctgaaatcactaatgagagggtcagaggtctggctgtggtctgtacctcatgtgactcccagtgcagacaattgtttctatggagcacagacagttgaaaggattgacttcctgcctagaatagtttctgctgtgctccttatctttctttcttttttttgtttttattatactttaagttttagcgtacatgtgcacaatgtgcaggttagttacatatgtatacatgtgccatgctggtgcactgcacccactaactcgtcatctagcattaggcatatctcccgatgctatccctctccccttcccccaccccacaacagtccccagagtgtgatattccccgtcctgtgtccatgtgatctcattgttcaattctcacctatgagtgagaatatgcggtgtttggttttttgttcttgcgatagtttactgagaatgatgatttccaatttcatccatgtccctacaaaggacatgaactcatcatttttgatggctgcatagtattccatggtgtatatgtgccacattttcttaatccagtctatcattgttggacatttgggttggttccaagtctttgctattgtgaataatgccgcaataaacatacgtgtgcatgtgtctttgtagcagcatgatttatagtcctttgggtatatacccagtaatgggatggctgggtcaaatgctatttccagttctagatccctgaggaatcgccacactgacatccacaatggttgaactagtttacagtcccaccaacagtgtaaaagtgttcctatttctccacatcctctccagcatctgttgtttcctgacattttaatgattgccattctaactggtgtgagatggtatctcattgtggttttgatttgcatttctctgatggccagtgatggtgagcattttttcatgtgttttttggctgcataactgtcttcttttgagaagtgtctgttcatgtccttcgcccactttttgatggggttgtttttttcttgtaaatttgtttgagttcattgtagattctggatattagccctttgtcagatgagtaggttgtgaaaattttctcccattttgtaggttgcctgttcactctgatggtagtttcttttgctgtgcagaagctccttagtttaattagatcccatttgtcaattttggcttttgttgccattgcttttggtgttttagacatgaagtccttgcccatgcctatgtcctgaatggtaatgcctaggttttcttctagggtttttatggttttaggtctaacgtttaagtctttaatccatcttgaattgatttttgtataagttgtaaggaagggatccagtttcagctttctacatatggctagccagttttcccagcaccatttattaaatagggaatcctttccccatttcttgtttttctcaggtttgtcaaagatcagatagttgtagatatgtggcgttatttctgagggctctgttctgttccattgatctatatctctgttttggtaccagtaccatgctgttttggtgactgtagccttgtagtatagtttgaagtcaggtagtgtgatgcctccagctttgttcttttggcttaggattgacttggcgatgcgggctcttttttggttccatatgaactttaaagtagttttttccaattctgtgaagaaagtcattggtagcttgatggggatggcattgaatctataaattaccttgggcagtatggacattttcacgatattgattcttcctacccatgagcatggaatgtttatgccaggcagagacacaacaaaaaaagggaattttagaccaatatccttgatgaacattgatgcaaaaatcctcaataaaatactggcaaaacgaatccagcagcacatcaaaaagcttatctatcatgatcaagtgggcttcatccctgggatgcaaggccggttcaatatacgcaaatcaataaatgtagtccagcatataaacagagtcaaagacaaaaaacacatgattatctcaatagatgcagaaaaagcctttgacaaaattcaacaacccttcatgctaaaaactctcaataaattcggtattgatgggacgtatttcaaaataataagagctatctatgacaaacccacagccaatatcatactgaatgggcaaaaactggaagcattccctttgaaaactggcacaagacagggatgccctctctcacccctcctattcaacatagtgttagaagttctggccagggcaattaggcaggagaaggaaataaagtgtattcaattaggaaaagagtaagtcaaattgtccctgtttgcagacgacatgattgtatatctagaaaaccccattgtctcagcccaaaatctccttaagctgataaggaacttcagcaaagtctcaggatacaaaatcaatgtgcaaaaatcacaagcattcttatacaccaacaacagacaaacagagaggcacatcatgagtgaactcccattcacaattgcttcaaagagaataaaatacctaggaatccagcttacaagggatgtgaaggacctcttcaaggagaactacaaaccactgctcaaggaaataaaagaggatacaaacaaatggaagaacgttccatgttccttatctttcttgtggagatttcagataatctgaattgcttttctatcttaagaaaaaatgcaacaattctcccacctgagaggaatgtaaactgtagtaagttagcagaaccaatccgtaaaatttttacattgtttgttgcaaaatgcagcgctggggtctccttcactaaccttttctatccctcattgctctttctttgactgcaataggttacctctgggcaaatctgtattcccgagaaagagtgcccttttggtgagctataagcacactcaatggtgggctgaaatactagcttttatctatggcgaaatggaatcatatcagtgatttttttaaaaaggaaatttaactcttgctatggtttgaatgcttgccccttccaatctcatgttaaaatttgatccccaatattgcaggtggggcttactgggaggtgtttggtcatggggttggaccttcatgaatggataataccctcccttaggaatctaaaggtatcctccctcctcggtgccctcaggaatgggtgtaccattctttattcacttataattcctccacccatcctttttgagatattaattacatgtatgttacactgctgcatattgtctgacgtatcagtgagtttctggctttcttattttagtttaacctttgtcctttagtttgtaaagcttctatttttttctataaattttctgatgttagggtaaaatccattacttattctatctcatggaatttttatttcaaatatttattcttcatctatacatgtcacatttttcattttataacttctatttttctcctatgttcaattttcatttaagtaccttgacatatatatgtattcatctatatgtatttataaaatatatttactttaaggaccttgaaatttccttcttctctgtcatttataaatgacttatttttatcctattaatatatatcttaattatatatatcttacggcttctttgcatgtcagagtttttttttgggtattttggtgttatgctattgaatatctagattttattggctacctttgaacaatgttgtggcagacagttcagtaacttcaggatgagtatttgtctgttgttgttttaaatcttctctttaaactttgtcgagttagtctagagccatctgtaatttggagctaaatgagcactgtctctagggcatgaacctccagtggtctttactgaatatcctggaggtacagaggggattcccttctctggctggtcagagctaacgtgtcttcctgtcatgtgaagccagggaagtgttcttcttccaactccctggtagagtcctttgctgagctccttagaatttcatcctatgtacatttggcttagggacttgggagaatccttaggctgaatcttggttcctttttctgtaaacgttctcttctattacacattccagctgcttaaccttttttgatttttatctggttcctcagtgcaatgacaatgtctgctctctctgggattcctctctactgctgtcacggagaatctgggaataaagcaggactcattctggctccttctcttctcttgcagagcacagtcctacgctgcctgatgttcagtacttcaaaaaaatgtttcatatattttctccagtttactattctttaaaagagtaactccagtcccagttacagcatcatgttctgtaactctactccttgttgcttcattctgccattgtctggtatgatcgcccctttcccttctgtaatcagaccaagagcataatataacactagttataactgcacagcttgcctccgttgtttaaaaaaatcactgagacttaactgtgtacaacttttaaaatttgaatataagtacaactaaagctatattttggttaatatttgcattgcatgcttttccattatttactttcaacatatgtgaaatatgaatatagctccctctccctctccctcttgtctccccacggtctccctctccctctccctctccccaaggtctccctctccctctccctctccctctccccacgttctccctctgatgctgagccaaagctggactgtactgctgccatttcggctcactgcaacctccctgcctgattctcctgcctcagcctgccgagtgcctgcgattgcaggcgtgcgccgccactcctgactggttttcgtatttttttggtggagacggggtttcgctgtgttggccgggctggtctccagctcctaaccgcgagtgatctgccagcctcagcctcccgaggtgccgggattgcagacggagtctcgttcactcagtgctcaatggtgcccaggctggagtgcagtggcgtgatctcagctcgctacaacctccacctcccagccccctgccttggcctccaaaagtgccaagattgcagcctctgcccggctgccaccccgtctgggaagtgaggagtgtctctgcctggccgcccatcgtctgggatgtgaggagaccctctgcctggctggccagtctggaaagtgaggagcgtctctgcccggctgccatcccttctaggaagtgaggagcacctcttcccggccaccatcccatctaggaagtgaggagcttctgtgcccggccgcccatcgtctgagatgtggggagcgcctctgccccgccgcccggtctgggaggtgaggagcgtctctgcccagctgtcccatctgagaattgaggagaccctccgcccggcagccgccccgtctgggaagtgaggagcatctccacccggcagccaccccgtccaggagggaggtgggggtcagcccctgcccggccagctgccccatccgggagggaggtggggggtcagccccccgcccggccagccaccctgtccgggaggtgaggggcacctctgcccagccgcccctactgggaagtgaggagcccctctgcccggccaccaccccgtctgggaggtgtacccaacagctcattaagaacgggccatgatgacaatggcggttttgtggaatagaaaagggggaaaggtggggaaaagattgagaaatcggatggttgctgtgtctgtgtagaaagaagtaaacatgggagacttttcattttgttctgtactaagaaaaattcttctgccttgggatcctgttgatctatgaccttacccccaaccctgtgctctctgaaacatgtgctgtgtccactcagggttaaatggattaagggcggtgcaagatatgctttgttaaacagatgcttgaaggcagcatgctcgttaagagtcatcaccactccctaatctcaagtacccagggacacaaacactgcagaaggcctcagggtcctctgcctaggaaaaccagagacctttgttcacttgtttatctgctgaccttccctccactattgtcccatgaccctgccaaatccccctctgcgagaaacacccaagaatgatcaataaaaaagtatagcaatttataatgtttgatttatcattagcctattggcgtgtaataatactttgcatacttttaaaattctggggttggattaataataaaagagtagaaacattaaaaaaatatgaatataaattataaaaattttaagagagtccatttaaaaaatctggtctagttatgttttacctggtttaatacaacgtgcattcttgaattcagggtctaatataatggctacatttgtctatttgcaaaaaaaaacttgacaatattttaaaattaatttatccaactcgcaacttatatgcttctgccgttgtatggaagatacattttaaactttatgagatagcattctgttatacagttgatatctaattaaatttctctctatgtttatttctttcattaaaaaaattgttcttctaactgcaaactttcatcagggatcatggctcttctacctgaagaataatctttagtatttcttttcctgtgggtcttcttgggagaaattctttattgtatctttgcttttgatggatatgtccaccaagtagacagttctaggtcagcacatattttatttcaggacttgaaagatatcaatacctcacttgttggctttcgttgtttcatttgagaaatttgttatcagtcaactctttctctttgtagttaccccaatttttttatcaagtgctctttacatttttcttttacttttcagaaattgtcccattatgtttctagatgtgtcctctgtgtgtgttttcctttgctttcaaaagcctcctgaacctgtggtttaatattattggtcaattttgataaaacctctaacattgccacttaaaatgctgttcagacacgctgttttctccttcttagatttcaacgtgttagattattactctatccttcatattttttaaatgaccttactctacaatttcttttagttggttaatctgtattactgtatattttgtattttattctattttattttattattataccttaagttttaggatacatgtgcacaatgtgcaggtttgtatcataagtgttcatgtgccatgttggtgtgctgcacccattaactcgtcatttagcattaggtatatctcctaatgctatccctccccactccccccaccccacgacagtccccgaagtgtgatgttccccttcctgtgcccacgtgttctcattgttcaatacccacctatgaatgagaacatgcggtgtttggtttttggtccttgtgagagtttactgagaatgatgatttccagtttcatccatgtccctacatagggcacgaactcatcgttttttgtggctgcatagtactccatggtgtatatgtgccacattttcttaatccagtctatcattgttggacatttggggtggttccaagtctttgctattgtgaataatgccgcaataatcatacgtgtgcatgtgtctttatttcagcatgatttatagtcctttgtgtatatacccagtaatggaatggctgggtcacatggtatttccagttctagatacttgaggaatcgccacactgacatccacaatggttgaactagtttaccgtcccaacagtgtaaaagtgttcctatttctccacatcctctccagcacctgccgtttcctgactttttaatgatcgccattctaactggtgtgagatggtatctcattgtggttttcatttgcatttctctgatggccagtgatgatgagcattttttcatgtgttttttggctgcataaatgtcttcttttgagaagtgtctgttcgtgtcgttcacccactttttgatggggttgtttgtgttttacttgtaaatttgtttgagtttattgtagattctggttattagccctttgtcagatgagtaggttgcaaaaattttctcccattttgtaggttgcctgttcactctgatggtagttccttttgctgtgcagaagctctttaatttaattagatccgcttcgtcaattttggcttttgttcccattgcttttggtgttttagacatgaagtccttgcccatgcctatgtcctgaatggtattgcctaggttttcttctggggtttttatgattttaggtctaacatgtaagtctttgatccaagttgaattaatttttgtataaggtgtaaggaagggatccagtttcagctttctacatatggctagccagttttcccagcaacatttattaaatagggaatcctttccccattgcttgtttttgtcaggtttgtcaaagatcagacagttgtagttatgcggtgttatttctgagggctctgtcctgttccattgatctatgtctgtgttttggtaccagtaccatgctgttttggtgactgtagccttgtagtatagtttgaagtcaggtagtgtgatgcctccagctttgttcctttggcttaggattgacttggtgatgcgggctcttttttggttctatatgtactttaaagtcattttttccaattctgtgaagaaagtcattggtagcttgctggggatggcattgaatctctaaattaccttgggcagtttggccattttcacgatattgattcttccaacccaagagcatggaatgttcttccatttgtttgtatccttttatttcattgagcagtggtttgcagttccccttgaagatgtccttcatgtcccttgtaagttgggttcctaggtattttattctccttgaagctattgtgaatgggagttccctcatgattgggcactctgtttgtctgttgttggtgtacaagaatgcttgtgatttttgtacattgattttgtatcctgagactttgctgaagttgcttatcagcttaaggagattttgggctgagacaatggggttttctagatatataatcatgtcatctgcaaacggggacaatttgacttcctcttttcttaattgaataccctttgtttccttctcctgcctgattgccctggccagaagttccaacactatgttgaataggagtggtgagagcggacatccctgtcatgtgccagttttcaaaaggaatgcttccagtttttgcccattcagtatgatattggctgtgggtttgtcacagatagctcttattattttgagatacgtcccatcaatacctaatttattgagaatttttagcatgaagggctgttgaattttgtcaaaggccttttctgcatctattgagataatcatgtgttttttgtctttggttaggtttatatgctggattacgtttattgatttgcatacgttgaaccagtcttgcatcctagggatgaagcccacttgatcatggtggataagctttttgatgtgctgctggattcgttttgccagtattttattgaggatttttgcatcaatgttcatcaaggatattggtctaaaattctctttttttattgtgtctctgcccggctttggcatcaggatgatgctggcctcataaaattagttagagaggaatccctctttttctattgattggaatagtttcagaaggaatggtaccagttcctccttgtacctctggtagaaatctgctgtgaatccatctggtcctggactcttttttgttggtaagctattgattattgccacaatttcagagcctgttattggtctattcagagattcaacttcttcctggtttagtcttggaagagtgtatgtgtcgaggaatttatccatttcttctagattttctagtttatttgcgtagaggtgtttgtagttttctgtgatggtagactgtatttctgtgggatcggtggtgataaaccctttatcattttttgttgcgtctatttgattcttctctcttttcttcattagtcttgctagtggtctatcaattttgttgatcttttcaaaaaaccagctgctggattcatgaatgttttgaagggttttttgtgtctctatttccttcagttctgctctgattttagttatttcttgccttctgctagctttggaatgtgtttgctcttgcttttcaagttctttgaattgtgatgttagggtgttaattttgggtgggggatctttcctgctttccttgtgggcatttagtgctataaatttctctctacacactgctttgagtgtgtcccagtgattctggtatgttttgtctttgttctcattggtttcaaagaacatctttatttctgccttcattttgttgtgtacccagtggtcattccggagcaggttgtccattttccatgtagttgagcagttttgagtgagtttcttaatcctgagttctagtttgattgcactgtggtctcagagacagtttgttataatttctgttcttttacatttgctgaggagagctttacttccaactatgtgatcaagtttggaatgggtgtggtgtggtgctgaaaaaaatgtatattctgttgattttgggtggagagttctgtagatgtctattaggtgcgcttggtgcagagctgagttcaattcctgggtgtccttgctaactttctctctcgttgatctgtctaatgttgacagtggggtgttaaaatctcccattatgattgtgggggagtctaagtctctttgtaagtcactcaggacttgctttaggaatctgggtgctcctgtattgggtgcaaatatatttaggatagttagttcttctcattgaattgatccctttaccattatataaaggccttatttgtctcttttgatctttgttggtttaaagtcgattttatcagagactaggatggcaacccctgcctttttttgttttccatttgcttggtagatcttcttccatctctttattttgagtctatgtgtgtctctgcatgtgagatgggtttcctgattacagcaccttgatgggtcttgtctccttatccaatttgccagtctgtgtcttttaattggagcatttagtccatttacatttaaggttaatattgttatgtgtgaatttgatcctgtcattatgatgttagctggttattttgctcgttagttgatgcagtttcttcctagtctcgacggtctttacaatttggcatgtttttgcagtggctggtaccagttgttcctttccatgtttagtgcttccttcaggagctcttttagggcaggcctggtggtgataaaatctctcagcatttgcttgtctgtaaaggattttatttctccttcacttatgaagcttagtttggctggatatgaaattctgggttgaaaattcttttctttaagaatgttgaatattggcccccactctcttctggcttgaagagtttctgccaagagatcagctcttagtatgatgggcttccctttgtgggtaacccgacctttctctctggctgcccttaacattttttccttcatttcaacttttgtgaatttgacaattatttgtcttggagtttctcttcttgaggagtatctttgctgcattctctgtgtttcctgaatctgaatgttggcctgccttgctagattggggaagtcctcctggataatatcttgaagagtgttttccaacttagttccattctccccgtcactttcaggtacaccaatcagacgtacgtttggtcttttcacatagtcccttatttcttggaggctttgttctttttattgttttttctctaaacttcccttctcccttcatttcattcatttcatcttccatcactgataccctttcttccagttgattacatcggctcctgaggcttctgccttcttcacgtagttctcgaaacttggctttcagctccatcagatcatttaagcatttttctgcattggttactccagttatacattcgtctaattgtttttcaaagttttaaactttttgctattggtttgaattccctcctgtagctctcagtagtttgatcatctgaagcctccttctctgaaatcgtcaaagttattctctgtccagttttgttccattgctggtgaggaactgcattcctttggagaggagaggcactctgctttttagagtttccagtttttctgctctgttttctccccatctttgtggttttatcaacttttggtctttgatgatggtgatgtacagatgggattttggtgtgggtgtcctttctgtttgttagttttccttctaacagagaggaccctcagctgcaggtctgttggagtttgctagaggtccacgctggaccctgttttcctgggtatcagcagcagtggctgcagaacagcggattttcgtgaaccacaaattcagctgtctgatcattcctctggaagtttggtctcagaggactacccggccgagtgaggtgtcagtctgtccctacaggggggtgcctcccagttaggctgctcggtgttcagtgacccactttaggaggcagtctgcccagtctcagatctctagttgcgtgctggcagaaccactactctcttcaaagctgacagggacatttaagtctgcagaggttactgctgactttttgtgtgtctgtgccctgcccccagaggtggagcctacagaggcaggcagacctcctggagctgttgtgggctccacccagttccagctgcctggctgctttgtttacctaagaaagcctgggcaatggcgggccccacttccccagcctcactgctgccttgcagtttgatctcagagtgccatgctagcaatcagcaagactccattggcataagactctctgagccaggtgtgggacacaatctcctggtgtgccgttttccaagcctgttggaaaagtgcagtattagggtgagagtgacccgattttccaggtgccgtctgtcacccctttctttgactaggaaagggaactccctgaccccttgtgcttcctgagtgaggcaatgcctcgtgctgcttcagcttccacacggtgagctgcacctactgtcctgcacccactgtttgtcactcccttagtgagatgaacccagtacctcagatggaaatgcagaaatcacccatcttctgcgttgctcacgctgggagctttagaccggagctgttcctattcggccatcttggctccacccctcatttcattatttcatcatttcatcatttcacttcatttcatcatttcatttcatcatttcatgccatttcttcatttcatcatttcatcatttcatttcatttcaccatttcacctcatcatttcatttcagcatttcatttcatttcttcatttcattccaccatttcatttcattatttcatcatttcatcattccatttcatcatttcatttaatctcatcatttcatttcatcatttcatttcatttcagcgtttcatcatttcaccatttcatttcatctcatcatttcatttcatcattttatcatttcatttcatttcatttcatcatttcatcatttcgtttcatcatttcatttcatttcatgtcatcatttcatttcatttcagtgatacatgtatttaagtgttaatgtgatgcccaggagacacactatttccctttgtaaaacacctccttcaacaaaagtcaacctctcatggctggctaagtctacagggataccagcctctcttcaactacccaatttgattcagaacctcaaacagcaccgcagtttcataaaaacctaaaacatatacacaacacttggttgtaagtgagccaacagtttcttgtctctttctctgctcaaggcttaaggccatgtctccccaactacgttcagtggaagaaaagatcccctggacaaataagtttgagaactgttgttgcaggacttctgagaacctttaaaacacaaatcctcatctgcagggatcttcaggagggagatggctgatgcagcacaactttctttcacaggagcatcttgcagaatacagtatgagatacagaaaggctgcattgagtctttttaagggcctgggccttggtggaggtggggtaggagctctccagatagcatctaatgagtaggaacattcaggttgctttttatttccttactggcaaaactgtgtgtgcatcatgaatgaagccggtctcccttatccatatcaaaactaaacccaaattaattggctgaattgggactcaacacctccaggagccatgcggaagaaagccccaccacactttacagtagcttacctaatcatatttgatgaaagcaaaacgcttatgaccagtgtgctgctaatacaagtcaacagataatgctgtaggaaaaattatttttcccaatcatagcttccatagcccacattttgcattacactttccccccttttttaaaattttaaacacaggtccttttctctccttttttaaaattttaatttaattatacaagacagactctcagtatgttgcccaggctggtcttcaattcctgagatcaagcgatacatccgtctccgccttccaaagtgctgagattacagccctgagacactgtgcccggccttaaacacaaatcttaattcattcttacaattatcctgaggttagaaaaatggaaggggaagaaaaatagcaagcaggtaggctgacttcggcttcattatttggaaggacagtttgctcggttaaaacacactactgcccacaaaggccaagataacagaaaaatacagacatataaatagattttatatgtgacagcagtttgaatggagactttttcaatgcaaatgacaaacagctgtgcttgggaataaatgacaacgaattttttttatcttaacagctgtcctgagagcatgtctctacatctctacctgcattctggagtcagggagaaagccaaaacggatgacaagacactagatcagccgtgtccaaccctttgactacaaggacttttccacctatctgtggttgtgggtatcatgaaaattatgcacaaacttttttttttaagctcatcagctatcgttagcagtagtgtattttatgtgtggcccaggagcattcttcttccaatgtggccctgagaagccaaaagactggacacctgtgcactagatcaaaaggctactccttctggaagcaattgtaaagaatttctgacattatcttgacatgaaaaccaatggatagtgggacagaatgaaaaatcttcaagaatttttcttgttggtttttttttttttgagtcaaggtgttgctctgtggcccaggctggagtacactggcgagatcacagctcagtgcaggctcaagtgctcctcccgcctcagccacagtagtagctaggactacagatgcgcacaaccactcctggctaatattttattttttgtagagatagggtctcactatattgaccaggttggtctcaaactccttgactcaagggatccaggacaggataacaggcatgagccaccacacctggctatgcgcatgaactttgaagacaaatacaaggctccacaaaagttaaggttttcccacctaatttccagggaatcttttggtgcaaggatgagaaacccttaaaagtacgcagacaactccaaagattcaagagagttcattcgggctgagccagcccactgggcagactgaccttcaagcaaggcccacccatgacatacaccagatggctctccaagaatctctccacttctcagggtccctaaagtactggacagagctaggaaagcaaacccatttgcttattgctgcacgaaaccccttgaggtcaagaccccacaatcagacaagaatggagtggctcaccctcagtcaacaggccagactcaaggtggtataatgtcttaaccaagggtgtgggactccaggtctgaatctcaactcagttctcctttgataaccacaatttgttaattttccttaacaggggttcctgacaagtcatttctccctcaggccttcggtttcctcacctacaagatgagaaggctgcaccagatggaaattcggggtgtaaggggacgtccgcgcacagcccaccccacccacgggcccctcgagcctccatcaaagttcccaacacgcacccaccccacaaatcctgcccaaggtgagggctggtcccaggtcctccggctgctgcatcagcgagtgcaggagggaggagaagcctccaagggagagacgcgggctcaagcatgcaactcggccgggagtgaactggggccccgagggagatgtccagtctggtgctggagcccaaccctggtccccgacccccttatctccactgtccgtatctcctgctgggtgaggtccttggacacagtgcacttggtgcgcagcccgcgcaggctgccaatggagatgccgatgagcttctggagctgcctgcagggctgcagcgcccggctggccgcggcccctgtgcctccctccgcgatagccgcgtcacccccgccaccgccctccttcttctctcccatcggggcctagcgcagcgcccctctatgcaggctgcagtggcccaggagcggagcctggggcgcgggtgtctaggcaaggaacccccgaaccaggagagctagatcaggagtgaccctcggagctgccttagccaggacgccagtagatctggaagccgagtctgacgatcccgccctcagacccgcggcggtgggggcaaaaacccgcgacggcggggtgaaaaagcctcagcggtaaaaacctgccgcagcggcagtaaaaagccgcatgggcaagaagccatggcggcggggaaaaagccacggtgatggcaaaaagccgcggcggcgggggcaaaaagccgcaaaaagccgcggcggcgggcgcaaaaagccgcaatggtgggggcaaaaagccggggcggtggcggaaaaagccggggcgatgggggcaaaaagccgtggcggcgggggcaaaaagctgcggtgatgggggcaaaaagccgtaaaaagccacagcgtcgggggcaaaaagccgcggtggcgggtgtaagaagccgcggcggcaaaaagatgcggcggccgggacagaaagccgcggcggcgggggcaaaaagcaggggtggcaaaaagtcacggcggcggcgggggaaaaaagccgcggcaggaaaaacctgaggcggcgggggaaaaaagccgctgcggcggggaccaaaagccccaaaaagccgcggcatcgggtgccaaaagccgcaaaaagccacggcgaaggggctaaaaagccgcaaaaagccgcggcagagggggcaaaaagcagcggaggcaaaaggccacgacggcgggggcatgaaaccgcaaaaaccctcggcggcaggggcagaaagccgcaacggcgggggcaaaaatcaacgggggcaggtgcaaaaagccgtggcggcaggggcaaaaagcaacgggggcgggggcagaaagccgcggcgaggggggcaagaagccgcggcggcaaaaacccatggcggcgggggcaaagagcggctgaggtgataaaaagctgcggcggcgggggcaggaagccgcgtagggggcaaggagccgcggcggagggggcaaaaagcagcaaaaagcccaggcgtaggggcaagaagccgtggcaggaaaaacctgcggctggcggggggaaaaagccgcagcggcgggggcgaaaagctgtaaaatgccgcggtggcgggggccaaaagccgcggcggcaaaaagccacataaagccggggcggcggggcaagaagccgcagcgggagaaacctgcggcggcgggggcaaaaagccgtaaaaagctgcggtgctgggggccaaaagccataaaaagccgcggtggaaaaagtcgcggtggcggaggaaaaaagccgcaaaaaccgcggcagcgagggcaaaaagccgtggcttccggagcaaaaagccgtggcggcgggggcaaaatagtggaaatggtgtagaaggccagcacagcttggcattcctggagtgttatgtggaaggaaaagtgcagaggaagacaaacaaagatgtaagtaggcttgactcagtgcaactaagaacccagatgttatctatcagctaattttttgtattttagtagagaaggggttttaccacgttggccaggatggtctcaatctcctgaactcatgatccgcgcacctcagcctcccaaagtggtgggattagaggcatgaaccacaaagtgctcaaaaaatctattaattaaaaaatgtgtatgtagccatctttaatctaccatgtccattagcagataagtactataagcaaaataacaacaatgaaagaaacattgacttagagtagatactctgatttatttaataaaaatttgaaaatagaccaaattatgacaaaaaaaaaatctgttactattgaggatgagggttagtgtttggaaaggggcaggagaagtatctctatttttagtaatgttctattttcatacatggttataagcaaatacatgtgtttcattaatcaagctatctatatttaatcattgtacttttctgcatgtatgatatatgtcaataaatgtcttaaagtatatacagcaaaaatagacaaaaccacaagaagacatacacaaatgttaaacctagagagaaatttgaatataagtaagtctctgaatgactggtagaacaaaccgaaaaataggatggagaggtttggaacagcatgattagcaaaattgacatatctgtcttttaatataggcagaaacatagttagataaaaaaaggacttgtctcggagcatgatttctgaaaacagtggaatcgagtttgaatctagtaagtacatataaataaatgtcttaaaactcctcttatgttagctaattaagaaacactattgtaatagacattagaaaatattttaataaattgagtggatttcacacgctaaggaaatgatcttacttgcatttgatagttcaattagatacatatatacctataggtagtttaaaatatttctaataaccttatatacttttaaaaagcattgatatctgtttgcactatatggtctatagagtacacataccaaacatgattatagctcttctgctataaacttcaaatgtctaattaatacaaaaatctagaatgagaagagttctttgcatttttttttatcaaatagaatataggaaagatagctgcaaatatacctgacacacttatctgtgagtatggtggtagcctttttattttattttattttgagagagggtctcactttgtcacccaagatggagtgcagtcatgtgatcagagctcactgaagccttcacatactgtgctcaagcgattctcctacctcagtctcctgagtagcagggactgcaagtgcatgacaccatactagctaatttttgtaaagatggggtttcaccatgttgccctggctgatctccatctcctggactcaagagatctggccaccttggcctcccaaagtgctgggattatagttttgaggcaccacaatcagcccagccttaaaaaaggctgactagagatctttatctatgtatatctatatctatctataaaataaacatatgtgcttcttatataaaaatatatattattaatattatataaaatttttttcaaggtagaaatatataaagagggtgcatgtagagcctggggcattgtgtagtgaagctcaaggcctctgaagaaatgccccttgcctcttttgtctgggctagaatccgagaagggaaagcagcagatgcactggttcccaggttcttggcatcctacagagagaaacttgtttgagctagggtagcgttaaacacccttgttcttactctcctgttttatatagtgagcagagactagcttcatgagaacagactgtgacagtcaaggctgtctgatattttgtgcagcattaattgagaaattctagcacctgaagaactctgggccatttgagggtaggtgcaggggaggaaagggaagtttgcatccctcctgctgtggagagaacccgtgggaagcacagaccttgtcctaactgaaggcagaccaccttgctaaccagcttctcatcagccaaccctggatgagtttctatgtctatttactaaataatccttattgcttttcttcatatgggcaaagtatggtttacagggaatattgttcctttgaacacccatcatggaaaacccttcctgttgtgggaaaccaggcttccatatgtgtattattgggaaacacataggcaatttctatgtttttactgcatctatttcagggatatgggaactgaatagtgcccatcaaaggctcacctgatgttggaaattgatctgagagcgcggaaggacagaattctttctttgttcctgggcagcggtggttgagggatcattttgtggcagctacagtggcaatgatggaggcataatggcgggctcagtaccaagacaaggagagacttggcctcacaatggcagcattgcaggggtgcgctctacagaacatttgctcacatggttttgggcattgtctctaactacattgcttccccaataggttgacccattctaactaactccttttctctttaaaaaagcaaacttcatttgtatgacttgcaattgtaaacgacaccaattggccagttatcattcaaattctctgttacttaatcctgccttttcctgacgtatgcaactttcccctaaaaaattggacactttgttgcttactcattgtctttacacattttaaaatgttgctttatgcccccaatccctaactacattttcaatgttttgcaagtggagtccaggtgttcttgatttacatgaagctcaaaataatggttatagtaagtagtacttcataattaagcaaaaagctcttattgaaaaatgacagaactatacatagggatgacaacatggagagatatttcgtgagatcacaaagttatggtatggcagaagtagaatgctgaatagagactctgtgttcccaatcattatttctaccaccagctttctattttgatgttaataatgttcttatgtgggaaaccctacatatttgccaatgtttagttcattgacaaagaaatagaaagagcttcaagaacactctaatatttaaaaaataaaatgtctataattggccatacgaaaaaattggtacttgacatatactgagatcgttttattttgtgctagacaaatgaagtcatagaacagaatgtgctttaaatattatgaatagtgcttgcatgtgtgcgtgtgtgtgtgtgtctatagatgcatattaggccgttgaaaagttttattattctttcgaggagagagactgccaacttttgaacctaactagaacaagtatattgcttcttcatattttgattaaggcaaagagaatctagttaaaaataattcaacttatcgtggaaatgctataaattgctgtgaagtgagttgctggttatggcttgtcagagcaaatatattgtacaaatcttaggggagaattagtgcttatacattcaaatcaaatcatcttgcagcagactgagaaaaacgttagatttttaaaataatttcaaagtcatgaaaagagcaaatatgctccacaaagagcctagcaaccctcaatgaccaatgcccctttaatatagtttggtatctgaattagaatcccagaatctacaaatacctctgggtgtgggtgctgcattttgaggattttataacactgccatcaccaagctctcttttgatattcactttaaggagataatttacgggcaaccagagagcataaaccaaagtagatatctatctagatagatagatacatctccatatcattgacaggatacattctagccgagtgtgagtacaatctatggatgtggttggagagaacatgtgttccacctgagtggcagatcaggattattccttctcatctgctgcaatggctcaatgtgttaaggagaggagcgagacagcaagaactgcattcattcagtcatacagaccaaaaggaggaatgtcgcccagccctctaaactgacccagaacccagctcatgtctcaactgctacctctactacttagaaagaagtaactccactaaagcagggttctggacaaatatatttttattgatcatatacaaatagatgaagatggacttggatgttaagaaaaataatgctatacaaaatcgagagtagagagtcgcccctagacttaaattaagggtgtgtacattagataatttaatccaatctatcaggtaaaaacttgaacaaaccttttggcctcttccttaaaattcagggaagtatgtcctccacaaaacagaatcaaaatataaataaaagactggcttaagatgaaaataaaccttacaaatgaaaagccagatgagaggcacttaactgagaatgaaaagaaactgagcggacaaaataattatgagaagatgaaccttcaaatcagaaagagggaaaaaagcttatttgatactatgagaactcaaaagagagtgaacacaagtgtgaaaattccaagagtaaagaaaagtagcataactaaattaagagcatgagaaaatgtgtacaattttgagtaataagagcggaaatccaaagtacctattgtatgtgatattttagtagagcaacactgaagaagaatgaaaacaagaaataatattaaatatgaacatatggagaacagaataatatttttaaattttttagtttctaagcttatctgaaattttaattttggtttcttatataataccagagttattaggaagttattagctaataacactattttcagtgatattttaagtatttgtcctagaaaaatttctatttttgaaaaatgtatatttaaaaatacattaaatgtgtatatacatcaatcatatgtatcgatttatgtttttctttaattgcaaatgaaatttgtatttttgtgttcctggaataaaataaacttgaatggattgtaatatattattcatgctgtaattcaacgtatttgaattctttaagaatgttacatttatagttaacagatattgattttctgtcataatgatgttgtgagacaatctaagaggaattaaaatttaaattcatgtattcctcctttttcctctgttctctaactgtaatatattttaattacagatggaggaacagatagatgttagataaataggtatataatatatagatcatccaaaattcttattcttatggttttatgtagtcagtatttacctctatttttctgcatgtttatcattccaatttagttcattacttcctgcacctttgatgtcatatatataaacaggaaataacacatggtggccgggatgtagagagagccacaggacttgtgaataaaatccacaggcaaggatgtggcgattccttttgcaatattggagggaatgccaaaccctatgtttgctgtggaaaagagtatgttagttcctcaaaacatcaaaatggtattgccatatgattcagcagctccacatctcaggatagcaaaagaaatgaaagcagagtcttgaaaaaatatttacacatccatatttgcagcagcattattggcaatagctaaaacgtagaagcaattgaagtgtccaacaacagatgaatggataagcaaaatatgatatatacatacaatggaatattattcagtcttaaacatgagggaaatattctgacatatgttgcaacttggatgaaacttgagaatattatgccaagtgaaataagttagtcagtgaaggacaaatacagtataattccatttgtataaggaacttaaagtggacagagtcacagagatagtacaatgatggttgccagaagctggggggaggaagacatggggaagtattgcttaatgagtatagagtttcagtttcacaagatgaaacgagttatggagatggatggtggggatggctgcacaatgttatgactatatttagtaccactgaactgtgcacttaaaatggttaacagagtacattttatgttatgtgtattttaccacaataaaaaaataaaataccttaggaacattttcctgaaagagtccacataaaattcattttaatgcatgtgtttatgcatagatttctatttttctcttttctatttatattccaaattagaatataatgctaatcaatcatagtggctgtgtttcttccttcctctagtctgcaagtagcaagcaaatgtaataaactacttattcatgtcacacctatttattttctgccttataccaagcttgtgggattctattaaatacaacatttttatacgtacacctatgcaatacccattagcatcgccttcctaaatcaggggaaattgagtgtctgtaaggtgcggtaacttactaagatacaaaactcagcattaaagtctgtatacttcaatatcctgccctcttctcatttgtctttactgccttttatgtatgtgttagatgttcaataaatactcttttttaaactgaa

SEQ ID NO: 10583 - DNA, 6002 bp, Homo sapiens
ctgtaagttttagggtacatgtgcacattgtgcaggttagttacatatgtatacatgtgccatgctggtgcgctgcacccactaactcgtcatctagcattaggtatatctcccaatgctatccctcccccctcccaccaccccacaacagtccccagagtgtgatattccccttcctgtgtccatgtgatctcattgttcagttcccacctatgagtgagaatatgctgtgtttggttttttgttcttgtgatagtttactgagaatgatgatttccaatttcatccatgtccctacaaaggacattaactcatcattttttatggctgcatagtattccatggtgtatatgtgccacattttcttaatccagtctatcattgttggacatttgggttggttccaagtctttgctattgtgaataatgccgcaataaacatacgggtgcgtgtgtctttatagcagcatgatttatagtcctttgggtatatacccagtaatgggatggctgggtcaaatggtatttccagttctagatccctgaggaatcgccacactgacttccacaatggttgaactagtttacagtcccaccaacagtgtaaaagtgttcctatttctccacatcctctccagcacctgttgtttcctgactttttaatgattgccattcgaaccggtgtgagatggtatctcattgtggttttgatttgcatttctctgatggccagtgatgatgagcattttttcatgtgttttttggctgcataaatgtcttcttttgagaagtgtctgttcatgtccttcgcccactttttgatggggttgtttgtttttttcttgtaaatttgtttgagttcattgtagattctggatattagccctttgtcggatgagttggttgcgaaaattttctcccattctgtaggttgcctgttcactctgatggtagtttcttttgctgtgcagaagctctttagtttaattagatcccatttgtcaattttgtcttttgttgccattgcttttggtgttttagacatgaagtccttgcccatgcctatgtcctgaatggtaatgcctaggttttcttctagggtttttatggttttaggtctaacgtttaagtctttaatccatcttgaattgatttttgtataaggtgtaaggaagggatccagtttcagctttctacatatggctagccagttttcccagcaccatttattaaatagggaatccgttcctcattacttgtttttgtcaggtttgtcaaagatcagatagttgtagacatgcggcgttatttctgagggctctgttctgttccgttggcctatatctctgttttggtaccagtaccatgctgttttggttactgtagccttgtaatatagtttgaagtcaggtagtgtgatgcctccagctttgttcttttggcttaggattgacttggcgatgcgggctcttttttggttccatatgaactttaaagtagttttttccaattctgtgaagaaagtcattggtagcttgatggggatggcattgaatctgtaaattaccttgggcagtatggctattttcatgatattgattcttcctacccatgagcatggcatgttcttccatttgtttgtatcctcttttatttccttgagcagtggtttgtagttctccttgaagaggtccttcacatcccttgtaagttggattcctaggtattttattctctttgaagcaattgtgaatgggagttcactcatgatttggctctctgtttgtctgttgttggtgtataagaatgcttgtgatttttgtacattgattttgtatcctgagactttgctgaagttgcttatcagcttaaggagattttgggctgagacaatggggttttctagatatacaatcatgtcgtctgcaaacagggacaatttgacttcctcttttcctaattgaataccctttatttccttctcctgcctaattgccctggccagaacttccaacactatgttgaataggagtggtgagagagggcatccctgtcttgtgccagttttcaaagggaatgcttccagtttttgcccattcagtatgatattggctgtgggtttgtcatagatagctcttattattttgaaatacatcccatcaatacctaatttattgagagtttttagcatgaagggttgttgaattttatcaaaggctttttctgcatctattgagataatcatgtggtttttgtctttggctctgtttacatgctggattacatttattgatttgcgtatattgaaccagccttgcatcccagggatgaagcccacttgatcatggtggataagctttttgatgtgctgctggattcgttttgccagtattttattgaggatttttgcatcaatgttcatcaaggatattggtctaaaattctctttttttgttgtgtctctgcctggctttggtatcagaatgatgctggcctcataaaatgagttagggaggattccctctttttctattgattgaaatagtttcagaaggaatggtaccagttcctccttgtacctctggtagaattcggctgtgaatccatctggtgctggactctttttgattggtaagctattgattattgccacaatttcagctcctgttattggtctattcagagattcaacttcttcctggtttagtcttgggagagtgtatacgtcgaggaatttatccatttcttctaggttttctagtttatttgtgtagaggtgtttgtagtattctctgatggtagtttgtatttctgtgagatcggtggtgatatcccctttatcattttttattgcgtctatttgattcttctctctttttttctttattagtcttgctagtggtctatcaattttgttgatcctttcaaaaaaccagctcctggattcattaattttttgaagggttttttgtgtctctatttccttcagttctgctctgattttagttatttcttgccttctgctagcttttgaatgtgtttgctcttgcttttctagttcttttaattgtgatgttagggtgtcaattttggatctttcctgctttctcttgtggcatttagtgctataaatgtccctctacacactgctttgaatgcgtcccagagattctggtatgttgtgtctttgttcttgttggtttcaaagaacatctttatttctgccttcatttcgttatgtacccagtagtcattcaggagcaggttgttcagtttccgtgtagttgagtggttttgagtgagattcttaatcctgagttctagtttgattgcactgtggtctgagagatagtttgttataatttctgttcttttacatttgctgaggagagctttacttccaagtatgtggtcaattttggagtaggtgtggtgtggtgctgaaaaaaatgtatattctgttgatttggggtggagagttctgtagatgtctattaggtccgcttggtgcagagctgagttcaattcctgggtatccttgttgactttctgtctccttgatctgtctaatgttgacagtggggtgttaaagtctcccattattaatgtgtgggagtctaagtctctttgtaggtcactcaggacttgctttatgaatcttggtgctcctgtattgggtgcatatatatttaggatagttagctcttcttgttgaattgatccctttaccattatgtaatggccttctttgtctctttttatctttgttgctttaaagtctgtttcatcagagactaggattgcaacccctgcctttttttgttttccattggcttggtagatcttcctccatccttttattttgagcctatgtgtgtctctgcatgtgagatgggtttcctgaatacagcacactgatgggtcttgactctttatccaatttgccagtctgtgtcttttaattggagcatttagtccatttacatttaaagttaatattgttatgtgtgaatttgatcctgtcattatgatgctagctggttattgtgctcgttagttgatgcagtttcttcctagtctcgatggtctttacattttggcatgattttgcagcggctggtaccggttgttcccttccatgtttagcgcttccttcaggagctcttttagggcaggcctggtggtgacaaaatctctcagcatttgtttgtctgtaaagtattttatttctccttcacttatgaagcttagtttggctggatatgaaattctgcgttgaaaatccttttctttaagaatgttgaatattggcccccactctcttctggcttgtagggtttctgccgagagatccactgttagtctgatgggcttccctttgtgggtaacccgacctttctctctggctgcccttaacattttttccttcatttcaactttggtaaatctgacaattatgtgtcttggagttgctcttctcgaggagtatctttgtggcgttctctgtatttcctgaatctgaacgttggcctgccttgctagattggggaagttctcctggataatatcctgcagagtgttttccaacttggttccattctccccatcactttcaggtacaccaatcagacgtagatttggtcttttcacatagtcccatatttcctggaggctttgctcatttctttttattgttttttctctaaacttcccttcttgcttcatttcattcatttcatcttccattgctgataccctttcttccagttgattgcatcggctcctgaggcttctgcattcttcacgtagttctcgagccttggttttcagctccatcagctcctttaagcacttctctgtattggttattctagttatatattcttctaaatttttttcaaagttttcaacttctttgcctttggtttgaatgtcctcccgtagctcagagtaatttgatcgtctgaagccttcttctctcagctcgtcaaagtcattctccatccagctttgttctgttgctggtgaggaactgcgttcctttggaggaggagaggtgctctgctttttagagtttccagtttttctgttctgttttttccccatctttgtggttttatctacttttggtctttgatgatggtgatgtacagatgggtttttggtgtggatgtcctttctgtttgttagttttccttctaacagacaggaccctcagctgcaggtctgttggagtacccggccctgtgaggtgccccgctggggggtgcctcccagttaggctgctcgggggtcaggggtcagggacccacttgaggaggcagtctgcccgttctcagatctccagctgcgtgctgggagaaccactgctctcttcaaagctgtcagacagggacctttaagtctgcagaggttactgctgtctttttgtttgtctgtgccctgcccccagaggtggagcctacagaggcaggcaggcctccttgagctgtggtgggctccacccagttcgagcttcccggctgctttgtttacctaatcaagcctgggcaatggcgggcgcccctcccccagcctcgctgccaccttgcagtttgatctcagaccgctgtgctggcaatcagcgagactccgtggggtaggaccctccgagccaggtgcgggatgtaatctcgtggtgcgccgttttttaagcccgttggaaaagcgcagtattcaggtgggagtgacccgattttccaggtgcgtctgtcacccctttctttgactccctttgaaagggaactccctgaccccttgcgcttcccaagtgaggctttgcctcgccctgcttcggctcgcgcacggtgcgcgcacccactgacctgcgcccactgtctggcactccctagtgagatgaacccggtacctcagatggaaatgcagaaatcaccgtcttctgcgtcgctcacgctgggagctgtacaccagagctgttcctattcggccatcttggctcctcc

SEQ ID NO: 10584 - DNA, 11538 bp, Homo sapiens
caagaatttgtactctaatgacacttttaggtgatcttacatatcaataaagttaaaggctggctatgagtattctaaatcattagccacagttatatacttaccatattttaagtcttataacacaaacatttgtaagattttaatactatatccatctatgtttccaacattgtcaactcctagtaaacaatatttatcttgaaggaatcctgcataatttagataaatttaaaatttatctcaaaagccactgctttgatttcagatgcaaaaaaaagttttcatgtttagttttaatacaaccttcatcttcatttattctgtggtctttttttttttttttattttgtacctccactggtaggtttttttttttgttttttttttttaatttaagttttagggtacatgtgcacattgtgcaggttagttacatatgtatacatgtgccatgctggtgtgctgcacccactaactcgtcatctagcattaggtatatctcccaatgctatccttcccccctccccgctccccaccacagtccccagagtgtgatattccccttcctgtgtccatgtgatctcattgttcaattcccacctatgagtgagaatatgcggtgtttggttttttgttcttgcgatagtttactgagaatgatggtttccaatttcatccatgtccctacaaaggacatgaactcatcattttttatggctgcatagtattccatggtgtatatgtgccacattttcttaatccagtctatcattgttggacatttgggttggttccaagtctttgctatcgtgaataatgccgcaataaacatacgtgtgcatgtgtctttatagcagcatgatttatagtcatttgggtatatacccagtaatgggatggctgggtcaaatggtatttctagttctagatacctgaggaatcgccacactgacttccacaatggttgaactagtttacagtcccaccaacagtgtaaaagtgttcctatttctccacatcctctccagcacctgttgtttcctgactttttaatgattgccattctaactggtgtgagatgacatctcatagtggttttgatttgcatttctctgatggccagtgatgatgagcattttttcatgtgttttttggctgcataactgtcttcttttgagaagtgtctgttcatgtccttcgcccactttttgatggggttgtttgtttttttcttgtaaatttgtttgagttcattgtagattctggatattagccctttgtcagatgagtaggttgcgaaaattttctcccatgttgtaggttgcctgttcactctgatggtagtttcttttgctgtgtagaagctctttagtttaattagatcccatttgtcaattttggctttggttgccattgcttttggtgttttggacatgaagtccttgcccacgcctatgtcctgaatggtaatgcctaggttttcttctagggtttttatggttttaggtctaacgtttaaatctttaatccatcttgaattgatttttgtataaggtgtaaggaagggatccagtttcagctttctacatatggctagccagttttcccagcaccatttattaaatagggaatcctttccccattgcttgtttttctcaggtttgtcaaagatcagatagttgtaggtaagcggcgttatttctgagggctctgttctgttccattgatctatatctatgttttggtaccagtaccatgctgttttggttactgtagccttgtggtatagtttgaagtcaggtagtgtgatgcctccagctttgttcttttggcttaggattgacttggcgatgcaggctcttttttggttccatatgaactttaaagtagttttttccaattctgtgaagaaagtcattggtagcttgatggggatggcactgaatctgtaaattatcttgggcagtatggccattttcacgatattgattcttcctacccatgagcatggaatgttcttccatttctttgtatcctcttttatttccttgagcagtggtttgtagttctccttgaagaggtccttcacatcccttgtaagttggattcctaggtattttattctctttgaagcaattgtgaatgggagttcactcatgatttggctgtttgtctcttgttggtgtataggaatgcttgtgatttttgtacattgattttgtatcctgagactttgctgaagttgcttatcagcttaaggagattttgggctgagaaaatggggttttctagataaacaatcatgtcatctgcaaacagggacaatttgacttcctcttttcctaattgaataccctttatttccttctcctgcctgattgccctggccagaacttccaacactatgttgaataggagcggtgagagagggcatccctgtcttgtgccagttttcaaagggaatgcttccagtttttgcccattcagtatgatattggctgtgggtttgtcatagatagctcttattattttgaaatacgtcccatcaatacctaatttattgagagtttttagcatgaagggttgttgaattttgtcaaaggctttttctgcatctattgagataatcatgtggtttttgtctttggctctgtttatatgctggattacatttattgatttgtgtatattgaaccagccttgcatcccagggatgaagcccacttgatcatggtggataagctttttgatgtgctgctggattcggtttgccagtattttattgaggatttttgcatcaatgttcatcaaggatattggtctaaaattctcttttttggttgtgtctctgcccggctttggtatcagaatgatgctggcctcataaaatgagttacagaggattccctctttttctattgattggaatagtttcagaaggaatggtaccagttcctccttgtacctctggtagaattcggctgtgaatccatctggtcctggactcttcttggttggtaaactattgattattgccacaatttcagctcctgttattggtctattcagagattcaacttcttcctggtttagtcttgggagagtgtatgtgtcgaggaatgtatccatttcttccagattttctagtttatttgcgtagaggtgtttgtagtatcattttttgtctatttgattcttctctctttttttctttattagtcttgctagcggtctatcaattttgttgatcctttcaaaaaaccagctcctggattcattgattttttgaagggttttttgtgtctctatttccttcagttctgctctgattttagttatttcttgccttctgctagcttttgaatgtgtttgctcttgcttttctagttcttttaattgtgatgctagggtgtcaattttggatctttcctgctttctcttgtgggcatttagtgctataaatttccctctacacactgctttgaatgcgtcccagagattctggtatgttgtgtctttgttctcgttggtttcaaagaacatctttatttctgccttcatttcgttatgtacccagtagtcattcaggagcaggttgttcagtttccatgtagttgagcggctttgagtgagattcttaatcctgagttctagtttgattgcactgtggtctgagagatagtttgttataatttctgttcttttacatttgctgaggagagctttacttccaactatgtggtcaattttggaataggtgtggtgtggtgctgaaaaaaatgtatattctgttgatttggggtggagagttctgtagacgtctattaggtctgcttggtgcagagctgagttcaattcctgggtatccttgttgactttctgtcttgttgatctgtctaatattgacagtggggtgttaaagtctcccattattaatgtgtgggagtctaagtctctttgtaggtcactcaggacttgctttatgaatctgggtgctcctgtattgggtgcatatatatttaggatagttagctcctcttgttgaattgatccctttaccattatgtaatggccttctttgtctcttttgatctttgttggtttaaagtctgttttatcagagactaggattgcaacccctgcctttttttgttttccatttgcttggtagatcttcctccatccttttattttgagcctatgtgtgtctctgcacgtgagatgggtttcctgaatacagcacactgatgggtcttgactctttatccaatttgccagtctgtgtcttttaattgcagaatttagtccacttacatttaaagttaatattgttatgtgtgaatttgatcctgtcattatgatgttagctggtgattttgctcgttagttgatgcagtttcttcctagtctcgatggtctttacattttggcatgattttgcagcagctggtaccggttgttcctttccatgtttagcgcttccttcaggagctcttttagggcaggcctggtggtgacaaaatcggtcagcatttgcttgtctgtaaagtattttatttctccttcacttatgaagcttagtttggctggatatgaaattctgggttgaaaattcttttctttaagaatgttgaatattggcccccactctcttctggcttgtagggtttctgccaagagatccgctgttagtctgatgggcttccctttgagggtaacccgacctttctctctggctgcccttaacattttttccttcatttcaactttggtgaatctgacaattatgtgtcttggagttgctcttctcgaggagtatctttgtggcgttctctgtatttcctgaatctgaacgttggcctgccttgctagattggggaagttctcctggataatatcctgcagagtgttttccaacttggttccattctccgcatcactttcaggtacaccaatcagacgtagatttggtcttttcacatagtcccatatttcttggaggctttgctcatttctttttattcttttttctctaaacttcccttcttgcttcatttcattcatttcatcttccattgctgataccctttcttccagttgatcgcatcggctcctgaggcttctgcattcttcacgtagttctcgagccttggttttcagctccatcagctcctttaagcacttctctgtattggttattctagttatacattcttctaaatttttttcagttttcaacttctttgcctttggtttgaatgtcctcccgtagctcactctaatttgatcgtctgaagccttcttctctcagctcgtcaaaatcattctccatccagctttgttccgttgctggtgaggaactgcgttcctttggaggaggagaggcgctctgtgttttagagtttccagtttttctgttctgttttttccccatctttgtggttttatctacttttggtctttgatgatggtgatgtacagatgggttttcggtgtggatgtcctttctgtttgttagttttccttctaacagacaggaccctcagctgcaggtctgttggaataccctgccgtgtgaggtgtcagtgtgcccctgctggggggtgcctcccagttaggctgctcgggggtcaggggtcagggacccacttgaggaggcagtctgcccgttctcagatctccagctgcgtgctgggagaaccactgctctcttcaaagctgtcagacagggacatttaagtctgcagaggttactgctgtctttttgtttgtctgtgccctgcccccagaggtggagcctacagaggcaggcaggcctccttgagctgtggtgggctccacccagttcgagcttcccggctgctctgtttacctaagcaagcctgggcaatggcgggcgcccctcccccagcctcgctgccgccttgcagtttgatctcagactgctgtgctagcaatcagcgagattccgtgggcataggaccctccgagccaggtgtgggatatagtctcgtggtgcgccgttttttaagccggtctgaaaagcacaatattcgggtgggagtgacccgattttccaggtgcgtccgtcacccctttctttgactcggaaagggaactccctgaccccttgcgcttcccaggtgaggcaatgcctcgccctgcttcggctcgcgcacggtgcgcgcacccactggcctgcgcccactgtctggcactccctagtgagatgaacccggtacctcagatggaaatgcagaaatcacccgtcttctgcgtcgctcatgctgggagctgtagaccggagctgttcctattcagccatcttggctcctccctattctgtggtcttaaagcatctatctcagtctttttctacttatacactcaagaaactagcctggagtattggcatgatttattatggacaagaattttccaattcgtttagagtgacagggcccaaaatccttagttgtaaaggagtgcgacaagaactatatcatcctaaataaattccaaaatcagaaactcaataatagcttcaaactattcctaaaagtcttcacatttattttagcaaaatatacttagagaatttacatctttcttaattgtttactgtaaatcagaatccccccgacacacctgagagctatggtccctgctggtgtgcatttccacatcaaacatgatctgcccatcttcttgtggcgaagggctagaagagaaggaattcagctattagttttaattctcactttgtcaaatgacttagtctctactagaaattagaaaattaaaagttacagcagtatggctttgaaaaagcaaatcagagaatatatcataaccctatacaagaaaaatttatgtgatattaaaaggctaaatgaaattgagcattcttactcccaaaatgttctgcactttttcagtagtaatgaaatccttcaaaatgataaatttgcaaaggaaatactatctacagacacaaactgtcacattctcttatatttactcttttgtccactaaaggtaaaataatcttcaaattcaggaacttcagagttctttttctcaaagttccctcatcattaaataattcaccagtagttctcaaagtgcataaggtagttctcaaagacgctttcagagggtctttgaggttacagttcctttctcaatactagtaggatttatttgcctttttcattctcattctcccatgtgtatagtggaattttccaaaggctacatgatgtgtgatagcacaacagttagaatgcaaacacagatgagaaccagctgtcttctattaagcttggtattagagatttgtaaatgtgtaaaacaatgccactattcttattaacttggagggtttatagaaaataggtattttcactaaaaaatgctacttatgttaaaatgtattatttttgaatgaatatatattttctcagttttaatttctaatatagtaaatatcaaaatatataaacccacaaacaagttttttggggtccctaatgatttttaagaatgtaaaggtatgtaatgaccaaaaactttgagaaccactattttacttatttcagaaatatttgctttgagatatttcagagtgaattatataacttatatattaatataaaacctttatgattgcacaaaatacattcttagaactgtaaaaatttacaaataagtttttagacaaaaacaacatgatcacaaactgcacttgatacaagagatgaacagaatgtgctaagttaatttcttagctttattaatgatttcttgtataaaaactgaaagtcactggggatccttcactacatacacaaaccctcccccaaaatctaaaatagaaataaaaaatatttggggcttaacttgctgaaaagaatagatattaactattaaagttatcaagagtatgtatataatgttaattaatgtatagagacgttggtgagactgactcagaaataagatcgtcagaaatttatcagacagattaggcctaggagtcttttagactagtataattgacataggagatttttaaatggggacaggaaaacagaaaagctggttctgtatcaaaccaacgtcatatatatttaggaaatttttgtcttgaactagcacaggagtcaacccgaactgggcactcctactggcctcagtttactatctttgtgctcataactgttgggttcacagctacacatcaagttaagggtcagccttacatagccgtgaccaggtcaaggcagtcagggtgacaaagtcaagaatcctatggaagcattgctctgcttctatatgcttcttcacactggtaccaacctcttctctaaactgtttactcctcctaacaatttggaatgcattagagcttcacccatggcacatattagaatcggctggggagcttttaaaatattgtgacgtctctaccctgcccctgtcaaccaaaatgagaagttcttgagatgcagtccatgtgctgccatttttaaaagcttctgggtgaatctagtgtgccgtcaaggtgaaaacccctgtgacagggtgaaaggcaaagcagaacacactggggttcccagctaacaacccctgcggcaacacaaatatttctatggaataatttttaagttgaaaatatacataaatcagctctaggactgatacccaacaaccctaaaacatttccccctacaagaaacactttccaattacttttcacatatagagacgcatggcaattcagatgatgtgagttttgaagacactcctcaatggtaaagcgtgttagtaggctatcccagaagactcgagttctagccattctctgaaagatgaccactaatctagggcctggagagacataagatgaggggtacgaaagtgttcaaaagcatttgccatgcctcctcatggcaacctaaacttaaacatgatcataggagggtgaaggcatattcagtcacacgtaaaactgcaccataaatgaagtaagatgaacagacaggtaagcaggtgactgttctctgctcattgacagcaccatgtgaacaacaggctcatggacaccatggtatcaatgatcaaggcccacacacctgaacgcagagtgaaagccttgttgacaggccataacaagcagaaaacttgagaaacccatcagcaagttccataatataaatataaatcttcattcggaaagacagactaatgctgtagctactggaatcaagggcaagctgttcagaagagagccatctgctctggttccgcttatgacaagagccatcccaggctctaagaagcacagggacaagtcagggatgacacgggggtggcgggggtgcacagtgtgccacagagccaacaaaccagtcccccgctgccttggcaacattagtggatcataagccactcaggaagttggacatgatttaactcatttctcctttttttcacttcttctgataagtaataatatgtgcaatatacacaatttttacaaaatacaaaaatgttaagaagaaacatatccatactgcattcctaaaaatagtcactgtttacatttccttaatctgcttcccgtgcatttgcattttctaaatggttaacatcagttaacaaccacccagaaggtcatccagtgccccataatgctaacagtgtagctgtcactgaaacaagaattttttaaatgtcatttaatatctagcccttttgaaaaaaaaaaaaaaaaacagaaaagtttatactaaaaaataatgacctggtttcattccacacacatatctcgttgtattcttactctttcaccataagcagtccttaatccatgtaattagtttcttcagctcaaatatagaaaaatgaggtctgaaacaaaacatcccctgagaaagcagaggagacttcaaaactatctttacagaccttggttggtgcttccaactgtgcaaatattgctataacgtgaagcaacctgcagttcctatgaatcaaacatttactgagtgtctactacgtgccagcaccattactgtgaaggtaataaaaattaaacatggcccctgccctttgcaacgtcaacatctagaagggaagacacatatatacagaggtaactaattcaagaacagtctgtgatctgtaacacagggacacaaaggaaaatgggggaaagtcagattaattctataaattagcatttatgccactgaattttaaactgataaactgctagaaacaatataatctgggtaagaaaaatgacaatctggggaaaaacagtgggcactgaagcacctgtcaattagctgtctcatataaacacaatatatatctgtgcaatatatattatactacaatatatcaggaggcatattttgctaagtgaagatttaagcaaacagatttttcctagagtgaatgagccctgtaacccacctgtttcctgaattccaccaaaacatgggtctcacttacctgtcacagtgagaactgcctctggaactactctgtcctgattcatgttgtgcatccaaaagaatcttctccatgtctccattgtggatggaggatgaggatggtacgtgttccagccccccatttttcccattgccattatcattgccattgctgctgttcatgggtagctccacccaggaacctgttggacaagtcagataagttaaccacagcagaactgaaatctgtcatgtgcacacagatgtgaacatggtgaatccagataagaattctgactctcctcaaaccaaatgtaaaagtattctgaagaaaataaataagaagtaataaaagtctaaagatctatatagttctgttcctgaaatagctcatgccatcaactgagaaacagctcaaactctaaaacatctcagaaaacgtgtttttcagtcaatttctctctgggtaaagcttggtttataataacactctactgaaaactcaggttgcttttcaaaaaaaaattgctacttttaggctatttacctttaacattttagttggtgtatatatacacacacactttcttcatagtctacctaagctgctcagctgtatctgctccagaaatgaaataaatatatcacctacaaatttcataaaaggtcatctaagtaagttagcaactatatcctacttagtgcaaacaactgagaaactcctagagagggaacctaaatccaatagcaaaaatttcaatttgtgcacaaatcaggagcataaaattaatgcagctggttaactaaatcaggtaataatgctaaaaattcagaaaaaagctttatctctatctcactgattagtttcttcatttcctttgtatctcaggctttctagtccttctccttttttatacactaaacataccttgtgaacttgtcttttttcttttctctcccacgggtttctactttctagggttttcattaaaccctgttgatttgggagcagaaacaactgcacatcagc

SEQ ID NO: 10585 - DNA, 9730 bp, Homo sapiens
tgaactcatcattttttatggctgcatagtattccatggtgtatatgtgccacattttcttaatccagtctatcgttgttggacatttgggttggttccaagtctttgctattgtgaataatgccgcaataaacatacgtgtgcatgtgtctttatagcagcatgatttataatcctttgggtatatacccagtaatgggatggctgggtcaaatttttaaatatttcaaaggttaccatcacaaggcagttaaaatttgtattatgaaatattttcaaacacatataaaagagagaaaataaacaccagtgtacttgccaatcagctttgccaaacccaaatattttgcaatatttgtttcaaatattgtttttaagaagtaaaatattatagaatgcagctaaatttcctcctccaacccgtctcatttatcttcctcccgcccaagatgtaaccactatcctgaattcaacatttctcattaacatgcacactttttgtttttgctaaatatgtgtgtatatattgtgttctaaaactcagtttaaatagtgtcataatacttacagtactctaccatttttcttaccacattagatttatagatttatttttcagatatatctattttgatgcatgtagccagtttattatctcaacagttttaatgtcattatattgaacatatcactatatataatacacacacagataaataggtaatatagacagaaaaaaagataggtgaatagagagaagatagatagatagatagatgatagatagatagatagatacatacatacatacatacatacatacataaatatgtagataactattcctccgttaatggatatttaggttgtttccaattatttgctattacatatctcaccaacagtggttgagaattttaattgttccacgtgcttgccaactactggattttcactttgggggagtactgcctatctaatacgtatggcataaaacttgattgttgtttccatttccctgatactagcaggattgaaaataaatttcatatgtttgtgggcctctcagggttcttctgtgaatttctgcttcacattattcacccacttttctctagttgtttttatatattccagacctaaccattttttgttatatgctttactaatgtccaccactccctggaatgtctgttcactttgattctgatgccttttattctatgaaagtttttcattttaatgaaaaccgattcatcaaaatgttccttttttgcttacgttttttgtgtcttattttttaagctctgtcctgcttcaagtttaaatttctaccaaaagtattgatgttttactttttacatgtatgtgttccataaaaaatccactgagcagatccactgctcaagttctataaaaaaactacagaaatgttgattggaattgcatggaatttgtggattaatttggagaaaagtggtatctttacaatagcaaggctttccatctatgcatttgtatctcttttaatcaagtcttaatttgtgttgtggcagattccgctacttgccttctcaacaaactgctttcttccttgataagaaaatacaaatatgttttagagatggcaatgtgttcagcttcaggtgacgaatacacagtaggcattcaataaatagcacctacttaattatcatcatccccctggtctaccatttggtaaccaaagcgaaataaagttctaagcaggggtcagcaaactacagcccacagttagtctgacccacttacaatttttatgaagaagtttttctggaacacagccaggcccatttgtttacatgttgtctatgtctgcattcgcactagagcagcaaagttgaatgattgcaacagagactatatatagccaccagagcctatctggccctttcacagacaaagttggccaatccctgccttagacggtattctttgcgagatattggtttggaaggttctattcctctatgccagatgcttattgttccatactttgttgcaactaaaagtgtccatggggcccaatgttggctgaatgtttctggaaagacttttaaactcctgataaacgtaatgaccataaaagaaaagcttgctatcaccaactcttccatctatttcctgcctcaaacacagatttgatgcctggaactttgagagctactttgcaattatggggtaactcttatggggggaagagctagagggcaagcaataagcttaaggtggcaggcagagctggctatataatttgcaaatcccaataaaaaattaaaatgcagggcctcacccaaaaagcagaaaaaagtgtcattaaaggtactaaaatataaagcattttcctttcttccatggactctttctcaacttgccatagcatttttttaatcttttcaagacaaggtctggctctatagcccaagctggagtgcagtggcagtgtttcgcctcactgcaacatttgcctcccaggctcaaaccattctccaacttcagcctcccaagtagctgggactacagatgcatgccaccacgatgggtgaatttttgtattttttatagagatctggttttgccatgttgcccaggctggtctcgaactcgtgagctcaagtgatccgcccccctcggccttccaaagtgctaagattataggcatgagccactgtgtctggctccatagtgttttttatttactacttgatgatgttatcagtaaagaataaaatttaatttattagcatgaattttatcattgcagtttatattgtttaatgccagtgttaaatgcaagagcatttgatttatatacagaatcaccaacattatgctacttgcatttcttaccttgtatacgcatgcatgtgtatttctttcttaccaaacactgaggacactgcacaagacaaactcaattgtctttatttcatgttttgattcacacacatagtcccaaaattctctactttccacttactgatgagtaaggaagggactgaaaggaaaaggtacaatgcattgccctatttttccctttcctttgatgccatcatttttggtataaatgaaatggctaatatagggacgtgacatgaaagtgaaaggatataagactccttgcttatttatagtccttagaatggcactgccttctttttatatttgaagcaagttttcgtttaaatgaaaagtgtagccgctctggaatatcatctcccctacttagtcatagatgtaacatgtttaacttgtgctcactttgagtctcaatgaactcccatgattcctgggtccactggaattcaatccttatgggacatcacaaagactatatgcaaatggaggggcaaggaatgacagacactcatattgtatgtatttcctctcattacacacatgttccactgtcccatcagagttcatttactcaacacaagtgcaaagataaaattttcaaggcattcaaacagcaacagcaagctttaaaccaagcaagagacccttctgagtttgaaccctatatgactttacaggtcacacgcccctgaagccactcttgatggcacagcaaaaatgggcaaagcctagaacaatgccgacattgttgagttgccacaacaaactaccttcagatatatatttttttaatttattattattttactttaagttttagggtacatgtgcacaatgtgcaggttagttacatatgtatacatgtgccatgctggtgtgctgcacccactaacttgtcatctagcattacgtatatctcccaatggtatccctccccactcccccaccccacagcagtccccacagtgtgatgttccccttcctgtgtccatgtgttctcattgttcaattcccatctatgagtgagaatatgcggtgtttggttttttgctcttgtgatagttttctgagaatgatgatttccaatttcatccatgtccctacaaaggacatgaactcatccttttttatggctgcatagtattccatggtgtatatgttccacattttcttaatccagtctatcattgttggacatttggattggttccaagtctttgctattgtgaatagtgccgcaataaacatacgtgtgcatgtgtctttatagcagcatgatttatagtcctttgggtatatacccagtaatgggatggctaggtcaaatggtatttcttgttctagatccctgaggaatcgccacactgacttccacaatggttgaactagttgacagtcccaccaacagtgtaaaagtgttcctatttctccacatcctctccagcacctgttgtttcctgactttttaatgattgccattctaactggtgtgagatggtatctcattgtggttttgatttgcatttctctgacggccagtgatggtgagcattttttcatgtgttttttggctgcataaatgtcttcttttgagaagtgtctgttcatgtcctttgcccactttttgatggggttgtttgtttttttcttgtaaatttatttgagttcattgtagattctggatgttagccctttgtcagatgagtaggttgtgaaaattttctcccattttgtaggttgcctgttcactctgatggtagtttcttttgctgtgcagaagctctttagtttaattagatcccattagtcaattttggcttttgttgccattgcttttggtgttttagacatgaagtccttgcccatgcctatgtcctgaatggtaatgcctaggttttcttctagggtttttatcgttttaggtctaacatttaagtctttaatccatcttgaattgatttttgtataaggtgtaaggaagggatccagtttcagctttctacatatgcctagccagttttcccagcaccatttattaaatagggaattctttctccattgcttttttttctcaggtttgtcaaagatcagatagttgtagatatgcggcgttatttctgagggctctgttctgtttcattgatctatatctctgttttggtaccagtaccatgctgttttggttactgtagccttgtagtatagtttgaagtcaggtagtgtgatgcctccagctttgttcttttggcttaggattgacttggcgatgcgagctcttttttggttccatatgaacattaaagtagttttttccaattctgtgaagaaagtcattggtagcttgatggggatggcattgaatctgtaaattactttgggcagtatggccattttcacgatattgattcttcctacccatgagcatggaatattcttccatttgtttgtatcctcttttatttccttgagcagtggtttgtagttctccttgaagaggtccttcacatcccttgtaagttggattcctaggtatttcattctctttgaagcaaatattctctttgaatgggagttcactcatgatttggctctctgtttgtctgttgttggtgtataagaatgcttgtgatttttgtacattgattttctatcctgagactttgctgaagttgcttatcggcttaaggagattttgggctgagacaatggggttttctagatatacaatcatgtcatctgcaaacagggacaatttgacttcctcttttcctaattgaataccctttatttccttctcctgcctaattgccctggccagaacttccaacactatgttgaataggagtggtgagagagggcatccctgtcttgtgccagttttcaaagggaatgcttccagtttttgcacattcagtatgatattggctgtgggtttgtcatagattgctcttattattttgaaatatgtcccattaatacctaatttattgagagtttttagcatgaagcgttgttgaattttgtcaaaggccttttctgcatctattgagataatcatgtggtttttgtctttggttctgtttatatgctggattacatttattgatttgcgtatattgaaccagccttgcatcccagggatgaagcccacttgatcatggtggataagctttttgatgtgctgctggattccgtttgccagtattttattgaggatttttgcatcaatgttcatcaaggatattggtctaaaattctcttttttggttgtgtctctgcccggctttggtatcaggatgacgctggcctcataaaatgagttagggaggattccttctttttctattgattggaatagtttcagaaggaatggtacaagttcctccttgtacctctggtagaattcggctgtgaatccctctggtcctggactctttttggttggtaagctattgattattgccacaatttcagagcctgttattggtctattcagagattcaacttcttcctggtttagtcttgggagagtgtatgtgtcgaggaatttatccatttcttctagattttctagtttatttgcatagaggtgtttgtagtattctctgatggtagtttgtatttctgtgggatcggtggtgatatcccattttcattttttattgtgtctatttgattcttctctctttttttctttattagtcttgctagcggtctatcaattttgttgatcctttcaaaaaaccaactcctggattcattaattttttgaagggttttttgtgtctctgtttccttcagttctgctctgattttagttatttgttgccttctgctagcttttgaatgtgtttgctcttgcttttctagttcttttaactgtgatgttagggtgtcaattttagatctttcctgctttctcttgtgggtatttagtgcaataaatttccctctacacactgctttgaatgtgtcccagagattctggtatgttgtgtctttgttctcgttggtttcaaagaacatctttatttctgtcttcatttcgttatgtacccagtggtcattcaggagcaggttgttcagtttccatgtagttgagcggttttgagtgagattcttaatcctgagttctagtttgattgcactgtggtctgagagatagtttgttataatttctgttctcttacatttgctgaggagagctttacttccaactatgtggtcaattttggattaggtgtggtatggtgctgaaaaaaatgtatattctgttgatttggtgtggagagttctgtagatgtctatcaggtccacttggtgcagagctgagttcaattcctgggtatccttgttgactttctgtctcattgatctgtctaatgttgacagtggggtgttaaagtctcccattattaatgtgtgggagtctaagtctctttgtaggtcactcaggacttgccttatgaatctgggtgctcctgtattgggtgcatatatatttaggatagttagctcttcttgttgaattgatccctttaccactatttaatggccttctttgtctcttttgatctttgttggtttaaagtctgttttatcagagactaggattgcaacccctgccttttcttgttttccatttgcttggcagatcttcctccatccttttattttgagcctatgtgtgtctctgcacgtgagatgggtttcctgaatacagcacactgatgggtcttgactctttatccaatttgccagtctgtgtcttttaattggagcatttagtccatttacatttaaagttaatattgttatgtgtgaatttgatcctgtcattatgatgttagctggttattttactcattagttgatgcagtttcttcctagtctcgatggtctttacaatttggcatgattttgcagcagctggtaccggttgttcctttccatgtttagcgcttccttcaggagctcttttaaggcaggcctggtggtgacaaaatctctcagcatttgcttctctgtaaagtattttatttctccttcacttatgaagcttagtttggctggatatgaaattctgggttgaaaattcttttctttaagaatgttgaatattggcccccactctcttctggcttgtagagtttctgccaaaagatctgctgttagtctgatgggcttccctttgagggtaacccgacctttctctctggctgcccttaacattttttccttcatttcaactttggtgaatctgacaattatgtgtcttggagttgctcttctcaaggagtatctttgtggcgttctctgtatttcctgaatctgaatgttggcctgccttgctagattggggaagttctcctggattatatcctgcagagtgctttccaacttggttccattctccctgtcacttgcaggtacaccaatcagatgtagatttggtcttttcacatagtcccatatttcttggaggctttgctcatttctttttattcttttttctctaaacttcccttctcacttcatttcattcgtttcatcttccatcactgataccctttcttccagttgatcgcatcggctcctgaggcttctgccttcttcatgtagttctcgagccttgcttttcagctccatcagctcctttaagcacttctctgtattggttattctagttatacattcttctaaatttttttcaaagttttcaacttctttgcctttggtttgaatgtcctcccatagctcggagtagtttgatcgtctgaagccttcttctctcagctcgtcaaagtcactctccgttcagctttgttccgttgctggtgaggaactgcgttcctttggaggaggagaggcgctctgctttttagagtttccagtttttctgctctgttttttccccatctttgtggttttgtctacttttggtctttgatgatggtgatgtacagatgggtttttggtgtgcatgtcctttctgttcgttagttttccttctaacagacaggacccttagctgcaggtctgttggagtactgggccgtgtgaggtgtcagtgtgcccctgctggggggtgcctcccagttaggctgctcgggggtcaggggtcagggacccacttgaggaggcagtctgcccgttctcagatctccagctgtgtgctgggagaaccactgctctcttcaaagctgtcagacagggacatttaagtctgcagaagttactgctgtctttttgtatgtctgtgccctgcccccagaggtggagcctacagaggcaggcaggcctcctggagctgtggtgggctccacccagttcgagcttcccggctgctttgtttacctaagcaagcctgggcaatggcgggcgcccctcccccagcctcgctgccgccttgcagtttgatctcagactgctgtgctagcaatcagcgagactccgtgggcgtaggaccctccgagccaggtgcaggatgtaatctcctggtgcgcggtttttttaagcccgtcggaaaagcgcagtattcgggtgggagtgacccgattttccaggtgccctctgtcacccctttgactaggaaagggaactccctgaccccttgtgcttcccgagtgaggcaatgcctcgccctgcctcggctcacgcacagtgcgtgcacccactgacctgcacccacccactgacctgcacccactgtctggcagtccctagtgagatgaacccggtacctcagatggaaatgcagaaatcacccatcttctgcgttactcacgctgggagctgtagaccggagctgttcctattcggccatcttggc

SEQ ID NO: 10586 - DNA, 7359 bp, Homo sapiens
  SITE (5757): n equals a,t,g, or c
tcccaaagtgctgggattacagatgtgagccaccacgcccggcttaattttcttataatccgaattatcatctgctggtttggaagcaatacatattaatattcattttagtatccattcttattcttaataattcttttgtttgaatgattttatttaaaaatttgttatttagtatttctaacttctttaacaaaggaacttgttgaataactcccattttagtctttttatctaaaaacaatattgttaaacacagaaattatattattttaatatggctattttcctttttttttttttttttgagacagacaggatcatgcactggcatgacctcagctcactgcagcctcaacctccctcagctcaagtgatcctcccactttagcctccccagtagctgggactacagatgcgagcccccacgtcctgctaatttttctgctttttgtacaaaaagtgcaagaagagatggggttttgatatgttgcccaggcttgtctttaactcctgggctcaagcaatctttctgcctcggcctcccaaaatgctggtattataggtgtgagccactgtgcccagctaactattttttattgttaattaaatttagtgatgttttattcatccctgtgcttagcattgtattttgaatcccacaacttctctcttggtttattttactttggactgaaatacaactttgtaattgatcttttttttttcttttagagacagactctcactctgttgcccagattgaagtgcagtggtatgattatagcttatgcagcctcgaactcctggactcaagtgatcctcctgcctcagcctccagagtagctgggactacaaggacctgttactacacccgtctacctttaaaaattttttttgtagtgaaggggtcttgctatgttgctgaagctggtctcgaactcctggcctcaaacaatctacccaccttgtaatcgtgttttttattttctgatgcttttacatctctggacattgctaaccctggagggactgcccctcccagggccaaccaatttgtagagttagtaaacaactcccccgagaataggctttctgtatgcaaaccaaccaatgaagagcccatttcccaatcacaggccctaatcaccctatggcccggtaccagataattcaggacatttccattccccatgaggattaaaagcctgctgaaaccattcaagctagccactcgtaagcctgcttcccctcctttgtccttttcttcccatagaaactgtaataaaaaggctcttacccacatttcctcctcactccctctgcccctgacccaccgtgccatgcctggcatgtggtacctccagtttctatctagctatgagtaaaacaaacttctttcttcatgacagccatttctgtgtttgtgtgtcttaccacacctgattaaagcaaaacccagtggcccttaaaacaaaccatgcctttagtgagaatctatcggtggtgagccctcttagttttttggttataaaaacttttattactcctcataaatgatagtttatgtggcataaaattctaagttgacagtttttttaccctcagtcctttggaagctgttcctccattttcttggctctcattttgctgatgaaaagtcttccatcagtttagttgttgcgctcttagcaatttatatttcctttctggtagcttttaacattttattttattttattatcttttattatactttaagttttagggtacatgtgcacaatgtgcaggtttgttacatatgtatacatgtcccatgttggtgtgctgcacctattaactcgtcatttaacattaggtatatctcctaatgctatccctcccccttcccccgacccgacaacaggcccatgtgtgaaatgttccccttcctgtgtccatgtgttctcactgttcaattcccacctatgagtgagaacatgtggtgtttggttttttgtccttgcgatagtttgctgagaatgatggtttccagcttcatccatgtccctacaaaggacatgaactcatcattttttgtggctgcatagtattccgtgatgtatatgtgacacattttcttaatccagtctatcattgttggacatttgggttggttccaagtctttgctattgtgaacagtgccgcaataagcatacgtgtgcatgtgtctttatagcagcatgatttataatcctttgggtatatacccagtaataggatggctgggtcaaatggtatttctagttctagacccctgaggaatcgccacactgacttccacaatggttgaactagtttacagtcccaccaacagtgtaaaatgttcctatttctccacatcctctccagcacctgttgtttcctgactttttaatgatcgccattctaactggtgtgagatagtatctcattgtggttttgatttgcatttctctgatggccagtgatgatgagcatattttcatgtgtcttttggctgcataaatgtcttcttttgagaagtgtctgttcatatcctttgcccactttttgatggggttgtttgtttttttcttgtaaatttgtttgagttcattgtagattctggatattagccctttgtcagatgagtagattgcaaaaattttctcctattctgtaggttgcctgttcactctgatggtagtttcttttgctgcgcagaagctctttagtttaattggatcccatttgtcaattttggcttttgttgccattgcttttggtgttttagtcatgaagtccttgcccatgcctatggcctgaatggtattgcctaggttttcttctaggatttttatggttttaggtctaacatttaagtctttaatccatcttgaattaatttttgtataaggtgtaaggaagggatccagtttcagctttctccatatggctagccagttttcccagcaccatttattaaatagggaatcctttccctatttcttgtttttgtcaggtttgtcaaagatcagacagttgtagatatgtggcattatttctgagggctctgttctgttccattggtctatatctctgttttggtaccagtaccatgctgttttggttactgtagccttgcagtacagtttgaagtcaggtagcatgatgcctccagctttgttcttttggcttaggattgacttggcaatgcgggctcttttttggttccatatgagctttaaagtagttttttccaattctgtgaaaaaagtcattggtagcttgatggggatggcattgaatctttaaattaccttgggcagtatggtcattttcaactacccatgagcatggaatgttcttccatttgtttgtatcctcttttatttcattgagcagtggtttgtagttctccttgaagaggtccttcacatcccttgtaaggtggattcctaggtattttattctctttgaagcaattgtgaatgggagttcactcctgatttggctctctgtttgtctgttattggtgtataggaatgcttgtgatttttgtacattgactttgtatcctgagactttcctgaagttgcttatcagcttaaggagattttgggctgagacgatggggttttctagatatacaatcatgtcatctgcaaacagggacagtttgacttcctcttttcctaattgaataccgtttatttccttctcctgcctaattgccctggccagaacttccaacactatgttgaataggagtggtgagagagggcatccctgtcttgtgccagttttcaaagggaatgcttccagtttttgcccattgagtatgatactggctgtgtgtttgtcgtagatagctcttactattttgagatatgtcccatcaatacctaatttatggagagtttttagcacaaagcttgttgaattttgtcaaaggccttttctgcatctattgagataatcatgtggtttttgtcattggttctttttatatgctggattacgtttattgatttgcgtatattgaaccagccttgcaccccagggatgaagcccacttgatcatggtggataagctttttgatgtgctgctggatttggtttgccggtattttattgaggatttttgcatcgatgttcatcagggatattggtctaaaattctctttttttgttgtgtctctgccaggctttggtatcaggatgatgctggcctcataaaatgagttagggaggattccctctttttctattgattggaatagtttcagaaggaatggtaccagctcctctttgtacctctggtagaatttggctgtgaatccatctggtcctggactttttttggttggtaagctattaattattgcctcaatttcagagcctgttattggtctattcagagattcagcttcttcctggtttagtcttgggagggtgtttgtgtctaggaatttattcatttcttctagattttctagtttatttgtgtagaggtgtttatagtattctctgatggtagtttttatttctgtgggatcggtggtgatatctgctttatcattttttattgtgtctatttgattcttctctcttttcttctttattagtcttgctagcggtctaccaattttgttgatcttttcaaaaaaccagctcctggattcactgattttttgaagggtttttgtgtccctatttccttcagttctgctctgatcttagttatttcttgccttctgctagcttttgaatgtgtttgctcttggttttctagttcttttaatggtgatgttagggtgtcaattttggatctttcctgctttctcttgtgtgccgtagtgctataaatttccctctacacactgctttgaatgtgtcctagagattctggtatgttcgtatctttattctcattggtttcaaagaacatctttatttctgccttcatttcgttatgtacccagcagtcattcaggagcaggttgttcagtttccatgcagttgactggctttgagtgagtttcttaatcctgagttctagtttcattgcactgtggtctgagagacagtttgttgtaatttctgttcttttacatttgctgaggagtgctttacttccaactatgtggtcagttttggaacaggtgtggtgtggtcctgaaaagaatgtatattctgttgctttggggtggagagttctgtagatgtctattaggtccacttggtgcagagctgagttcaattcctggatatccttgttaactttctgtctcgttgaactgtctaatgttgacagtggggtgttaaaatctcccattattattgtgtgggagtctaagtctctttgtaggtctctaaggacttgctttatgaatctgggtgctcctgtattgggtgcatatatatttaggatagttagctcttcttgtttaattgatccctttaccattatgtaatggccttctttgtctcttttgatctgtgttggtttaaagtctgttttatcagagactaggattgcaacccctgcctttttttgttttccatttgcttggtagatcttcctccatccctttattttgagcctatgtgtgtctctgcacatgagatgggtttcctgaatacagcacactgatgggtcttgactctttatccaatttgccagtctgtgtcttttaattggagcatttagttcatttacatttaaggttaatattgttatgtgtgaatttgantcctgtcattatgatgttagctggttattttgctcgttagttgatgcagtttcttcctagccttgatggtctttacaatttggcatgtttttgccgtggctggtactgagtgttcctttccatgtttagtgcttccttcaggagctcttgtagggcaggcctggtggtgacaaaatctctcagcatttgcttgtctgtaaagtattttatttctccttcacttatgaagcttagtttggctggatatgaaattctgggttgaaaattcttttctttaagaatgttgaatattggcccccactctcttctggcttgtagagtttctgccgagagatcagctgttagtctgatgggcttccctttgtgggtaacccgaggtttctctctggctgcccttaacattttttccttcatttcaactttggtgaatctgacaattatgtgtcttggagttgctcttctcgaggagtatctttgtggtgttctctgtatttcctgaatctgaatgttggcctgccttggtaggttgggaaagttctcctggataataacctgcagagtgttttccaacttggttccattctccccgtcactttcaggtacaccaatcagacgtagatttggtcttttcacatagtccaatatttcctggaggctttgttcatttctttttattcttttttctctaaacttctcttctcgcttcatttcattcatttgatcttccatcacgataccctttcttccagttgatcgaatcggttattgaggcttgtgcattcgtcacgtatttcttgtgccatggttttcagctccatcaggtcctttaaggacttctctgcattggttattctagttagccattcgtctaatattttttcaaggtttttaacttctttgccatgggttagaacttcctcctttagctcggagtagtttgatcatctgaagccttcttctctcaacttgtcaaagtcattctccatccagctttgttccattgctggtgaggagctgcgttcctttggaggaggagaggtgctctgatttttagaattttcagtttttctgctctgttttttccccatctttgtggttttatctacctttggactttgatgatggtgacgtacagatggggttttggtgtggatgtcctttctatttgttagttgtccttctaacagtcaggaccctcagctgcaggtctgttggagtttgctggaggtccactccagaccctgtttgcctgggtatcagcagtggaggctgcagaacagcggatattggtgaacagcaaatgctgcctgatcgttcctctggaagttttgtctcagaggagtacccggtcgtgtgaggtgtcagtctgcccctacttaggggtgcctcccagttaggctactcgggggtcagggacccacttgaggaggcagtctgtccattgtcagatctccagctgcgtgctgggagaaccactactctcttcaaagctgtcagacagggacatttaagcctgcagaggttactgctgccttttatttggctatgccatgcccccagaggtggagtctacagaggtaggcaggcctccttcagctgcgg

SEQ ID NO: 10587 - DNA, 6054 bp, Homo sapiens
ccttttttttttattatactttaagttttagggtacatgtgcacattgtgcaggttagttacatatgtatacatgtgccatgctggtgcgctgcacccactaactcgtcatctagcattaggtatatctcccgatgctatccctcccccctccccccaccccacaacagtccccagagtgtgatattccccttcctgtgtccatgtgatctcattgttcagttcccacctatgagtgagaatatgcggtgtttggtttttttgatcttgcgatagtttactgagaatgatgatttccaatttcatccatgtccctacaaaggacatgaactcatcattttttatggctgcatagtattccatggtgtatatgtgccgcattttcttaatccagtctatcattgttggacatttgggttggttccaagtctttgctattgtgaataatgccacaataacgtgtgcatatgtctttatagcagcatgatttatagtcctttgggtatatacccagtaatgggatggctgggtcaaatggtatttccaggtctagatccctgaggaatcgccacactgacttccacaatggttgaactagtttacagtcccaccaacagtgtaaaagcattcctatttctccacatcctctccagcacctgttgtttcctgactttttaatgattgccattctaactggtgtgagatggtatctcattgtggttttgatttgcatttctctgatggccagtgatgatgagcattttttcatgtgttttttggctgcataaatgtcttcttttgagaagtgtctgttcatattctttgcccactttttgatggggttgtttgtttttttcttgtaaatttgtttgagttcattgtagattctggatattagccctttgtcagatgagtaggttgcgaaaattttctcccattttgtaggttgcctgttcactctgatggtagtttcttttgctgtgcagaagctctttcgtttaattagatcccatttgccaattttggcttttgttgccattgcttttggtgttttagacatgaagtccttgcccatgcctgtgtcctgaatggtaatgcctaggttttcttctagggtttttatggttttaggtctaacgtttaagtctttaatccatcttgaattgatttttgtataaggtgtaaggaagggatccagtttcagctttctacatatggctagccagttttcccagcaccatttattaaatagggaatcctttccccattgcttgtttttctcaggtttgtcaaagatcagatagttgtagatatgcggtgttatttctgagggctctgttctgttccattgatctatatctctgttttggtaccagtaccatgctgttttggttcctgtagccttgtagtatagtttgaagtcaggtagtgtgatgcctccagctttgttcttttggcttaggattgacttggtgatgcagtctctttttcagttccgtatgaactttaaagtagttttttccaattctgtgaagaaagtcattggtagcttgatggggatggcattgaatctgtaaatcaccttgggcagtatggccattttcacaatattgattcttcctacccatgagcatggaatgttcttccatttgtttgtatcctctttgatttccttgagcagtggtttgtagttctccttgaagaggtccttcacatcctttgtaagttggattcctaggtattttattctctttgaagcaattgtgaatgggagttcactcatgatttggctctctgtttgtctgttgttggtgtttaagaatgctggtgatttttgtacattgattttgtatcctgagactttgctgaagttgcttatcagcttaaggagattttgggctgagacagtggggttttctagatatacaatcatgtcgtctgcaaacagggacaatttgacttcctcttttcctaatttaatactctttatttccttctcctgcctaattgccctggccagaacttccaacactatgttgaataggagtggtgagagagggcatccctgtcttgtgccagttttcaaagggaatgcttccagtttttgcccattcagtatgatattggctgtgggtttgtcatagatagctcttattattttgaaatacgtcccatcaatacctaatttattgagagtttttagcatgaagggttgttgaattttgtcaaaggctttttctgcatctattgagataatcatgtggtttttgtctttggctctgtttatatgctggattacatttattgatttgtgtatattgaaccagccttgcatcccagggatgaagcccacttgatcatggtggataagcttttggatgtgctgctggatttgttttgccagtattttattgaggatttttgcatcaatgttcatcaaggatattggtctaaaattctcttcttttgttgtgtctctgcctggctttggtatcagaatgatgctggcctcataaaatgagttagggagaattccctctttttctattgattggaatagtttcagaaggaatggtaccagttcctccttgtatctctggtagaatttggctgtgaatccatctggtcctggactctttttggttggtaagctattgattattgccacaatttcagctcctgttattggtctattcagagattcaacttcttcctggtttagtcttgggagagtgtatgtgtcgaggaatttatccatttcttctagattttctagtttatttgcgtagaggtgtttgtagtattctctgatggtagtttgtatttctgtgggatcggtggtgatatcccctttatcattttttattgcgtctatttgattcttctctctttttttctttattagtcttgctagaggtctatcaattttgttgatcctttcaaaaaaccagctcctggattcattaattttttgaagggttttttgtgtctctatttccttcagttctgctctgattttagttatttcttgccttctgctagcttttgaatgtgtttgctcttgcttttctagttcttttaattgtgatgttagggtgtcaattttggatctttcctgctttctcttgtgggcatttagtgctataaatttccctctacacactgctttgaatgcatcccagagattctggtatgttgtgtctttgttctcgttggtttcaaagaacatctttatttctgccttcatttcgttatgtacccagtagtcatttaggagcaggttgttcagtttccatgtagttgagcggttttgagtgagattcttaatcctgagttctagtttgattgcactgtggtctgagagatagtttgttataatttctgttcttttacatttgctgaggagagctttacttgcaagtatgtggtcaattttggaataggtgtggtgtggtgctgaaaaaaatgtatattctgttgatttggggtggagagttctgtagatgtctattaggtctgcttggtgcagagctgagttcaattcctgggtatccttgttgactttctgtctcgttgatctgtctaatgttgacagtggggtgttaaagtctcccattattaatgtgtgggagtctaagtctctttgtaggtcactcaggacttgctttatgaatcttggtgctcctgtattgggtgcatatatatttaggatagttagctcttcttgctgaattgatccctttaccattatgtaatggccttctttgtctcttttgatctttgttggtttaaagtctgttttatcagagactaggattgcaacccctgcctttttttgttttccattggcttggtagatcttcctccatccttttattttgagcctatgtgtgtctctgcacgtgagatgggtttcctgaatacagcacactgatgggtcttgactctttatccaatttgccagtctgtgtcttttaattggagcatttagtccatttacatttaaagttaatattgttatgtgtgaatttgatcctgtcattatgatgttagctggttattttgcttgttagttgatgcagtttcttcctagtctcgatggtctttacattttggcatgattttgcagcggctggtaccggttgttcctttccatgtttagtgcttccttcaggagctcttgtatggcaggcctggtggtgacaaaatctctcagcatttgcttgtctgtaaagtattttatttctccctcacttatgaagcttagtttggctggatatgaaattctgggttgaaaattcttttctttaagaatgttgaatattggcccccactctcttctggcttgtagggtttctgccgagagatccgctgttagtctgatgggcttccctttgagggtaacccaacctttctctctggctgcccttaacattttttccttcatttgaactttggtgaatctgacaattatgtgtcttggagttgctcttctcgaggagtatctttttggcgttctctatatttcctgaatctgaacgttggcctgccttgctagattggagaagttctcctggataatatcctgcagagtgttttccaacttggttccattctccccatcactttcaggtacaccaatcagacgtagatttggtcttttcacatagtcccatatatcttggaggctttgctcatttctttttattcttttttctctaaacttcccttctcgcttcatttcattcatttcatcttccattgctgataccctttcttccagttgatcgcatcggctcctgaggcttctgcattcttcacttagttcttgagccttggttttcagctccatcagctcctttaagcacttctctgtattggttattctagttatacattcgtctaaatttttttcaaagttttcaacttctttgcctttggtttgaatgtcctcccatagctcagagtaatttgatcgtctgaagccttcttctctcagctcatcaaagtcattctccatccagctttgttccattgctggtgaggaactgcgttcctttggaggaggagaggtgctctgctttttatagtttccagtttttctgttctgttttttccccatctttgtggttttatctacttttggtctttgatgatggtgatgtacagatgggtttttggtgtggatgtcctttctgtttgttagttttccttctaacagagaggaccctcagctgcaggtctgttggagtaccctgccgtgtgaggtgtcagtgtgcccctgctggggggtgcctcccagttaggctgctcgggggtcaggggtcagagacccacttgaggaggcagtctgcccgttctcagatctccagctgcgtgctgggagaaccactgctctcttcaaagctgtcagacagggacatttaagtctgcagaggttactgctgcctttttctttgtctgtgccctgcccccagaggtggagcctacagaggcaggcaggcctccttgagctgtggtgggctccacccagttcgcgcttccaggctgctttgtttacctaatcaagcctgggcaatggcgggcgcccctcccccagcctcgctgccgcccctcccccagcctcgctgccgccttgcagtttgatctcagactgctgtgctagcaatcagcgagactccgtgggcgtaggaccctctgagccaggtgcgggatataatctcgtggtgcgccgttttttaagcccgtcggaaaagtgcagtattctggtgggagtgacccgattttccaggtgccgtccgtcacccctttctttgactcagaaagggaactccctgaccccttgcgcttcccaggtgaggcaatgcctcgccctgcttcggctcgcacacggtgcacgcacccactgacctgtgcccactgtctggcactccctagtgagatgaacccggtacctcatatggaaatgcagaaatcacccgtcttctgcgttgctcacgctgggagctgtagaccagagctgttcctattcggccatcttggctcctcccccata

SEQ ID NO: 10588 - DNA, 4975 bp, Homo sapiens
tttttgagacagtcttgctctgtcactcagaatggagtgcagtggtgtgaacatggctcactgtggcctccatctcctgggctcaaataatctcctgccttagcctccccagtagctgggaccacatgtttactttttaaaaattttttatttattattattatactttaagttctagggtacatgtgcacaatgtgccagtttgttacatatgtatacatgtgccacgttggtgtgctgcacccattaactcatcatttacattaggtatatctcctaatgctatccctcccccatgcccccaccctacaacaggccccggtgtgtgatgttcctcttcctgtgtccatgtgttctcattgttcacctcccatctatgagtgagaacatgcggtgtttggttttctgtccttgcgatagtttgctgagaatgatggtttccagcttcatccatgtccctacaaaggacatgaactcatcattttttatggctgcatagtattccatggtgtatatgtgccacattttcttaatccagtctatcactgatagacatttgggatggttccaagtctttgctattgtgaatagtgccacaataaacatacgtgtgcatgtgtctttatagcagcatgatttataatccttcgggtatatacctagtaatgggatggctgggtcaaatggtatttctagttctagatccttgaggaatcgccactgtcttccacaatggttgaactagtttaccgtcccaccaacagtgtaaaagtgttcctatttctccacatcctctccagcacctgttgtttcctgactttttaatgatcaccattttaactggtgtgagatggtatctcattgtggttttgatttgcatttctctgatggccagtgatgatgagcattttttcatgtgtctgttggctgcataaatgtcttcttttgagaaatgtctgttcatatcctttgcccacttttcgatggggttgtttgattttttcttgtaaatttgtttaagttctttgtagattctggatattagccctttgtcagatggatagattgcaaaaattttctcccattctgtgggttgcctgttcactctgatggtaatttcttttgctgtgcagaagctctttggtttaattagatcccatttgtcaattttggcttttgttgccattgcttttggtgttttagacaggaagtccttgcccatgcctatgtcctgaatggtattgcctaggttttcttctagggtttttaatggttttcggtctgacattaagtctttaatccatcttgaattaatttttgtataaggtgtaaggaaggggtacagtttcagctttctatatatggctggccagttttcccagcaccatttattaaatagggaatcctttccctatttcttgtttttgtcaggtttgtcaaaggtcagatggttgtaggtgtgtggcattatttctgagggctctgttctgttccattggtctatatttctgttttggtaccagtaccatgctgttttggttactgtagctttgtagtatagtttgaagtcaggtagcgtgatgcctccagctttgttcttttggcttaggattgtcttggcaatgcgggttcttttttggttccatatgaactttaaagtagttttttccaattctgtgaagaaagtcattggtagcttgatggggatggcattgaatctataaattacctcgggcagtatggctattttcacgatattgattcttcctatccatgagcatggaatgttcttccatttgtttgtgtccccttttatttcattgagcagtggtttgtaattctccttgaagaggtccttcacatcccttgtaagttgtattcctaggttttttattttctttgaagcaactgtgaatgggagttcactcatgatttggctctctgtttctctgttattgctgtataggaatgcttgtgatttttgcacattgatattgtatcctgagactttgctgaagttgcttatcagcttaaggagatttttggctgagacgatggggttttctaaatatacagtcatgttatctacaaacagggacaatttgacttcctcttttcctaattgaataccctttatttctttctcctgcctgattgccctggccagaacttccaacactatgttgaataggagcagtgagagagggcattcctctcttgggccagttttcaaagggaatacttacagtttttgcccattcagtatgatattggctgtgggtttgtcataaatagctcttattattttgagatacatcccatcagtacctaatttattgagagtttttagcatgaagcgctgttgaattttctcgaaggccttttctgcatctactgagataatcatgtggtttttgtctttggttctgtttatacgatggattatgtttattgattggcatgttgaaccatccttgcatcccagggatgaagcccacttgatcatggtggataagctttttgatgtgctgctggattcactttgccattattttgttgaggatttttgcatttatgttcatcagggatattgatctaaaattctctttttttgttgtgtctctgccaggctttggtatcaggatgatgctggcctcataaaatgagttagggaggattccctctttttctattgattggaatagtttcagaaggaatggtgccagctcctctttgtacctctggtagaattcggctgtgaatctgtctggtcctggactttttttggttggtagtctcttaattgttgcctcaatttcagagtctgttattggtctattcagggattcaccttcttcctggtttagtcttgggagggtgtatgtgtccaggaatttatccatttcttctagattttctagtttatttgcgtagagttgttcatagtattctctgatggtaatttgtatttctgtgggatcggtggtgatatcccctttatcattttttattgtgtctatttgattcttctctcttttcttctttattagtcttgctagcggtctatcaattttgttgatcttttcaaaaaaccagctcctggattcattgattttttgaagggttttttgtgtctctatctccttcagttctgctctgatcttagttatttcttgccttctgctagcttttgcatgtgtttgctcttgcttctctagttcttttaattgtgatgttagggtgtcaattttagatcttttcctgctttctcttgtgggcatttagtgctataaatttccttctacacactgctttaaatgtgtcccagagattctggtatgttgtgtctttattctcattggtttcagagaacacctttgtttctgccttcatttcattttgtacccagtagtcattcaggagcaggttgttcagtttctatgtagctgagcagttctgagtgagtttcttaatcctgagttctagtttgattgcactgtggtctgagagacagttttttataatttctgttctttttcatttgctgaggagtactttacttccgactatgtggtcaattttggaataagtgtgatgtggtgctgagaagaatgtatattctgttgatttggggtggagagttctgtagatgtctattaggtccgcttggtggagagctgagttcaattgctggatatccttgttaactttctgtctcgtggatctgtctaatgttgacagtggggtattaaagtctcccattattattgtgtgggagtctaagtctctttgtaggtctctaaggatttgctttatgaatctgggtgctcctgtattgggtgcatatatatttaggatagttagctcttcttgttgaattgatccctttaccattatgtaatggccttctttgtctcttctgatctttgttggtttaaagtctgttttatcagagactaggattgcaacccctgcttgtttttgttttccatttgcttggtagatcctcctccatccctttattttgagcctatgtgtgtctctgcatgtgagatgggtctcctgaatacagcatactgatgggtctcgactctttatccaatttgccagtctgtgtcttttaattggagcatttagcccatttacatttaaggttaatattgttatgtgtgaatttgatcctgtcattatgatgttagctggttagtttgctcgttagttgatgcagtttcttcctagcctcgatggtctttacagttgggcatgttttttgcagtggctggtaccggttgttccaatccatgtttagtgcttccttcaggagcccttttagggcaggcctggtggtgacaaaatctttcagcatttgctcgtctgtaaagtattttatttgtccttcacttatgaagcttagtttgtctggatatgaaattctgggttgaaaattcttttctttaagaatgttgaatattggcccccactctcttctggcttgtagagtttctgctgagagatctgctgttagtctgatggacttccctttgtgggtaacccgacctttctctctgtctacccttaacattttttccttcatttcaactttggtgaatctaacaattatgtgtcttggagttgctcttcttgaggagcatctttgtggcgttctctgtatttcctgtatttgaatgttggcctgccttgctaggttggggaagttctcttggataatatcctgaagagtgtttccaacttgtttccattctctccgtcactttcaggtacagcaatcagatgtagatttggtcttttcacatagtcccatatgttttggaggatttgttcttttctttttactcttttttctctaaacttctcttcttgcttcatttcattcatttgatcttcaatcactgataccctttcttccagttgatcaaatcagctactgaagcttgtgcatgcatcacgtaattct

SEQ ID NO: 10589 - DNA, 6429 bp, Homo sapiens
tttctttttttttttttgcttttctttctttttttttttttgcttttctttttttttattatactttaagttttagggtacatgtgcacattgtgcaggttagttacatatgtatacatgtgccatgctggtgcgctgcacccactaactcgtcatctagctttaggtatatctcccaatgctatccctccccgctccccccaccccaccacagtccccagagtgtgatattccccttcatgtgtccatgtgacctcattgttcgattcccagctatgaacgagaatatgcggtgtttggtttattgttcttgcgatagtttactgagaatgatgatatccaatttcatccatctccctacaaaggacatgaactcatccttttttatggctgcatagtattccatggtgtatatgtgccacattttcttaatccagtctatcattgttggacatttgggttggttccaagtctttgctattgtgaataatgccgcaataaacatacgtgtgcatgtgtctttatagcagcatgatttatagtcatttgggtatatacccagtaatgggatggctgggtcaaatggtatttctagttctagatccctgaggaatggccacactgacttccacaatggttgaactagtttacagtcccaccaacagtgtaaaagtgttcctatttctccacatcctctccagcacctgttgtttcctgactttttaatgattgccattctaactggtgtgagatgatatctcatagtggttttgatttgcatttctctgatggccagtgatgatgagcattttttcatgtgttttttggctgcataaatgtcttcttttgagaagtgtctgttcatgtccttcgcccactttttgatggggttgtttgtttttttcttgtaaatttgttggagttcattgtagattctggatattagccctttgtcagatgagtaggttgcgaaaattttctcccatgttgtaggttgcctgttcactctgatggtagtttcttttgctgtgcagaagctctttagtttaatgagatcccatttgtcaattttggcttttgttgccattgcttttggtgttttggacatgaagtccttgcccatgcctatgtcctgaatgataatgcctaggttttcttctagggtttttatggttttaggtctaacgtttaaatctttaatccatcttgaattgatttttgtataaggtgtaaggaagggatccagtttcagctttctacatatggctagccagttttcccagcaccatttattaaatagggaatcctttccccattgcttgtttttctcaggttcgtcaaagatcagatagttgtaggtatgcggcgttatttctgagggctctgttctgttccattgatctatatctctgttttggtaccagtaccatgctgttttggttactgtagccttgtagtatagtttgaagtcaggtagtgtgatgcctccagctttgttcttttggcttaggattgacttggtgatgcgggctcttttttggttccatatgaactttaaagtagttttttccaattctgtgaagaaagtcattggtagcttgatggggatggcattgaatctgtaaattaccttgggcagtatggccattttcacgatattgattcttcctacccatgagcatggaatgttcttccatttgtttgtatcctcttttatttccttgagcagtggtttgtagttctccttgaagaggtccttcacatcccttgtaagttggattcctaggtattttattctctttgaagcaattgtgaatgggagttcactcctgatttggctctctgtttgtctgttgttggtgtataagaatgcttgtgatttttgtacattgattttgtatcctgagactttgctgaagttgcttatcagcttaaggagattttgggctgagacgatggggttttctagataaacaatcatgtcgtctgcaaacagggacaatttgacttcctcttttcctaattgaataccctttatttccttctcctgcctgattgccctggccagaacttccaacactatgttgaataggagcagtgagagagggcatccctgtcttgtgccacttttcaaagggaatgcttccagtttttgcccattcagtatgatattggctgtgggtctgtcatagacagctcttattattttgaaatacgtcccatcaatacctaatttattgagagtttttagcatgaagggttgttgaattttgtcaaaggctttttctgcatctattgagataatcatgtggtttttgtctttggctctgtttatatgctggattacatttattgatttgtgtatattgaaccagccttgcatcccagggatgaagcccacttgatcatggtggataagctttttgatgtgctgctggattcggtttgccagtattttattgaggatttttgcatcaatgttcatcaaggatattggtctaaaattctcttttttggttgtgtctctgcccggctttggtatcagaatgatgctggcctcataaaatgagttagggagggttccctctttttctattgattggaatagtttcagaaggaatggtaacagttcctccttgtacctctggtagaattcggctgtgaatccatctggtcctggactctttttggttggtaaactattgattattgccacaatttcagctcctgttattggtctattcagagattcaacttcttcctggtttagtcttgggtgagtgtatgtgtcgaggaacgtatccatttcttctagattttctagtttatttgcgtagaggtgtttgtagtattctctgatggtagtttgtatttctgtgggatcagtggtgatatcccctttatcattttttattgtgtctatttgattcttctctctttttttctttattagtcttgctagcggtctatcaattttgttgatcctttcaaaaaaccagctcctggattcattgattttttgaagggttttttgtgtctctatttccttcagttctgctctgatcttagttatttcttgccttctgctagcttttgaactagctcttgcttttctagttcttttaattgtgatgttagggtgtcaattttggatctttcctgctttctcttgtgggcatttagtgctataaatttccctctacacactgctttgaatgcatcccagagattctggtatgttgtgtctttgttctcgttggtttcaaagaacatctttatttctgccttcatttccttatgtacccagtagtcattcaggagcaggttgttcagtttccatgtagttgagcggctttgagtgagattcttaaccctgagttctagtttgattgcactgtggtctgagggatagtttgttataatttctgttcttttacatttgctgaggagagctttacttccaactatgtggtcaattttggaataggtgtggtgtggtgctgaaaaaaatgtatattctgttgatttggggtggagagttctgtagatgtctattaggtccgcttggtacagagctgagttcaattcctgggtatccttgttgactttctgtctcgttgatctgtctaatgttgacagtggggtgttaaagtctctcattattaatgtgtgggagtctaagtctctttggaggtcactcaggacttgctttatgaatctgggtgctcctgtattgggtgcatatatatttaggatagttagctcctcttgttgaattgatccctttaccattatgtaatggccttctttgtctcttttgatctttgttggtttgaagtctgttttatcagagactaggattgcaacccctgcctttttttgttttccatttgcttggtagatcttccttcatccttttattttgagcctatgtgtgtctccgcacgtgagatgggtttcctgaatacagcacactgatgggtcttgactctttatccaacttgccagtctgtgtcttttaattggagcatttagtccatttacatttaaagttaatattgttatgtgtgaatttgatcctgtcattatgatgttagctggtgattttgctcgttagttgatgcagtttcttcctagtctcgatggtctttacattttggcatgattttgcagcggctggtaccggttgttcctttccatgtttagcgcttccttcaggagctcttttagggcaggcctggtggtgacaaaatttctcagcatttgcttgtctgtaaagtattttatttctccttcacttatgaagcttagtttggctggatatgaaattctgggttgaaaattcttttctttaagaatgttgaatattggcccccactctcttctggcttgtagggtttctgctgagagatccgctgttagtgtgatgggcttccctttgagggtaacccgacctttctctctggctgcccttaacattttttccttcatttcaactttggtgaatctgacaattatgtgtcttggagttgctcttctcaaggagtatctttgtggcgttctctgtatttcctgaatctgaacgttggcctgccttgctagattggggaagttctcctggataatatcctgtagagtgttttccaacttggttccattctccgcatcactttcaggtacaccaatcagacgtagatttggtcttttcacatagtcccatatttcttggaggctttgctcatttctttttattctttttctctaaccttcccttctcacttcatttcattcatttcatcttccattgctgataccctttcttccagttgatcgcattggctcctgaggcttctgcattcttcacgtagttctcgagccttggttttcagctccatcagctcctttaagcacttctctgtattggttattctagttatacattcttctaaatttttttcaaagttttcaacttctttgcctttggtttgaatgtcctcccgtagctcagagtaatttgatcgtctgaagccttcttctctcagctcgtcaaagtcattctccatccagctttgttccgttgctggtgaggaactgcgttcctttggaggaggagaggcgctctgcgttttagagtttccagtttttctgttctgttttttccccatctttgtggttttatctacttttggtcttgatgatggtgatgtacagatgggtttttggtgtggatgtcctttctgtttgttagttttccttctaacagacaggaccctcagctgcaggtctgttggaataccctgccgtgtgaggtgtcagtgtgcccctgctggggggtgcctcccagttaggctgctcgggggtcaggggtcagggacccacttgaggaggcagtctgcccgttctcagatctccagctgtgtgctgggagaaccactgctctcttcaaagctgtccgacagggacatttaagtctgcagaggtttctgctgtctttttgtttgtctgtgccctgcccccagaggtggagcctacagaggcaggcaggcctccttgagctgtggtgggctccacccagttggagcttcccggctgctttgtttacctaagcaagcctgggcaatggcgggcgcccctcccccagcctcgctgccgccttgcagtttgatctcagactgctgtgctagcaatcagcgagattctgtggggtaggaccctccaagccaggtgagggatataatctcgtggtgcgccgttttttaagccggtctgaaaagcgcaatattcaggtgggagtgacccgattttccaggtgcgtccgtcacccctttctttgacttggaaagggaactccctgaccccttgcgcttcccaggtgaggcaatgcctcgccctgcttcggctcgcgcccggtgcgcgcacccactggcctgcgcccactgtctggcactccctagtgagatgaacccggtacctcagatggaaatgcagaaatcacccgtcttctgcgtcgctcacgctgggagctgtagaccggagctgttcctattcggccatcttggctcctcctcctctggtatgtctttatagcagtatgagaatggactaatacagaaaattggtaccagagtagagtggcatttctataaagatacctgaactgtgaaagtgattttggatctgaataatgggcagaggttgggacagtttggagggatgagaggcagacagaaagatgagggaaagtttgaaacttcctagaggctgagtgtggtggctcatgcctgtaatcccagtactttgggaggccaagggggatggatcccttgaggtcagtagttcaagaccagcctggtcaacatggcaaaaccccgtctctactaaaaacatggaaattagctgggcctggtgacgcatgccttaatcctcgct

SEQ ID NO: 10590 - DNA, 4975 bp, Homo sapiens
tttttgagacagtcttgctctgtcactcagaatggagtgcagtggtgtgaacatggctcactgtggcctccatctcctgggctcaaataatctcctgccttagcctccccagtagctgggaccacatgtttactttttaaaaattttttatttattattattatacttaaagttctagggtacatgtgcacaatgtgccagtttgttacatatgtatacatgtgccacgttggtgtgctgcacccattaactcatcatttacattaggtatatctcctaatgctatccctcccccatgcccccaccctacaacaggccccggtgtgtgatgttcctcttcctgtgtccatgtgttctcattgttcacctcccatctatgagtgagaacatgcggtgtttggttttctgtccttgcgatagtttgctgagaatgatggtttccagcttcatccatgtccctacaaaggacatgaactcatcattttttatggctgcatagtattccatggtgtatatgtgccacattttcttaatccagtctatcactgatagacatttgggatggttccaagtctttgctattgtgaatagtgccacaataaacatacgtgtgcatgtgtctttatagcagcatgatttataatccttcgggtatatacctagtaatgggatggctgggtcaaatggtatttctagttctagatccttgaggaatcgccactgtcttccacaatggttgaactagtttaccgtcccaccaacagtgtaaaagtgttcctatttctccacatcctctccagcacctgttgtttcctgactttttaatgatcaccattttaactggtgtgagatggtatctcattgtggttttgatttgcatttctctgatggccagtgatgatgagcattttttcatgtgtctgttggctgcataaatgtcttcttttgagaaatgtctgttcatatcctttgcccacttttcgatggggttgtttgattttttcttgtaaatttgtttaagttctttgtagattctggatattagccctttgtcagatggatagattgcaaaaattttctcccattctgtgggttgcctgttcactctgatggtaatttcttttgctgtgcagaagctctttggtttaattagatcccatttgtcaattttggcttttgttgccattgcttttggtgttttagacaggaagtccttgcccatgcctatgtcctgaatggtattgcctaggttttcttctagggtttttaatggttttcggtctgacattaagtctttaatccatcttgaattaatttttgtataaggtgtaaggaaggggtacagtttcagctttctatatatggctggccagttttcccagcaccatttattaaatagggaatcctttccctatttcttgtttttgtcaggtttgtcaaaggtcagatggttgtaggtgtgtggcattatttctgagggctctgttctgttccattggtctatatttctgttttggtaccagtaccatgctgttttggttactgtagctttgtagtatagtttgaagtcaggtagcgtgatgcctccagctttgttcttttggcttaggattgtcttggcaatgcgggttcttttttggttccatatgaactttaaagtagttttttccaattctgtgaagaaagtcattggtagcttgatggggatggcattgaatctataaattacctcgggcagtatggctattttcacgatattgattcttcctatccatgagcatggaatgttcttccatttgtttgtgtccccttttatttcattgagcagtggtttgtaattctccttgaagaggtccttcacatcccttgtaagttgtattcctaggttttttattttctttgaagcaactgtgaatgggagttcactcatgatttggctctctgtttctctgttattgctgtataggaatgcttgtgatttttgcacattgatattgtatcctgagactttgctgaagttgcttatcagcttaaggagatttttggctgagacgatggggttttctaaatatacagtcatgttatctacaaacagggacaatttgacttcctcttttcctaattgaataccctttatttctttctcctgcctgattgccctggccagaacttccaacactatgttgaataggagcagtgagagagggcattcctctcttgggccagttttcaaagggaatacttacagtttttgcccattcagtatgatattggctgtgggtttgtcataaatagctcttattattttgagatacatcccatcagtacctaatttattgagagtttttagcatgaagcgctgttgaattttctcgaaggccttttctgcatctactgagataatcatgtggtttttgtctttggttctgtttatacgatggattatgtttattgattggcatgttgaaccatccttgcatcccagggatgaagcccacttgatcatggtggataagctttttgatgtgctgctggattcactttgccattattttgttgaggatttttgcatttatgttcatcagggatattgatctaaaattctctttttttgttgtgtctctgccaggctttggtatcaggatgatgctggcctcataaaatgagttagggaggattccctctttttctattgattggaatagtttcagaaggaatggtgccagctcctctttgtacctctggtagaattcggctgtgaatctgtctggtcctggactttttttggttggtagtctcttaattgttgcctcaatttcagagtctgttattggtctattcagggattcaccttcttcctggtttagtcttgggagggtgtatgtgtccaggaatttatccatttcttctagattttctagtttatttgcgtagagttgttcatagtattctctgatggtaatttgtatttctgtgggatcggtggtgatatcccctttatcattttttattgtgtctatttgattcttctctcttttcttctttattagtcttgctagcggtctatcaattttgttgatcttttcaaaaaaccagctcctggattcattgattttttgaagggttttttgtgtctctatctccttcagttctgctctgatcttagttatttcttgccttctgctagcttttgcatgtgtttgctcttgcttctctagttcttttaattgtgatgttagggtgtcaattttagatcttttcctgctttctcttgtgggcatttagtgctataaatttccttctacacactgctttaaatgtgtcccagagattctggtatgttgtgtctttattctcattggtttcagagaacacctttgtttctgccttcatttcattttgtacccagtagtcattcaggagcaggttgttcagtttctatgtagctgagcagttctgagtgagtttcttaatcctgagttctagtttgattgcactgtggtctgagagacagttttttataatttctgttctttttcatttgctgaggagtactttacttccgactatgtggtcaattttggaataagtgtgatgtggtgctgagaagaatgtatattctgttgatttggggtggagagttctgtagatgtctattaggtccgcttggtggagagctgagttcaattgctggatatccttgttaactttctgtctcgtggatctgtctaatgttgacagtggggtattaaagtctcccattattattgtgtgggagtctaactctctttgtaagtctctaaagatttgctttatgaatctgggtgctcctgtcttgggtgcatatatatttaagatagttagctcttcttgttgaattgatccctttaccattatgtaatggccttctttgtctcttctgatctttgttggtttaaagtctgttttatcagagactaggattgcaacccctgcttgtttttgttttccatttgcttggtagatcctcctccatccctttattttgagcctatgtgtgtctctgcatgtgagatgggtctcctgaatacagcatactgatgggtctcgactctttatccaatttgccagtctgtgtcttttaattggagcatttagcccatttacatttaaggttaatattgttatgtgtgaatttgatcctgtcattatgatgttagctggttagtttgctcgttagttgatgcagtttcttcctagcctcgatggtctttacagttgggcatgttttttgcagtggctggtaccggttgttccaatccatgtttagtgcttccttcaggagcccttttagggcaggcctggtggtgacaaaatctttcagcatttgctcgtctgtaaagtattttatttgtccttcacttatgaagcttagtttgtctggatatgaaattctgggttgaaaattcttttctttaagaatgttgaatattggcccccactctcttctggcttgtagagtttctgctgagagatctgctgttagtctgatggacttccctttgtgggtaacccgacctttctctctgtctacccttaacattttttccttcatttcaactttggtgaatctaacaattatgtgtcttggagttgctcttcttgaggagtatctttgtggcgttctctgtatttcctgtatttgaatgttggcctgccttgctaggttggggaagttctcttggataatatcctgaagagtgtttccaacttgtttccattctctccgtcactttcaggtacagcaatcagatgtagatttggtcttttcacatagtcccatatgttttggaggatttgttcttttctttttactcttttttctctaaacttctcttcttgcttcatttcattcatttgatcttcaatcactgataccctttcttccagttgatcaaatcagctactgaagcttgtgcatgcatcacgtaattct

SEQ ID NO: 10591 - DNA, 6032 bp, Homo sapiens
aaggtatttttttttttttattatactttaagttttagggtacatgtgcacattgtgcaggttagttacatatgtatacatgtgccatgctggtgcgctgcacccactaacttgtcatctagcattaggtatatctcccaatgctatccctcccccctcccccaaccccaccacagtccccagagtgtgatattccccttcctgtgtccatgtgatctcattgttcaattcccacctatgagtgagaatatgcggtgtttggttttttgttcttgcgatagtttactgagaatgatggtttccaatttcatccatgtccctacaaaggacgtgaactcatcattttttatggctgcatagtattccatggtgtatatgtgccacattttcttaatccagtctatcattgttggacatttgggttggttccaagtctttgctattgtgaataatgccgcaataaacatacgtgtgcatgtgtctttatagcagcatgatttatagtcctttgggtatatacccagtaatgggatggctgggtcaaatggtatttctagttctagatccctgaggaatcgccacactgacttccacaatggttgaactagtttacggtcccaccaacagtgtaaaagtgttcctatttctccacatcctctccagcacctgttgtttcctgactttttaatgattgccattctaactggtgtgagatgatatctcatagtggttttgatttgcatttctctgatgaccagtgatggtgagcattttttcatgtgttttttggctgcataaatgtcttcttttgagaagtgtctgttcatgtccttcgcccactttttgatggggttgtttgtttttttcttgtaaatttgttggagttcattgtagattctggatattagccctttgtcagatgagtaggttgcaaaaattttctcccatgttgtaggttgcctgttcactctgatcgtagtttcttttgctgtgcagaagctctttagtttaattagatcccatttgtcaattttggcttttgttgccattgcttttggtgttttggacatgaagtccttgcccacgcctatgtcccgaatggtaatgcctaggttttcttctagggttatatggttttaggtctaacgcttaaatatttaatccatcttgaattgatttttgtataaggtgtaaggaagggatccagtttcagctttctacatatggctagccagttttcccagcaccatttattaaatagggaatcctttccccattgcttgtttttctcaggtttgtcaaagatcagatagttgtaggtatgcggcgttatttctgagggctctgttctgttccattgatctatatctctgttttggtaccagtaccatgctgttttggttactgtagccttgtagtatagtttgaagtcaggtagtgtgatgcctccagctttgttcttttggcttaggattgacttggcgatgcgggctcttttttggttccatatgaactttaaagtagttttttccaattctgtgaagaaagtcattggtagcttgatggggatggcattgaatctataaattaccttgggcagtatggccattttcacgatattgattcttcctacccatgagcatggaatgttcttccatttgtttgtatcctcttttatttccttgagcagtggtttgtagttctccttgaagaggtccttcacatcccttgtaagttggattcctaagtattttattctctttgaagcaattgtgaatgggagttcactcatgatttggctctctgtttgtctgttgttggtgtataagaatgcttgtgatttttgtacattgattttgtatcctgagactttgctgaagttgcttatcagcttaaggagattttgggctaagacgatggggttttctagataaacaatcatgtcgtctgcaaacagggacaatttgacttcctcttttcctaattgaataccctttatttccttctcctgcctgattgccctggccagaacttccaacactatgttgaataggagcggtgagagagggcatccctgtcttgtgccagttttcaaagggaatgcttccagtttttgcccattcagtatgatattggctgtgggtttgtcatagatagctcttattattttgaaatacgtcccatcaatacctaatttattgagagtttttagcatgaagggttgttgaattttgtcaaaggccttttctgcatctattgagataatcatgtggtttttgtctttggctctgtttatatgctggattacatttattgatttgcgtatattgaaccagccttgcatcccagggatgaagcccacttgatcatggtggataagctttttgatgtgctgctggattcggtttgccagtattttattgaggatttttgcatcaatgttcatcaaggatattggtctaaaattctcctttttggttgtgtctctgcccggctttggtatcagaatgatgctggcctcataaaatgagttagggaggattccctctttttctatcgattggagtagtttcagaaggaatggtaccagttcctccttgtacctctggtagaattcggctgtgaatccatctggtcctggactctttttggttggtaaactattgattattgccacaatttcagctcctgttattggtctattcagagattcaacttcttcctggtttagtcttgggagaatgtatgtgtcgaggaatgtatccatttcttctagattttctagtttatttgagtagaggtgtttgtagtattctctgatggtagtttgtatttctgtgggatcggtggtgatatcccctttatcattttttattgcgtctatttgattcttctctcttttttttttttattagtcttgctagcgatctatcaattttgttgatcctttcaaaaaaccagctcctggattcattgattttttgaagggttttttgtgtctctatttccttcagttctgctctgattttagttatttcttgccttctgctagcttttgaatgtgtttgctcttgcttttctagttcttttaattgtgatgttagggtgtcaattttggatctttcctgctttctcttgtgggcatttagtgctataaatttccctctacacactgctttgaatgcgtcccagagattctggtatgttgtgtctttgttctcgtgggtttcaaagaacatctttatttctgccttcatttcgttatgtacccagtagtcattcaggagcaggttgttcagtttccatgtagttgagcggctttgagtgagattcttaatcctgagttctagtttgattgcactgtggtctgagagatagtttgttataatttctgttcttttacatttgctgaggagagctttacttccaactatgtggtcaattttggaataggtgtagtgtggtgctgaaaaaaatgtatattctgttgatttggggtggagagttctgtagatgtctattaggtctgcttggtgcagagctgagttcaattcctgggtatccttgttgactttctgtctcgttgatctgtctaatgttgacagtggggtgttaaagtctcccattattaatgtgtgggagtctaagtctctttgtaggtcactcaggacttgctttatgaatctgggtgctcctgtattgggtgcatatatatttaggatagttagctcctcttgttgaattgatccctttaccattatgtaatggccttctttgtctcttttgatctttgttggtttaaagtctgttttatcagagactaggattgcaacccctgcctttttttgttttccatttgcttggtagatcttcctccatccttttattttgagcctatgtatgtctctgcacatgagatgggtttcctgaatacagcacactgatgggtcttgactctttatccaacttgccagtctgtgtcttttaattggagaatttattccatttacatttaaagttaatattgttatgtgtgaatttgatcctgtcattatgatgttagctggtgattttgctcgttagttgatgcagtttcttcctagtctcgatggtctttacattttggcatgattttgcagcggctggtaccggttgttcctttccatgtttagcgcttccttcaggagctcttttagggcaggcctggtggtgacaaaatctctcagcatttgcttgtctgtaaagtattttatttctccttcacttatgaagcttagtttggctggatatgaaattctggattgaaaattcttttctttaagaatgttgaatattggcccccactctcttctggcttgtagggtttctgccgagagatccgctgttagtctgatgggcttccctttgagggtaacccgacctttctctctggctgcccttaacattttttccttcatttcaactttggtgaatctgacaattatgtgtcttggagttgctcttctcgaggagtatctttgtggcgttctctgtatttcctgaatctgaacgttggcctgccttgctaggttggggaagttctcctggataatatcctgcagagtgttttccaacttggttccattctccccatcactttcaggtacaccaatcagacgtagatttggtcttttcacatagtcccatatttcttggaggctttgctcatttctttttattcttttttctctaaacttcccttctcgcttcatttcattcatttcatcttccattgctgataccctttcttccagttgatcgcatcagctcctgaggcttctgcattcttcacgtagttctcgagccttggttttcagctccatcagctcctttaagcacttctctgtattggttattctagttatacattcttctaaatttttttcaaagtttcaacttctttgtttttggtttgaatgtcctcccgtagctcagagtaatttgatcatctgaagccttcttctcttagctcgtcaaaatcattctccatccagctttgttccgttgctggtgaggaactgcgttcctttggaggagaggcgctctgcgttttagagtttccagtttttctgttctgttttttccccatctttgtggttttatctacttttggtctttgatgatggtgatgtacagatgggttttcggtgtggatgtcctttctgtttgttatttttccttctaacagacaggaccctcagctgcaggtctgttggaataccctgccgtgtgaggtgtcagtgtgcccctgctggggggtgcctcccagttaggctgctcgggggtcaggggtcagggacccacttgaggaggcagtctgcccgttctcagatctccagctgcgtgctgggagaaccactgctctcttcaaagctgtcagacagggacatttaagtctgcagaggttactgctgtctttttgtttgtctgtgccctgcccccagaggtggagcctacagaggcaggcaggcctccttgagctgtggtgggctccacccagttcgagcttcctggctgctttgtttacctaagcaagcctgggcaatggtgggcgcccctcccccagcctcgctgccgccttgcagtttgatctcagactgctgtgctggcaatcagtgagattccgtgggcgtaggaccctccgagccaggtgtgggatatagtctcgtggtgcgccattttttaagccggtctgaaaagtgcaatattcgggtgggagtgacccgattttccaggtgcgtctgtcacccctttctttgactcggaaagggaactccctgaccccttgcgcttcccaggtgaggcaatgcctcgccctgcttcggctcgcgcacggtgcgtgcacccactgacctgcgcccactgtctggcactccctagtgagatgaacccggtacctcagatggaaatgcagaaatcaccagtcttctgcgtcgctcacgctgggagctgtagaccggagctgttcctattcggccatcttggctcctccc

SEQ ID NO: 10592 - DNA, 6532 bp, Homo sapiens
ttatttttttattttttattttttcttgagttttttttaatttatttatttattattattataccttaagttttagggtacatgtgcacaatgtgcaggttagttacatatgtatacatgtgccatgctggtgcgctgcacccactgactcgtcatctagcattagttatatctcccaatgctatccctcccccctccccccaacccacaacaatccccagaatgtgatgttccccttcctgtgtccatgtgttctcattgttcaattcccacctatgagtgagaatatgcggtgtttggttttttgttcttgcgatagtttacggagaatgatgatttccaatttcatccatgtccctacaaaggacatgaacccatccttttttatggctgcatagtattccatggtgtatatgtgccacattttcttaatccagtctatcattgttggacatttgggttggttccaagtctttgctattgtgaataatgccgcaataaacatgtgtgcatatgtctttatagcagcatgatttatagtcctttagggtatatacccagtaatgggatggctgggtcaaatggtatttctagttctagatccctgaggaatcgccacactgacttccacaatggttgaactagtttacagtcccgccaacagtgtaaaagtgttcctatttctccacatcctctccagcacctgttgtttcctgacttcttaatgattgccattctaactggtgtgagatggtatctcattgtggttttgatttgcatttctctgatggccagtgatggtgagcattttttcatgtgttctttggctgcataaatgtcttcttttgagaagtgtctgttcatgtccttcacccactttttgatggggttgtttgttttttttcttgtaaatttgtttgagttcattgtagattctggatattagccctttgtcagatgagtaggttgcgaaaattttctcccattttgtaggttgcctgttcactctgatggtagtttcttttgctgtgcagaagctgtttagtttaattagatcccatctgtcaattttggcttttgttgccattgcttttggtgttttagacatgaagtccttgcccatgcctatgtcctgaatggtaatgcctaggttttcttctagggtttttatggttttaggttgaacgtttaagtctttaatccatgttgaattgatttttgtataaggtgtaaggaagggatccagtttcagctttctacatatggctagccagttttcccagcaccatttattaaatagggaatcctttccccactgcttgtttttctcaggtttgtcaaagatcagatagttgtagataggcggcgttatttctgagggctctgttctgttccatgaatctatatctctgttttggtaccagtaccatgctgttttggttactgtagccttgtagtatagtttgaagtcaggtagtgtgatgcctccagctttgttcttttggcttaggattgacttggcgatgcgggctcttttttggttccatgtgaactttaaagtagttttttccaattctgtgaagaaagtcactggtagcttgatggggatggcattgaatctgtaaattaccttgggcagtatggccattttcacgatattgattcttcctacccatgagcatggaatgttcttccatttgtttgtatcctcttttatttccttgagcagtggtttgtagttctccttgaagaggtccttcacatcccttgtaagtcagattcctaggtattttattctctttgaagcaattgtgaatgggagttcactcatgatttggctctctgtttgtctgttgttggtgtataagaatgcttgtgatttttgtacattgattttgtatcctgagactttgctgaagttgcttatcagcttaaggagattttgggctgagatgatggggttttctagatatacaatcatgtcatctgcaaacagggacaatttgacttcctcttttcctaattgaataccctttatttccttctcctgcctaattgccctggccagaacttccaacactatgttgaataggagtggtgagagagggcatccctgtcttgtgcccattttcaaagggaatgcttccagtttttgcccattcagtatgatattggctgtgggtttgtcatagatagctcttattattttgaaatacgtcccatcaatacctaatttattgagagtttttagcatgacgggttgttgaattttgtcaaaggccttttctgcatctattgagataatcatgtggtttttgtctttggttctgtttatatgctggattacatgtattgatttgcatatattgaaccagccttgcgtcccagggatgaagcccacttgatcatggtggataagctttttgatgtgctgctggatttggtttgccagtattttattgaggatttttgcatcaatgttcatcaaggatattggtctaaaattctcttttttggttgtgtctctgcccggctttggtatcaggatgatgctggcctcataaaatgagttagggaggattccctctttttctattgattggaatagtttcagaaggaatcgtaccagttcctccttgtacctctggtagaattcggctgtgaatctatctggtcctggactctttttggttggtaagctattgattattgccacaatttcagatcctgttattggtctattcagagattcaacttcttccttgtttagtctttggagggtgtatgtgtcaaggaatttatccatttcttctagattttctagtttgtttgcgtagaggtgtttgtagtattctctgatggtagtttgtatttctgtgggatcggtggtgatatcccctttatcattttttattgcgtctatttgattcttctctctttttttctttattagtcttgctagcggtctatcaattttgttgatcctttcaaaaaaccagctcctggattcattaatttttttgaagggttttttgtgtctctatttccttcagttctgctctgattttagttatttcttgccttctgctagcttttgaatgtgtttgctcttgcttttctagttcttttaattgtgatgttaggttgtcaattttggatctttcctgctttctcttgtgggcatttagtgctataaatttccctctatacactgctttgaatgcgtcccagagattttggtatgttgtgtctttgttctcgttggtttcaaagaacatctttatttctgccttcattttgttatgtacccagtagtcattcaggagcaggttgttcggtttccatgtagttgagtggttttgagtgagattcttaatcctgagttctagtttgattgtactgtggtctgagagatagtttgttataatttctgttcttttacatttgctgaggagagctttacttccaactatgtggtcaattttggaataggtgtggtgtggtgctgaaaagaatgtatattctgttgatttggggtggagagttctgtagatgtctattaggtctgcttggtgcagagctgagttcaattcctgggtatccttgttgactttctgtctcattgatctgtctaatgttgacagtggggtgttaaagtctcccattattattgtgtgggagtctaagtctctttgtaggtcactcaggacttgctttatgaatctgggtgctcctgtattgggtgcatatatatttaggatagttagctcttcttgttgaattgatccctttaccattatgtaatggccttctttgtctcttttgatctttgttggttgaaagtctgttttatcagagactaggattgcaacccctgccttgttttgttttccatttgcttagtagattttcctccatccctttattttgagcctatgtgtgtctctgcacgtgagatgggtttcccgaatacagcacactgatgggtcttgactctttatccaatttgccagtctgtgtcttttaattggagcatttagtccatttacatttaaagttaatatcgttatgtgtgaatttgatcctgtcattatgatgttagctggttattttgctcgttagttgatgcagtttcttcctagcttggatggtctttatattttggcatgattctgcagcggctggtaccggttgttcctttccacgtttagtgcttccttcaggagctcttttagggcaggcctggtggtgacaaaatctctcagcatttgcttgtctgtaaagtattttatttctccttcacttatgaagcttagtttggctggatatgaaattctgggtcgaaaattcttttctttaagaatgttgaatattggcccccactctcttctggcttgtagagtttctgccaagagatccgctgttagtctgatgggcttccctttgagggtaacccgacctttctctctggctgcccttaacattttttccttcatttcaactttggtgaatctgacaattatgtgtcttggaattgctcttctcgaggagaatctttgtggcattctctgtatttcctgaatctgaatgttggcctgccttgctagattggggaagttctcctggataatatcctgcagagtgttttccaacttggttccattctccccgtcactttcaggtacaccaatcagacatagatttggtcttttcacatagtcccatatttcttggaggctttgtttgtttctttttattcttttttctctaaacttcccttcttgcttcatttcattcatttcatatttcatcgctgataccctttcttccagttgatcgcatcggctcctgaggcttctgcattcttcacgtagttcttgagccttggttttcagctccatcagctcctttaagcacttctctgtattggttattctagttatacattcttctaaatttttttcaaagttttcaacttctttgcctttggtttgaatgtcctcccatagctcggagtagtttgatcgtctgaagccttcttctctcagctcgtcaaagtcattctccctccagctttgttccgttgctggtgaggagctgcgttcctttggaggaggagaggcgctgcgttcctttggaggaggagaggcgctctgctttttagagtttccagtttttctgctctgttttttccccatctttgtggtttttatctacttttggtctttgatgatggtgatgtacagatgggtttttggtgtggatgtcctttctgtttgttagttttccttctaacagacaggaccttcagctgcaggtctgttggagtacccggccgtgtgaggtgtcagtctgcctctgctagggagtgcctcccagttaggctgctcgggggtcagggtcagggacccacttgaggaggcagtctgccagttctcagatctccagctgcgtgctgggggaaccactgctcttttcaaagctgtcagacagggacacttaagtctgcagaggttactgctgtctttttgtgtgtctgtgccctgcccccagaggtggagcctacagaggcaggcaggcttccttgagctgtggtgggctccacccagttggagcttcctggctgctttgttaacctaagcaaagcctgggcaatggcgggcgcccctcccccagcctcgctgccgccttgtagtttgatctcagactgctgtgctagcaatcagcgagactccgtgggcgtgggaccctccgagccaggtgcgggatataatctcgtggtgcgcctttttttaagcccgtcggaaaagcgcagtattcgggtgggagtgacccgatcttccatgtgccgtctgtcacccctttctttgactaggaaagggaactccctgaccccctgcgcttcccaagtgaggcaatgccttgccctgcttcggctcgcggatggtgcacgcacccactgacctgcgcccactgtctggcactccctagtgagatgaacccggtacctcagatggaaatggagaaatcgcctgtcttctgcgtctctcacgctgggagctgtagaccggagctgttcctatttggccatcttggctcctctctcctctcttcactttaataatggattagttttctgccttctcctgtggggaatctttttggtaagggagggaagaaagattagttattcttgtgcatcagtatctttttctttttttattgtagtaagaacatctaacatgagatctaccctcttaacaattttttaagtgtacaatacagtattgctaactataggcatgaggatgtgcagcagatctctggaacgtttcactctttataactgaagctttataccccttgaatagcagcttcccatttccctgtcttcatagcccctggcatccaccattctacactctttctgtggggttgactattttaattacctgacgcaactggaatcatacattatttgtctttctgtgactggtttatttcacgtagcataaagtcaccaaggttcatc

SEQ ID NO: 10593 - DNA, 6153 bp, Homo sapiens
tttttttttcttttttttttttttttattatactctaagttttagggtacatgtgcacattgtgcaggttagttacatatgtatacatgtgccatgctggtgcgctgcatccactaatgtgtctcccaatgctatccctcccccctcccccgaccccaccacagtccccagagtgtgatattccccttcctgtgtccatgtgatctcattgttcaattcccacctatgagtgagaatatgcggtgtttggttttttgttcttgcgatagtttactgagaatgatggtttccattttcatccatgtccctacaaaggatatgaactcatcattttttatggctgcatagtattccatggtgtatatgtgccacattttcttaatccagtctatcattgttggacatttgggttggttccaagtctttgctattgtgaatagtgccgcaataaacatacgtgtgcatgtgtctttatagcagcatgatttatactcatctgggtatatacccagtaatgggatggctgggtcaaatggtatttctagttctagatccctgaggaatcgccacactgacttccacaatggatgaactagtttacagtcccaccaacagtgtaaaagtgttcctatttctccgcatcctctccagcacctgttgtttcctgactttttaatgattgccattctaactggtgtgagatgatatctcatagtggttttgatttgcatttctctgatggccagtgatgatgagcatttcttcatgtgttttttggctgcataaatgtcttcttttgagaagtgtctgttcatgtccttcgcccactttttgatggggttgtttgtttttttcttgtaaatttgtttgagttcattgtagattctggatattagccctttgtcagatgagtaggttgcgaaaattttctcccatgttgtaggttgcctgttcactctgatggtagtttcttttgctgtgcagaagctctttagtttaattagatcccatttgtcaattttgtcttttgttgccattgcttttggtgttttggacatgaagtccttgcccacgcctatgtcctgaatggtaatgcctaggttttcttctagggtttttatggttttaggtttaacgtttaaatctttaatccatcttgaattgatttttgtataaggtgtaaggaagggatccagtttgagctttctacatatggctagccagttttcccagcaccatttattaaatagggaatcctttccccattgcttgtttttctcaggtttgtcgaagatcagatagttgtagatatgcggcattatttctgagggctctgttctgttccattgatctatatctctgttttggtaccagtaccatgctgttttggttactgtagccttgtagtatagtttgaagtcaggtagtgtgatgcctccagctttgttcttttggcttaggattgacttggcaatgcgggctcttttttggttccatatgaactttaaagtagttttttccaattctgtgaagaaagtcattggtagcttgatggggatggcattgaatctgtaaattaccttgggcagtatggccattttcacgatattgattcttcctacccatgagcatggaatgttcttccatttgtttgtgtcctcttttatttccttgagcagtggtttgtagttctccttgaagaggtccttcacatcccttgtaagttggattcctaggtattttattctctttgaagcaattgtgaatgggagttcacccatgatttggctctctgtttgtctgttgttggtgtataagaatgcttgtgatttttgtacattgattttgtatcctgagactttgctgaagttgcttatcagcttaaggagattttgggctgagacgatggggttttctagataaacaatcatgtcgtctgcaaacagggacaatttgacttcctcttttcctaattgaataccctttatttccttctcctgcctgattgccctggccagaacttccaacactatgttgaataggagtggtaagagagggcatccctgtcttgtgccagttttcaaagggaatgcttccagtttttgcccattcagtatgatattggctgtgggtttgtcatagatagctcttattattttgaaatacgtcccatcaatacctaatttattgagagtttttagcatgaagggttgttgaattttgtcaaaggctttttctgcatctattgagataatcatgtggtttttgtctttggctctgtttatatgctggattacatttattgatttgcgtatattgaaccagccttgcatcccagggatgaagcccacttgatcatggtggataagctttttgatgtgctgctggattcggtttgccagtattttattgaggatttttgcatcaatgttcatcaaggatattggtctaaaattctcttttttggttgtgtctctgcccggctttggtatcagaatgatgctggcctcataaaatgagttagggaggattccctctttttctattgattggaatagtttcagaaggaatggtaccagttcctccttgtacctctggtagaattcggctgtgaatccatctggtcctggactctttttggttggtaaactattgattattgccacaatttcagagcctgttattggtctattcagagattcaacttcttcctggtttagtcttgggagagtgtatgtgtcgaggaatgtatccatttcttctagattttctagtttatttgcgtagaggtgtttgtagtattctctgatggtagtttgtatttctgtgggatcggtggtgatatcccctttatcattttttattgtgtctatttgattcttctctctttttttctttattagtcttgctagcggtctatcaattttgttgatcctttcaaaaaaccagctcctggattcattgattttttgaagggttttttgtgtctctatttccttcagttctgctctgagtttagttgtttcttgccttctgctagcttttgaatgtgtttgctcttgcttttctagttcttttaattgtgatgttagggtgtcaattttggatctttcctgctttctcttgtgggcatttagtgctataaatttccctctacacactgctttgaatgtgtcccagagattctggtatgttgtgtctttgttttcgttggtttcaaagaacatctttatttctgccttcatttcgttatgtacccagtagtcattcaggagcaggttgttcagtttccatgtagttgagcggctttgagtgagattcttaatcctgagttctagtttgattgcactgtggtctgagagatagtttgttataatttctgttcttttacatttgctgaggagagctttacttccaactatgtggtcaattttggaataggtgtggtgtggtgctgaaaaaaatgtatattctgttgatttggggtggagagttctgtagatgtctgttaggtctgcttggtgcagagctgagttcaattcctgggtatccttgttgactttctgtctcgttgatctgtctaatgttgacagtggggtgttaaagtctcccattattaatgtgtgggagtctaagtctctttgtaggtcactcaggacttgctttatgaatctgggtgctcctgtattgggtgcataaatatttaggatagttagctcctcttgttgaattgatccctttaccattatgtaatggccttctttgtctcttttgatctttgttggtttaaagtctgttttatcagagactaggattgcaacccctgcctttttttgttttccattggcttggtagatcttcctccatccttttattttgagcctatgtgtgtctctgcacgtgagatgggtttcctgaatacagcacactgatgggtcttgactctttatccaatttgccagtctgtgtcttttaattggagcatttagtccatttacatttaaagttaatattgttatgtgtgaatttgatcctgtcattatgatgttagctggttattttgctcgttagttgatgcaatttcttcctagcctcgacggtctttacaatttggcatgattttgctgtggctggtaccggttgctcccttccatgtttagtgcctccttcaggagctcttttagggcaggcctggtggtgacaaaatctctcagcatttgcttctctgtaaaggattttatttctccttcacttatgaagcttagtttggttggatatgaaattctgggttgaaaactcttttctataagaatgttgaatattggcccccactctcttctggcttgtagagtttctgctgagagatccactgttagtctgatgggcttccctttgtgggtaacctgacctttctctctggctgcccttaacattttttccttcatttcaactttggtgaatctgacaattatgtgtcttggagttgctcttctcgaggagtatctttgtggcgttctctgtatttcctgaatctgaatgttggcctgccttgctagattggggaagttctcctggataatatcctgcagagtgttttccaacttgtttccattctccccatcactttcaggtacaccaatcagacgtagatttggtcttttcacataatcccatatttcttgtaggctttgttcatttctttttattcttttttctctaaacttcccttctcgcttcatttcattcatttcagcttccatcactgataccctttcttccagttgatcgcgtcggctcctgaggcttctgcattcttcacgtagttctcgagccttggctttcagctccatcagctcctttaagcacttctctgtattggttattctcgttatacattggtctaaatttttttcaaagtttttaacttctttgcctttggtttgaatttcctcctgtagctcagagtagtttgatcatctgaagccttcttctctcaacttgtcaaagtcattctccatccagctgtgttccgttgctggtgaggagttgcattcctttggaggaggagaggcactctgctttttagagtttccagtttttctgctctgttttttccccatctttgtggtttttatctacttttggtctttgatgatggtgatgtacagatgggtttttggtgtggatgtcctttctgtttgttagttttccttctaacacacaggaccctcagctgcagctctgttggagtttgctagaggtccactccagaccctggttgcctgggtaacagcagcggtggctgcagaacagcggattttcatgaaccgcgaatgctgctgtctgatcgttcctctggaagttttgtctcagaggagtacccagccgtgtgaggtgtcagtctgcccctactggggggtccctcccagttacactgctcgggggtcaggggtcagggacccacttgaggaggcagtctgcccattctcagatctccagctgtgtgctgggagaaccactgctttcttcaaagctgtcagacagggacatttaagtctgaggaggttactgctgtctttttgtttgtctgtgccctgcccccagaggtggagcctacagaggcaggcaggcctccttgagctgtggtgggctccacccagttggagcttcccggctgctttgtttacctaagcaagcctgggcaatggcggccgccccttccccagcctcgctgccaccttgcagtttgatctcagactgctgtgccagcaatcagtgagactctgtgggcgtaggaccctccgagccatgtgcgggatataatctcctggtgtgccgttttttaagcccgttggaaaagcacagtattcgggtgggagtgacccgattttccaggtgccgtctgtcacccctttctttgactaggaaagggaactccctgaccccttgtgcttcccaagtgaggcaatgcctcaccctgcttcggcttgtgcacggtgtgctgcacccactgtcccgcgcccactgtctggcactcccttgtgagatgaacacggtacctcagatggaaatgcagaaatcacccgtcttctgcgtcgctcatgctgggagctatggaccggagctgttcctattcggccatcttgactgccc

SEQ ID NO: 10594 - DNA, 5868 bp, Homo sapiens
actgtttttttttattatactttaagttttagggtacatgtgcacattgtgccagttagttacatatgtatacatgtgccacgttggtgtgctgcacccattaactcatcatttagcattaggcatatctcctaatgctatccctcccccctccccccaccccacaacagtccccagagtgtgattttccccttcctgtgtccatgtgttctcattgttcaattcccatctatgagtgagaacatgcggtgcttggttttttgtccttgtgatagtttactgagaatgatgatttccagtttcatccatgcccctacaaaggacatgaacacatcattttttatggctgcatagtattccatggtgtatatgtgccacattttcttaatctagtctatcattgttggacatttgggttggttccaagtctttgctattgtgaatagtgccgcaataaacatatgtatgcatgtgtctttatagcagcatgatttatagtcctttgggtatatacccagtaatgggatggctgggtcaaatggtatttctagttctagatccctgaggaatcgccacactgtcttccacaggggttgaactagtttacagtcccaccgtgtaaaagtgttcctatttctccacatcctctccagcacttgttgtttcctgactttttaatgattgccattctaactggtgtgagatggtatctcattgtggttttgatttgcatttctctgatggctagtgatgatgagcattttttcatgtgtcttttggctgcataaatgtcttcttttgagaagtgtctgttcatatcctttgcccactttttgatggggttgtttgtttttttcttgtaaatttgtttgagttcattgtagattctggatattagccctttgtcagatgagtaggttgcgaaaattttctcccattttgtaggctgcctgttcactctgatggtagtttcttttgctgtgctgaagctctttagtttaattagataccacttgtcaattttagcttttgttgccattgcttttggtgttttagacatgaagtccttgcccatgcctatgtcctgaagtaatgcctaggttttcttctagggtttttatggttttaggtctaacgtttaagtctttaatccaccttgaattaatttttgtataaggtgtaaggaaaggatccagtttcagctttctacatatggctagccagttttcccagcaccatttattaaatagggaatcctttccccattgcttgtttttctcaggtttgtcaaagatcagatagttgtagatatgtggcgttatttctgagtgctctgttctgttccattggtctatatctctgttttggttcccatgctgttttggttactgtagccttgcagtatagtttgaagtcaggtagtgtgatgcctccagctttgttcttttggcttaggattgacttactgatgcgggctcttttttggttccatatgaactttaaagtagttttttccaattctctgaagaaagtcattggtagcttgatggggatggcattgaatctataaattaccttgggcagtatggccattttcacgatattgattcttcctacccatgagcatagaatgttcttccatttgtttgtatcctcttttatttcattgagcagtggtttgtagttctccttgaagaggtccttcttgtcccttgtaagttggattcataagtattttattctctttgaagcaactgtgaatgggagttgactcacgatttggctctctgtttgtctgttattggtgtataagaatgcttgtgatttttgtacattgattttgtatcctgagactttgcagaagttgcctatcagcttaaggagattttgggctgagacaatggggttttctagatatacaatcatgtcatctgcaaacagggacaatttgacttcctcttttcctaaccgaataccctttatttccttctcctgcctaattgccctggccagaacttccaacactatgttgaataggagtggtgagagagggcatccctgtcttgtgccagttttcaaagggaatgcttccagtttttgcccattcagtatgatattggctgtgggtttgtcatagatagctcttattattttgagatacgtcccatcaatacctaatttattgagagtttttagcatgaagcgttgttgaattttgtcaaaggccttttctgcatctattgagataatcatgtggtttttgtctttggttctgtttatatgctggattacatttatttattggtgtatattgaaccagccttgcatcccagggatgaagcccacttgatcatggtggataagctttttgatgtgctgctggattcactttgccagtattttattgaggatttttgcatcaatgttcatcaaggatatcggtctaaaattctcttttttggttgtgtctctgcccggctttggtatcaggatgatgctggcctcataaaatgagttagggaggattctctctttttctattgattggaatagtttcagaaggaatggtaccagttcctccttgtacctctggtagaattcggctgtgaatccatctggtcctggactctttttggttggtgagctagtgattattgccacaatttcagagcctgttattggtctattcagagattcaacttcttcctggtttagtcttgggagggtgtatgtgtccaggaatttatccatttcttctaccttttctagtttatttgcgtagaggtgtttgtagtatcctctgatggtagtttgtatttctgtgggattggtggtgatatcccctttatcattttttattgcatctatttgattcttctctctttttttctttattagtcttgctagcagtctatcaattttgttgatcctttcaaaaaaccagctcctggattcattaattttttgaagggttttttgtgtctctatttccttcagttctgctctgattttagttatttcttgccttctgctagcttttgaatgtgtttgctcttccttttctagttcttttcattgtgatgttagggtgtcaattttggatctttcctgctttctcttgtgggcatttagtgctataaatttccctctacacactgctttgaatgtgtcccagagattctggtatgttgtgtctttgttctcattggtttcaaagaacatctttatttctgccttcatttcgttgtgtacccagtagtcattcaggagcaggttgttcagtttccatgtagttgagtggttttgagtgagtttcttaatcctgagttctagtttgattgcactgtggtctgagagacagtttgttataatttctgatcttttacatttgctgaggagagctttacttccaactatgtggtcaattttggaataggtgtggtgtagtgctgaaaaaaatgtatattctgttgatttggggtggagagttctgtagatgtctattaggtccgcttggtgcagagctgagttcaattcctgggtatccttgttaactttctgtctcgttcatctgtctaatgttgacagtggggtgttaaagtctcccattattattgtgtgggagtctaagtctctttgtaggtcactcaggacttgctttatgaatctgggtgctcctgtattgggtgcatatatatttaggatatttagctcttcttgttgaattgatcccttcaccattatgtaatggccttctttgtctcttttgatctttgttggtttagagtctgttttatcagagactaggattgcaacccctgccttttttgttttccatttgcttgatagatcttcctccatccttttattttgagcctatgtgtgtctctgcacgtgagatgggtttcctgaatacagcacactgatgggtcttgactctttatccaatttgccagtctgtgtcttttaattggagcatttagtccatttacatttaaagctaatattgttatgtgtgaactttgatcctgtcattatgatgttagctggttatttattttgctcattagttgatgcagtttcttcctaatcttgatagtctttacattttggcatgattttgcagtggctggtaccagttgtgcctttccatgtttagtgcttccttcaggagctcttttagggcaggcttggtggtgacaaaatctctcagcatttgcttgtctgtaaaggattttatttctccacttatgaagcttagtttggctggatatgaaattctgggttgaaaattcttttctttaagaatgttgaatattggcccccactctcttctggcttgtagagtttctgccaagagatccgctgtcagtctgatgggcttccctttgtgggtaacctggcctttctctctggctgcccttaacattttttccttcatttcaactttggtgaatctgacaatcatgtgtcttggagttgttcttctcaaggagtatctttgtggtgttctctgtatttcctgaatctgaatgttggcctgccttgctagattggggaagttgtcctggataataacctgcagagtgttttccaacttgtttccattctccccgtcactttcaggtacaccaatcagatgcagatttggtcttttcagatagtcccatatttcttggaggctttgttcgtttctttttattcttttttctctaaacttcccttctcgcttcatttcattcatttcatcttccatcactgatatcctttcttccagttgattgcatcggctccagaggcttctgccttcttcacgtagttctcgagccttggctttcagcttcatcagctcctttaagcacttctctgtatcggttattctagttatacattcgtctaaatttttttcaatgttttcaacttctttgcctttggtttgaatttcctcctgtagctcagagtagtttgatcgtctgaagccttcttctctcaactcgtcaaagtcattctccgtccagctttgttccgctgctggtgaggaactgcgttcctttggaggaggagaggcactctgctttttagagtttccagtttttctgctctgttttttccccatctttgtggttttatctactttttgtctttgatgatggtgatgtacagatggggttttggtgtggatgccctttctgttcgttagttttccttctaacagacaggaccctcacctgcaggtctgttggagtttgctagaggtccactccagaccctgtttgcctgggtatcagcagcggtgtctgcagaactgtggattttcgtgatccgcgaatgctgctgtctgatagttcctctggaagttttgtctcagaggagtacctggccgcgtgaggtgttagtctgcccctactggggggtgcctcccagttaggctgcttgggggtcggggtcagagacccacttaaggaggcagtcttcccattctcagatctccagctgcatgctgggagaaccactgctctcctcaaagctgtcagacagggacatttaagtctgcagaggttactgctgtctttttgtttgtctgtgccctgcccccagaggtggagtctacagaggcaggcaggcctccttgagctgtggtgggctccacccagtttgagcttcctggctgcttcgtttacctaagcgagtctgggcaatggcgggtgcccctcccccagccttgctgctgccttgcagtttgatcttagactgctgtgctagcaatgagcgagactccgtgggcgtaggaccctccaagccaggtgcgggatataatctcctggtgtgccatttcctaagcccgtcggaaaagcgcagtattcgggt

SEQ ID NO: 10595 - DNA, 6041 bp, Homo sapiens
tcaattttttttaatttttttattattatactttaagttttagggtacatgtgcacattgtgcaggttagttacatatgtatacatgtgccatgctggtgtgctgcacccactaactcatcatctagcattaggtatatctcccaatgctatccctcccccctccccccacccacaacagtccccagagtgtgatgttccccttcctgtgtccatgtgatctcattgttcaattcccacctatgagtgagaatatgcggtgtttggttttttgttcttgtgatagtttactgagaatgatgatttccaatttcatccatgtccctacaaaggacatgaactcatcattttttatggctgcatagtattccatggtgtatatgtgccacattttcttaatccagtctatcattgttggacatttgggttggttccaagtctttgctattgtgaataatgccgcaataaacatacgtgtgcatgtgtctttatagcagcatgatttatagtcctttgggtatatacccagtaatgggatggctgggtcaaatggtatttctagttctagatcctgaggaatcgccacactgacttccacaatggttgaactagtttacagtcccaacaacagtgtaaaagtgttcctatttctccacatcctctccagcacctgttgtttcctgactttttaatgattgccattctaactggtgtgagatggtatctcattgtggttttgatttgcatttctctgatggccagtgatggtgagcattttttcatgtgttttttgcctgtataaatgtcttcttttgagacgtgtctgttcatgtccttcgcccactttttgatggggttgtttgtttttttcttgtaaatttgtttgagttcattgtagattctggatattagccctttgtcagatgagtaggttgtgaaaattttctcccattttgtaggttgcctgttcactctgatggtagtttcttttgctgtgcagaagctctttagtttaattagatcccatttgtcaattttggcttttgttgccattgcttttggtgttttagacatgaagtccttgcccatgcctatgtcctgaatggtaatgcctaggttttcttctagggtttttatggttttaggtctaatgtttaagtctttaatccatcttgaattgatttttgtataaggtgtaaggaagggatccagtttcagctttctacatatggctagccagttttcccagcaccatttattaaatagagaatcctttccccattgcttgtttttctcaggtttgtcaaagatcagatagttgtagatatgtggcgttatttctgagggctctgttctgttccattgatctatatctctgttttggtaccagtaccatgctgttttggttactgtagccttgtagtatagtttgaagtcaggtagtgtgatgcctccagctttgttcttttggcttaggattgacttggcaatgcaggctcttttttggttccatatgaactttaaagtagttttttccaattctgtgaagaaaggcattggtagcttgatgggggtggcattgaatctgtaaattaccttgggcagtatggccattttcacgatattgattcttcctacccatgagcatggaatgttcttccatttgtttgtatcctcttttatttcgttgagcagtggtttgtagttctccttgaagaggtccttcacatcccttgtaagctggattcctaggtattttattctctttgaagcaattgtgaatgggagttcactcatgatttggctctctgtttttctgttgttggtgtgtaggaatgcttgtgatttttgcacattgattttgtatcctgagactttgctgaagttgcttatgagcttaaggagattttgggctgagacaatggggttttctagatatacaatcatgtcatctgcaaacagggacaatttgacttcctcttttcctaattgaataccctttatttccttctcctgcctgattgccctggccagaacttccaacactatgttgaataggagtggtgagagagggcatccctgtcttgtgccagttttcaaagggaatgcttccagtttttgcccattcagtatgatattggctgtgggtttgtcatagatagctcttattattttgaaatatgtcccatcaatacctaatttattgagagtttttagcatgaaggttgttgaattttgtcaaaggccttttctccatctattgagataatcatgtggtttttgtctgtggctctgtttatatgctggattacatttattgatttgcatatattgaaccagccttgcatcccagggatgaagcccagttgatcatggtggataagctttttgatgtcctgctggatttggtttgccagtattttattgaggatttttgcatcaatgttcatcaaggatattggtctaaaattctcttctttggttgtgtctctgcctggctttggtatcagaatgatgctggcctcataaaatgagttagggaggattccctctttttctattgattggaatagtttcagaagtaatggtaccagttcctccttgtacctgtggtagaattcggctgtgaatccatctggtcctggactctttttggttggtaagctattgattattgccacaatttcagatcctgttattggtctattcagagattcaacttcttcctggtttagtcttgggagagtgtatgtgtcaaggaatttatccatttcttctagattttctagtttatttgcgtagaggtgtttgtagtattctctgacggtagtttgtatttctgtgggattggtggtgatatccccttttatcattttttattgcgtctatttgattcttctctcttttcttctttattagtcttgctagtggtctatcaattttgttgatcctttcaaaaaaccagctcctggattcattaattttttgaagggttttttgtgtctctatttccttcagttctgctctgattttagttatttcttgccttctgctagcttttgaatgtgtttgctcttgcttttctagttcttttaattgtgaggttagggtgtcaattttggatctttcctgttttctcttgtgggcatttagtgctataaatttccctctacacactgctttgaatgtgtcccagagatgctggtatgttgtgtctttgttctcgttggtttcaaagaacatctttatttctgccttcatttcgttatgtacccagtagtcattcaggagccggttgttcagtttccatgtagttgagcggttttgagtgagattcttaatcctgagttctagtttgattgcactgtggtctgagagatagtttgttataatttctgttcttttacatttgctgaggagtgctttacttccaactatgtggtcaattttggaataggtgtggtgtggtgctgaaaagaatgtatattctgttgatttggggtggagagttctgtagatgtctattaggtccgcttggtgcagagctgagttcaattcctgggtatccttgttgactttctgtctcgttgatctgtctaatgttgacagtggggtgttaaagtctcccattattaatgtgtgggagtctaagtctctttgtaggtcactcaggacttgctttatgaatctgggtgctcctgtattgggtgcatatatatttaggatagttagctcttcttgttgaattgatccctttaccattatgtaatggccttctttgtctcttttgatctttgttggtttaaagtctgttttatcagagactaggattgcaacccctgcctttttttgttttccgtttgcttggtaggtcttcctccatccttttattttgagcctatgtgtgtctctgcatgtgagatgggtttcctgaatacagcacactgatgggtcttgactctttatccaatttgccagtctgtgtcttttaattggagcatttagtccatttacatttaaagttaatagtgttatgtgtgaatttgatcctgtcattatgatgttagctggtgattttgctcgttacttgatgcagtttcttcctagacttgatgatcgttacattttggcatgattttgcagcggctggtaccagttgttcctttccatgtttagcgcttccttcaggagctcttttagggcaggcctggtggtgacaaaatctctcagcatttgcttgtctgtaaagtattttatttctccttcacttatgaagcttagtttggctggatatgaaattctgggttgaaaattcttttctttaagaatgttaaatattggcccccactctcttctggcttgtagggtttctgccaagagatccgctgttagtctgatgggcttccctttgagggtaacccgacctttctctctggctgcccttaaaattttttccttcatttcaactttggtgaatctgacaattatgtgtcttggagttgctcttctcgaggaatatctttgtggcgttctctgtatttcctgaatctgaatgttggcctgccttgctagattggggaaattctcctggataatatcctgcagagtgttttccaacttggttccattctccccatcactttcaggtacaccaatcagacgtagatttggtcttttcacatagtcccatatttcttggaggctttgctcgtttctttttattcttttttctctaaattttccttcttgcttcatttcattcatttcatcttccattgctgatactctttcttccagttgatcacatcggctcctgaggcttctgcattcttcgcgtagttctcgagccttggttttcagctccatcagctcctttaagcacttctctgtattggttattctagttatacattcttctaaatttttttcaaagttttcaacttctttgcctttggtttgaatgtcctcccgtagctcagagtaatttgatcgtctgaagccttcttctctcagctcgtcaaagtcattctccttccagctttgttccgttgctggtgaggagctgcgttcctttggaggaggagaggtgctctgatttttagagtttccagtttttctgttctgttttttccccatctttgtggttttatctacttttggtctttgatgatggtgatgtacagatgggtttttggtgtggatgtcctttctgtttgttagttttccttcgaacagacaggaccctcagctgcaggtctgttggagtaccctgcagtgtgaggtgtcagtgtgcccctgctggggggtgcctcccagttaggctgctcgggggtcaggggtcagggacccacttgaggaggcagtctgcccgttctcagatctccagctgcgtgctgggagaaccactactctcttcaaagctgtcagacagggacatttaagtctgcagaggttactgctgtctttttgtttgtctgtgccctgcccccagaggtggagcctacagaggcaggcaggcctccttgagctgtggtgggctccacccagttcgagcttcccagctgctttgtttacctaagcaagctgggcaatggtgggcgcccctcccccagcctcgctgccgccttgcagtttgatctcagactgctgtgctagcaatcagcgagattccatggggtaggaccctccgagccaggtgcaggatataatctcgtggtgcgccgttttttaagcccatcggaaaagcgcagtattcgggtgggaatgacccgattctccaggtgccgtccgtcacccctttctttgattaggaaagggaactccctgaccccttgtgcttcccgagtgaggcaatgcctcgccctgcttcggctcgcgcacggtgcgtgcacccactgacctgcacccactgtctggcactccctagtgagatgaacccagtacctcagatgaaaatgcagaaatcacccgtcttctgcgtcgctcaggctgggagctgtagaccggagctgttcctattcggccatcttggctcctcccaac

SEQ ID NO: 10596 - DNA, 10575 bp, Homo sapiens
tttatttatttatttattattttttatgttatatatatattttttcttttattattatactttaagttttagggtacatgtgcacattgtgcaggttatttacatatgtatacatgtgccacgctggtgcactgcacccactaactggtcatctagcattaggtatatctcccaatgctatccctcccccctccccccaccccacaacagtccccagagtgtgatgttccccttcctgtgtccatgtgatctcattgttcaattcccacctatgagtgagaatatgcggtgtttggttttttgttcttgcgatagtttactgagaatgatgatttccagtttcatccatgtccctacaaaggacatgaactcatcattttttatggctgcatagtattccatggtgtatatgtgccacattttcttaatccagtttatcattgttggacatttgcgttggttccaagtctttgctattgtgaatagtgccgcaataaacatacgtgtgcatgtgtctttatagcagcatgatttacagtcctttgggtatatacccagtaatgggatggctgggtcaaatggtatttctagttctagatccctgaggaatcgccacactgacttccacaatggttgaactagttgacagtcccaccaacagtgtaaaagtgttcctatttctccacatcctctccagcacctgttgtttcctgactttttaatgattgccattctaactggtgtgagatggtatctcattgtggttttgatttgcatttctctgatggccagtgatgatgagcattttttcatgtgttttttggctgcataaatgtcttcttttgagaagtgtctgtttgtgtcctttgcccactttttgatggggttgtttgtttttttcttgtaaattggtttgagttcattgtagattctggatattagccctttgtcagatgagtaggttgcaaaaattttctcccattttgtaggttgcctgttcactctgatggtagtttcttttgctgtacagaagctgtttagtttaattagatcccatttgtcaattttggcttttgttgccattgcttttggtgttttagacatgaagtccttgcccatgcctatgtcctgaatggtattgcctaggttttcttctagggtttttatggttttaggtctaacgtttaagtctttaatccatcttgaattgatttttgtataaggtgtaaggaaggaatccagtttcagctttctacatatggctagccagttttgccagcatcatttattaaatagggaatcctttccccattgcttgtttttctcaggtttgtcaaagatcagatagttgtagatatgcggcattatttctgagggctctgttatgttccattgatctatatctctgttttggtaccagtaccatgctgttttggttactgtagccttgtagtatagtttgaagtcaggtagtgtgatgcctccagctttgttcttttggcttatgattgccttggcaatgcgggctcttttttggttccatatgaactttaaagtagttttttccaattctgtgaagaaagtcattggtagcttgatggggatggcattgaatctgtaaattaccttgggcagtatggccattttcacgatattgattcttcctacccaagagcatggaatgttcttccatttgtttgtatcctcttttatttcattgagcagtggtttgtagttctccttgaagaggtccttcacatcccttgtaagttggattcctaggtattttattctctttgaagcaattgtgaatgggagttcactcatgatttggctctctgtttgtctgttgttggtgtataggaatgcttgtgatttttgtacattgattttgtatcctgagactttgctgaagttgcttatcagcttaaggagattttgggctgagacaatggggtttgctagatatacaatcgtgtcatctgcaaacagggacaatttgacttcctcttttcctaattgaataccctttatttccttcttctgcctaattgccctggcgagaacttccaacactatgttgaataggagtggtgagagagggcatccctgtcttgtgccagtcttcaaagggaatgcttccagtttttgcccattcagtatgatattggctgtgggtttgtcataaatagctcttattattttgagatacatcccatcaatacctaatttattgagagtttttagcatgaagggttgttgaattttgtcaaaggccttttctgcatctattgagataatcatgtggtttttgtctttggctctgtttatatgctggatcgcatttattgatttgtatatattgaaccagccttgcatcccaggaatgaagcccacttgatcatggtggataagctttttgatgtgctgctggattttttttgcaagtattttattgaggatttttgcaccaatgttcatcaaggatattggtctaaaattctcttttttggttgtgtctctgccaggctttggtatcagaatcatgctggcctcataaaatgagttagggaggattccctctttttctattgattggaatagtttcagaaggaatggtaccagttcctccttgcacctctggtagaattcggctgtgaatccatctggtcctggactctttttggttggtaagctattgattattgccacaatttcagatcctgttattggtctattcagagattcaacttcttcctggtttagtcttgggagagtgtatgtgttgaggaatttatccatttcttctagattttctagtttatttgcgtagaggtgtttgtattattctctgatggtagtttgtatttctgtgggatcggtggtgatatcccctttattatttttttattgcatctatttgattcttctctctttttttctttattattcttgctagtggtctatctattttgttgatcctttcaaaaaaccagctcctggattcattaattttttgaagggttttttgtgtctctctttccttcagttctgctctgattttagttatttcttgccttctgctagcttttgaatgtgtttgctcttgcttttctagttcttttaattgtgatgttagggtgtcaattttggatctttcctgctttctcttgtgggcatttagtgctgtaaatttccctctacacactgctttgaatgcgtcccagagattctggtatgttgtgtctttgttctccttggtttcaaagaacatctttatttctggcttcattttgttatgtacccagtagtcattcaggagcaggttgttcagtttccatgtagttgagtggttttgagtgagattgttaatcctgagttctagtttgattgcactgtggtctgagagatagtttgttataatttctgttcttttacatttgctgaggagagctttacttccaagtatgtggtcaattttggaataggtgtggtgtggtgctgaaaaaaaatgtatattctgttgatttggggtggagagttctgtagatgtctattaggtctgcttggtgcagagctgagttcaattcctgggtatccttgttgactttctgtcttgttgagctgtctaatgttgacagtggggtgttaaagtctcccattattaatgtgtgggagtctaagtctctttgtaggtcactcaggagttgctttatgaatctgggtgctcctgtattgggtgcatatatatttaggatagttagctcttcttgttgaattgatccctttaccattatgtaatggccttctttgtctcttttgatctttattggtttaaagtctgttttatcagagactaggattgcaacccctactttttttgttttccatttgcttgatagatcttcctccatccttttattttgagtctatgtgtgtctctgcacgtgagatgggtttcctgaatacagcacactgatgggtcttgactctttatccaatttgccagtctgtgtcttttaattggagcatttagtccatttacatttaaagttaatattgttatgtgtgaatttgatcctgtcatgatgatgttagctggttattttgctcgttagttgatgcagtttcttcctagtctcgatggtctttacattttggcatgattttgcagtggctggtaccggttgttcctttccatgtttagtgcttccttcaggagctgttttagggcaggcctggtggtgacaaaatctctcagcatttgcttgtctgtaaaatattttatttctccctcactgatgaagcttagtttggctggatatgaaattctgggttgaaaattcttttctttaagaatgttgaatattggcccccactctcttctggcttgtagggtttctgttgagagatcagctgttagtctgatgggctcccctttgagggtaacccgacctttctctctggctgcctttaacattttttccttcatttcaactttggtgaatctgacaattatgtgtcttggagttgctcttctcgaggagtatctttgtggtgttctctgtatttcctgaatctgaatgttggcctgccttgctagattggggaagttctcctggataatatcctgcagagtgttttccaacttggttccattctccctgtcactttcaggtacaccaatcagacgtagatttgttcttttcacatagtcccatatttcttggaggctttgctcatttctttttattcttttttctctaaacttcccttctcgcttcatttcattcatttcatcttgcatcgctgataccctttcttccagttgatcgcatcggctcctgagccttctgcattcttcacgtagttctcgagccttggttttcagctccatcagctcctttaagcacttctctgtattggttattctagttatacattcttctaaatttttttcaaagttttcaacttctttgcctttggtttgaatgtcctcccgtagctcagagtaatttgatcgtctgaagccttcttctctcagttcatcaaagtcattctccatccagctttgttccattgctggtgaggaactgcattcctttggaggaggagaggcgctctgctttttagagtttccagtttttctgttctgttttttccccgtctttgtggttttatctacttttggtctttgatgacggtgatgtacagatgggtttttggtgtggatgtcctttctgtttgttagttttccttctaacagacaggaccctcagctgcaggtctgttggagtaccctgccatgtgaggtgtcagtgtgccctgctggggggtgcctcccagttaggctgctcaggggtcaggagtcagggacccacttgaggaggcagtctgcccattctcagatctccagctgtgtactgggagaaccacggctctcttcaaagctgtcagagagggacatttaagtctgcagaggttactgctttttgtttgtctgtgctctgcccccagaggtggagcctacagaggcaggcaggcctccttgagctgtggtgggctccacccagttcgagcttcctggctgctttgtttacctaagcaagcctgggcaatggcgggcacccctcccccagcctcgctgccaccttgcagtttgatctcagacggttgtgctagcgatcagcgagactccatgggcgtacgaccctcccagccaggtgtgggatataatctcatggtgcgccgtttttttaagcccgtcagaaaagcacagtattcgggtgggagtgacccgattttctaggtgctgtctgtcacccctttctttgactaggaaagggaactccctgaccccttgcgcttcccgagtgaggcaatgcctcaccctgcttcggcttgtgcacggttcgtgcacccactgacctgcgcccactgtctggcactccctagtgagatgaacccagtacctcagatggaaaagcagaaatcacccgtcttctgcatcgctcacgctgggagctgtagaccagagctgttcctattccattttcaatctattgattgtgtcttcagatacataacagcttgtcactttgatgaagttctttttatgtatttttggtgttgttgttgtctgtgctttcactgtcatatccaagaaattattgccagattctatgttatgaaacatttttcctatgtttcttctaagggttttatagttttagctcttacaattagatgtttagtccattttaaattaagttttttatatggtgtaaaataaggctccaactgtattgttttccatgtaaatattcattcttaacaccgtttaaaaatatactgtcctttccccatagttttgactcccttgttaaaaatcatgactgtgttttttggttctttatttctattgcattggtctttatgtctgtctctatggtggtacagcattgttttgggtactgaagcattgcagtaagtttgaaaccaggaggtgttagtcctctaattttgttagtttttaagattgatttggctacttggggttttttgagatttcatctgaattttagaataggtttttgtatttttgcaaatattggaatctttatagtgattttattgaatctgtagatgactattgataacaatggaatcttgatgaggttttgtcttccagtccataaacacatgatgtcttttcatttatttgtgttatctttaatactttcctgcaatgtttatacttttgctgtacaggtttctcatttccttggttaaattggtttctaagtattttattcttttgatgctatcataaatgatactgttgtcttgatttcttcttcagatggtttgttattgtagaaatacgaccgatttttgtgtgttgattttgtatcctgcagttttgctgaatgttatttattgcatctgatagtttatctcacagaaactaaaagatttttaatatacaaggttatgtcatctgcgaacagaaaattttacttttttaaaaattggaatatgttttattgttttacttgccttattgttttaactaactagaaccttcagtactatattaaatagaagtagtaaaagcaggcatccttgattttgctcttagggtaaaagctttcagtctttcattataatgttagctgtgtatttttttaatataaccttatgttaaggtgttttattcctttttatagcttattaagtatattttatcatgaatgtgggttaaattttgacaaattctttttcttctttgattaagatgatcacatgagggttttttccttctttatgttaatgtgatatgctgattttcatgtgttggaacatacttttatttcaggagtcaattatactcattcatagtgtataatccttttaatgtactgctaaatttgaattgctggtattttgttgaggatttttgcatcagcatttgtaagggatgtttgtttgtagttttcttatggtgcctttgtctgacttggtgtcggggtaatactgtctgcatagaatatgttagaaaatgttacctcctcttcaacgttttgaaaaagtttgagaaaaactggtgttaattctgctttaaacgttgggtagatttcaacagtgaagccatcttgtccaggcttttctttgttgctgggtttttgattactgatgtcatcttcttggtgaatctccttgctgaataggtttattcaacttttctgattcagtcttagtaggttttttgtttctaggaatttgttcattttatttaggttattcaattttttagtgtatagttccttatggtactctcatacatcctttttttactccaaaaatttgttagtaatgtacccattttatttttgagtttagtaatttgagtattccctttttttccttagtcaatctagataaaattttgtcagttttgatctttttcagagaacaaacttggttttgttgatttttcatattgtttttctcttctctatttcacttatttccactgctgtctttatcatttttaaaattttgctagcttttagttgtccctcttttagtagtccctctttttccctctgtttctagttccttaggagtaaagttgtttattcggtatcttattttttatcatttatagctataaatttttcccttatggtattgtttttgatgtatctctttcagtatttcatatttttaatttgtctctagatattttctattttctcttgtgatttcttttatccttccttgagtgtttatacctatattttcagacataaaatgtgaaacctacaaaattttcttgatttgttacagttttatttgttgtaagtttttattttagaattaaatgtgtgtatcaacatttgttatgttctcataagctttgtaatacagggagattcctggtccacatatataagcctctacatgaatatttttttgaagcatttaaccttctgttttaatatttcaaaggcctaaatgaaattgagattttggtttctgagatgaaatcatggtaggtgattgataaatgcttaaaaattagccaaaacttaaaattaagttaaagtttaccttcaagattcaacctgaatgagttgccctgtattgctggtagtaaaaaataagtctttaatggtataaaagcaaatttcagagaatgtttttttccccattgacatctaaattaaaagctgtaaaaaattttgattgccttatgcattttttactttagaattccaactttttctggttaaaattattccaaatagattcctgtgtatttgaaagacaattttttagttgaaatgcttaagcagttaaataaggccatgaaagtttcttgaacttgtgggaatccatgagaaaatctgacattatgttctattctcttggaaggtagaaatatcatttgacttctgttttgctgacaagaaatgtggtcctgaggtcctgagcaaggctacctgggataatgacctcacacatggaaaacgctggagcccatctgtctccaatctgctgttttccaaaaattagggaacttcagttttccctttgatactctctgtttctaacaaccccaacgccagggctgtcctgcttctacaagtgacaatgacaaatataggcctgaaggaagatgagctgatggcattcccagcttactaccactccttgggggccttatctcacatatgttgattcaattcatagactcaggtgggtgaggatctattgttcagctacattagaagtgactgcttaagactctggtgtgtggtgaaatgaggcagaattttctcaatggagtgttgggagaagtttctccttataattaccgtcttactatcactaaatcatagctcaaataaggaaattattcaagaagaaatagaaatgtaatcttatgaagacataaatttagagatttgtggaaagcccttcataatttcatggtgttctgtttgagctgggattatagttgatatttcattataatatattagctgttctagactttatgcatttatgtaaagttttctttgttgtactttaagttctgggatacatgggcagagcatgcaggtttgttccataggtatacacgtgccatggtggtttgcagcacccatcaacctgtcatctacattaggtatttctcctaatgctgttcctcccccagcctcccaccctttgacaggccccagtgtgtgatgttcccctccctgtgtccatgtgttctcattgttcaactcccacttatgagtgagaacatgcagtgtttggttttcttttcttctttttctttttctttctttttttttttgagacaaaatttcactcttgttgaccaggttggagtgcaatggcatgatcttgggttaccgcaacctctgcctcccgggttcaagtgactctcctgcctcagcctcccaagtagctaggattacaggcatgtgccaaaatgcctggctaattgtgtgtatttttagtagagatggggtttctccatgttggtcaggctggtctcaaactcctcacctcaggtgatctgcccacctttgcctcccaaagttctgagactacaggcatgagccactgctcctggcctggttttcttttcttgtgttagtttgctgagaatgatggtttccagcttcatccatgtccctggaaaggacataaatgtgtagtattccatggtgtatatgtgccacattttctttatccactttatcattgatgggaatttgggttggttccaagtctttgctattgtgaacagtgctgaaataaacatacagtgcatgtgtctgtatagtataataatttataatgctttgggtatataccccgtaatgggattgctgaaccttgaggaattgtcacactgtcttccataatgactgaactaatttacactcctaccaacagtgtaaaagcattcctatttctccacagcctcatcagcatctgttgtttcctgactttttaataatcaccattctaactggtgtgagatggtatctc

SEQ ID NO: 10597 - DNA, 5582 bp, Homo sapiens
tcaattgtattttctttgttattattatactttaagttttagggtacatgtgcacaacgtgcaggtttgttacatatgtatacatgtgccatgttggtgtgctgcacccattaactcgtcatttagcaataggtatatctcctaatgctatccctcccccctccccagaccacacaacagtccccagtgtgtgatgttccccttcctgtgtccatgtgttctcattgttcaattcccacctatgagtgagaacatgcggtatttggttttttgtccttgtgatagtttgctcagaatgatggtttccagcttcatccatgtccctaaaaaggacaggaactcattattttttatggctgcatagtattccatgtgtatatgtgccacattttcttaatccagtctatcattgttggacatttgggttggttccaagtctttgctattgtgaatagtgcctcaataaacacacgtgtgcatgtgtctttatagcagcatgatttataatcctttgggtatatacccagtaatgggatggctgggtcaaatggtatttctagttctagatccctgaggaatcaccacactgacttccacaatggttgaactagtttacagtcccaccaacaatgtaaaagtgttcctatttctccacatcctctccagcacctgttgtttcctgactttttaatgatcgccattctaactggtgtgagatggtatctcattgtggttttgatttgcatttctctgatggccagtgatgatgagcattttttcacgtgttttttggctgcataaataaatgtcttctattgagaagtgtctgttcatatccttcgcccactttttaatggggttgtttgtttttttcttataaatttgtttgagttcattgtagattctggatattagccctttatcagatgagtaggttgcaaaaattttctcccattttgtaggttgcctgttcactctgatggtggtttcttttgctgtgcagaagctctttagtttaattagatcccatttgtcaattttggcttttgttgccattgcttttggtgttttagacatgaagtccttgcccatgcctatggcctgaatggtactgcctaggttttcttctagggtttttatggttttaggtcaaacatgtaagtctttaatccatcttgaattaatttttgtataaggtgtaaggaaggcatccagtttcagctttctacatatggctagccaattttcccagcaccatttattaaatagggaatcctttccccatttcttctttttgtcaggtttgtcaaagatcagatagttgtagatatgtggcattatttctgagggctctgttctgttccattggtctacatctctgttttggtaccagtaccatgctgttttggttactgtagccttgtagtatagtttgaagtcaggtagcgggatgcctccagctttgttcttttggcttaggattgacttggcaatgtgggctttttggttccatatgaactttaaagtagttttttccaattctgtgaagaaagtcattggtagcttgatggggatggcattgaatctataaattaccttgggcagtatggccattttcatgatactgattcttcctacccatgagcatggaatgttcttccatttgtttgtatcctcttttatttcattgagcagtggtttgtagttctccttgaagaggtccttcacatcccttgtaagttggattcctaggtattttattctctttgaagcaattgtgaatgggagttcactcatgatttggctctctgtttgtctgttactggtgtataagaatgctcgtgatttttgcacattgattttgtatcctgagactttgctgaagttgcttatcagcttgaggagatttggggctgagacaatggggttttctagatatacaatcatgtcatctgcaaacagggacaatctgacttcctcttttcctaattgaatgccctttatccccttctcctgcctcattttcttggccagaacttccaaccctatgttgaataggagtgttgatagagggcatccctgtcttgtgccagttttcaaagggaatgctcccagtttttgtccattcagtatgatattggctgtggggttgtcatagatagctcttattattttgagatatgtcccatcaatacctaatttattgagagtttttagcatgaagggttgttgaattttgtcaaaggccctttctgcatctattgagataatcatctggtttttgtctttggttctgtttatatgctggattacatttattgatttgcatatgttgaaccagccttgcatcccagggttgaagaccatttgatcacggtggataagctttttgatgtgttgctggattcggtttgccagtattttattgcggatttttgcatcaatgttcatcaaggatattggtctaaaattctctttttttgttgtgtctctgccaggctttggtatcaggatgatgctggcttcataaaatgagttagggaggattcccgttttctactgattggaatagtttcagatggaatagtaccagctcctctttgtacctctggtagaattcggctgtgaatccatctggtcctggactttttttggttggtaagctattaattattgcctcaatttcagagcctgttattggtctattcagagatttaacttcttcctggttttgtcttgggagagtgtatgtgtcaaggaatttatccatttcttctagattttctagtttatttgcatagaggtgcttatagtattctctgatggtagtttgtatttctgtgggatcggtggtgatatcccctttgtcattttttatggcgtctatttgattcttctctcttttcttctttattagtcttgctagcggtctatcaattttgttgatcttttcaaaaaaccagctcctggattcattgatttttttgaagggttttttgtctctatttccttcagtcctgctctgatcttagttatttcttgccttctgctagcttttgaatatgtttgctcttgcttctctagttcttttaattgtgatgttagggtgtcaatttttcatctttcctgctttctcttgtgggcatttagtgctataaatttccctctacacactgctttgaatatgtcccagagattctggtatgttgtgtctttgttctcattggtttcaaagaacatcttcatttctgccttcatttcattatgtacccagtagtcattcagaagcaggttgttcagtttccatgtagttgaggggttttgagtgagtttcttaatcctgagttctagtttgattgcactgtggtctgagagacagtttgttataatttctgttcttttacatttgctgaggagtgctttacttccaactatgtggtcaattttggaataggtttggtgtggtgctgaaaagaatgtatattctgttgatttggggtggagagttctgtagatgtctattaggtctgcttggtgcagagctgagttcaattcctgtatatccttgttaactttctgtctcgttgatctgtctaatgttgacagtggggtgttaacgtctcccattattattgtgtcggagtctaagtctctttgtaggtcactaagacttgctttatgaatctaggtgctcctgtattgggtgcatatatatttaggatagctagttcttcttgttgaattgattcctttaccattatgtaatggccttctttgtctcttttgatctttgttggtttaagtctgttttatccgagactaggattgcaatccctgcatttttttgttttccatttgcttggtagatcttcctccatccctttattttgagcctatgtatgtctctgcatgtgagatgggtttcctgaatacagcacactgatgggtcttgactctttatccaatttgccagtctgtgccttttaattggagcaatttagcgcatttacatttatggttagtattgttatgtgtgaatttgatcctgtctttatgatgttagctggttattttgctcgttagttgatgtagtttcttcctagccttgatattctttacaatttggcttgtttttgcagtggctggtaccggttgctcctttccatgtttagtgcttccttcaggagctcttttagggcaggcctggtggtgacaaaatctctcagcatttgcttgtctgtaaagtattgtatttctccttcacttatgaagcttagtttggttggatatgaaattctgggttgaaagttcttttctttaagaattttgaatattggtccccactctcttctggctcgtagagtttctggcaagagatcagctgttagtctgatgggcttccctttgtgggtaacccgacctttctctctggctgcccttaacattttttccttcatttaaactttggtgaatttgacaattatgtgtcgtggagttgctcttctctaggagtatcttagtggcgttctctgtatttcctgaatttgaatgttggcctgccttgctagattggggaagttctcctggataatatcctgcagagtgttttccaacttggttccattctccccgtcactttcaggtacaccaattagacgtagatttggtcttttcacatagtcccatatttcttggatgctttgtttctttttattcttttttctccaaacttctcttcatgcttcatttcattcatttcgtcttccatcactgataccctttcttccagttgatcacatcggttactgaagcttgtgcatttgtcacgtagctctcgtgctgtggttttcagctccatcaggtcctttaaggacttctctgcattgattattctagttatccattcatctaattttttttcaaagtttttaacttctttgccattgattcgaacttcctcctttagctcagagtagtttgatcttctgaagccttcctctctcaactcgtcaaagtcattctccgtccagctttgttctgttgctggtgaggagctgcgttcctttggaggagaagaggcgctctgatttttagagtttccggtttttctgctctgttttttccccatctttgtgattttatctacctttggtctttgatgatggttatgtacagatgggttttgggtgtggatgtcctttctgtttgttagttttccttctaacagtcagaaccctcagctgcaggtctgttggagtttactggaggtccactccagaccttgtttgcctgggtatcagcagtggtggctgcagaacagcggatattggttaaccgcaaatgctgctgcctgatcgttcctctggaagttttgtctcagaggagtacccggcagtgtgaggtgtcagtctgcccctactggggggtgcctcccagttaggctacttgggggtcagggacccacttgaggaggcagtctgcccattctcagatctcaagctgcatgctgggagaaccactgctctcttcaaagctgtcagacagggacatttaagtctgcagaggttactgctgtcttttgt

SEQ ID NO: 10598 - DNA, 6023 bp, Homo sapiens
taatattctttttttatatttttttttaattatactttaagttttagggtacatgtgcacaatgtgcaggttagttacatatgaatacatgtgccatgctggtgcgctgcacccactaacgcgtcatctaacattaggtatatctcccaatgctatccctccccactccccccaccccacaacagtccccagagtgtgatgttccccttcctgtgtccatgtgttctcattgttcaattcccacctatgaatgagaatatgcggtgtttggttttttgttcttgcgatagtttactgagaatggtgatttccaatttcatccatgtccctacaaaggacatgaactcatcattttttatggctgcatagtattccatggtgtatatgtgccacattttcttaatccagtctatcattgttggacatttgggttggttccaagtctttgctattgtgaataatgccgcaataaacatacgtgtgcatgtgtctttatagcagcatgatttatagtcctttgggtatatacccagtaatgggatggctgggtcaaatggtatttccagttctagatccctgaggaatcgccacactgacttccacaatggttgaactagtttacagtcccaccaacagtgtaaaagtgttcctatttctccacatcctctccagcacctgttgtttcctgactttttaatgattgccattctaaatggtgtgagatggttttgatttgcatttctctgatggccagtgatgatggcattttttcatgtgttttttggctgcataaatgtcttcttttgacaagtgtctgttcatgtccttcgcccactttttgatggggttgtttgtttttgtcttgtaaatttgtttgagttcattgtagattctggatattagccctttgtcagatgagtaggttgcgaaaattttctcccattttgtaggttgcctgttcactctgatggtagtttcttttgctgtgcagaagctctttagtttaattagatcccacttgtcaattttgtcttttgttgccattgcttttggtgttttagacatgaagtccttgcccatgcctatgtcctgaatggtagtgcctaggtttacttctagggtttttatgcttctaggtctaacatttaagtctttaatccatcttgaattgatttttgtataaggtgtaaggaagggatccagtttcagctttctacatatggctagccagttttcccagcaccatttattaaatagggaatcctttccccattgcttgtttttctcaggtttgtgaaagatcagatagttgtagatatgcggcgttatttctgagggctctgttctgttccattgatctatatctctgttttggtaccagtaccatgctgttttggttactgtagccttgtagtatagtttgaagtcaggtagtgtgatacctccagctttgttcttttggcttaggattgacttggcgatgcaggctcttttttggttccatatgaactttaaagtagttttttccaattctgggaagaaagtcattggtagcttgatggggatggcattgaatctgtaaattaccttgggcagtatggccattttcacgatattgattgttcctacgcatgagcatcgaatgttcttccatttgtttgtatcctcttttatttccttgagcagtggtttgtagttctccttgaagaggtccttcacatcccttgtaagttagattcctaggtattttattctctttcaagcaattgtgaatgggagttcactcatgatttggctctctgtctgttgttggtgtataagaatgcttgtgatttttgtacattgattttgtatgctgagactttgctgaagttgcttatcagcttaaggagattttgggctgagacaatggggttttctggatatacaatcatgtcatgtgcaaacacggacaatttgacttcctcttttcctaattgaataccctttatttccttctcctgcctaattgccctggccagaacttccaacactatgttgaataggagtggtgagagagggcatctctgtcttgtgccagttttcaaagggaatgcttccagtttttgcccattcagtatgacattggctgtgggtttgtcatagatagctcttattagtttgaaatacgtcccatcaatacctaatttattgagagtttttagcatgaagggttgttgaattttgtcaaaggctttttctgcatctattgagataatcatgtggtttttgtctttggctctgtttatatgctggattacatttgctgatttgcgtatattgaaccagccttgtatcccagggatgaagcccacttgatcatggtggataagctttttgatgagctgctggattcgttttgccagtattttattgaggatttttgcatcaatgttcatcaaggatattgatctaaaattctctttttttgttgtgtctctgcctggctttggtatcagaatgatggtggcctcataaaatgagttagggaggattccctctttttctattgattggaatagtttcagaaggaatggtaccagttcctccttgtacctctggtagaattcggctgtgaatccatctggtcctggactctttttggttggtaagctattgattattgccacaatttcagctcctgttattggtctattcagagattcaacttcttcctggtttagtcttgggagagtgtatgtgtccaggaatttatccatttcttctagattttctagtttatttgcgtagaggtgtttgtagtattctctgatggtagtttgtatttctgtggtatcggtggtgatatcccctttatcattttttattgtgtctatttgattcttctctctttttttctttattagtcttgctagcggtctatcaattttgttgatcctttcaaaaaaccagctcctggattcattaattttttgaagggttttttgtgtctctatttccttcagttctgctctgattttagttatttcttgccttctgctagcttttgaatgtgtttgctcttgcttttctagttcttttaattgtgatgttagggtgtcaattttggatcttccctgctttctgttgtgggcatttagtgctataaatttccctctacacactgctttgaatgtgtcccagagattctggtatggtgtgtctttgttctcattggtttcaaagaacatctttatttctgccttcatttcgttatgtacccagtagtcattcaggagcaggttgttcagtttccatgtagttgagcagttttgagtgagattcttaatcctgagttctagtttgattgcactgtggtctgagagatagtttgttataatttctgttcttttacatttgctaaggagagctttacttcccagtatgtggtcaattttggaataggtgtggtgtggtgctgaaaaaaatgtatattctgttgatttggggtggagagttctgtagatgtctattaggtccgcttggtgcagagctgagttcaattcctgggtatccttgttgactttctgtcttgttgatctgtctaatgttgacagtggggtgttaaagtctcccattattaatgtgtgggagtctaagtctctttgtaggtcactcaggacttgctttatgaatcttgctgctgctgtattgggtgcatatatatttaggatagttagctcttcttgttgaattgatccctttaccattatgtaatggccttctttgtctcttttgatctttgttggtttaaagtctgttttatcagagactaggattgcaaccccttcctttttttgttttccattggcttggtagatctttctccatccttttattttgagcctatgtgtgtctctgcacgtgagacgggtttcctgaatacagcacactgatgggtcttgactctttatccaatttgccagtctgtgtcttttaattggagcatttagtccatttacatttaaagttaatattgttatgtgtgaatttgatcctgtcattatgatgttagctggttattttgctcgttagttgatgcagtttcttcctagtctcgatggtctttacattttggcatgattttgcagcagctggtaccggttgttcctttccatgtttagtgctaccttcaggagctcttgtaaggcaagcctggtggtgacaaaatctctcagcatttgcttgtctgtaaaggattttatttctccttcacttacgaagcttagtttggctggatatgaaattctgggttgaaaattctttcctttaagaatgttgaatattggcctccactctcttctggcttgtagggtttctgccaagagatctgctgttagtctgatgggcttccctttgtgggtaacccgacctttctctctggctgcccttaacattttttccttcatttcaactttggtgaatctgacaattatgtgtcttggagttgctcttctcgaggagtacctttgtggcgttctctgtatttcctgaatctgaatgttgccctgccttgctagattggggaagttctcctggataatatcctgcagagtgttttccaacttggttccattctccccatcactttcaggtacaccaatcagacgtagatttggtcttttcacatagtctcatatttcttggaggctttgctcatttctttttattcttttttctctaaacttcccttctcgcttcatttcattcatttcatcttccattgctgataccctttcttccagttgattgcattggctcctgaggcttctgcattcttcacgtagttctcgagccttggttttcagctccatcagctcctttaagcacttctctgtattggttattctagttatacattcttctaaatttttttcaaagttttcaacttctttgcctttggtttgaatgtcctcccgtagctcagagtaatttgatcgtctgaagccttctctcagctcgtcaaagtcattctccatccagctttgttccgttgctggtgaggaactgcgttcctttggaggaggagaggcgctctgctttttagagtttccagtttttctgttctgtttttttcccatctttgtggttttatctacttttggtctttgatgatggtgatgtacagatgggtttttggtgtggatgtcctttctgtttgttagttttccttctaacagagaggaccctcagctgcaggtctgttggaataccctgccgtgtgaggtgtcagtgtgcccctgctggggtgcctcccagttaggctgctcgggggtcaggggtcagggacccacttggggaggcagtctgcgggttctcagatctccagctgcgtgctaggagaaccactgctctcttcaaagctgtcagacagggacttttaagtctgcagaggttactgctgtctttttgtttgtctgtgccctgcccccagaggtggagcctacagaggcaggcaggcctccttgagctgtggtgggctccacccagttcgagcttcccggctgctttgtttacctaatcaagcctgggcaatggcgggcgcccctcccccagcctcgctgccgccttgcagtttgatctcagactgctgtgctagcaatcagcgagactacgtgggcgtcggaccctctgagccaggtgcggaatataatctcgtggtgcgccgttttttaagcccgtcagaaaagcgcaatattcgggtgggagtgacccgattttccaggtgccgtccgtcacccctttctttgactcagaaagggaactccctgaccccttgcgcttcccaagtgaggcaatgcctcgccctgcttcggctcgcgcacggtgcacgcacccactgacctgcgcccactgtctggcactccctagtgagatgaacccggtacctcagatggaaatgcagaaatcacccgtcttctgcgtcactcacgctgggagctgtagaccggagccgttcctattcggccatcttggctcctccc

SEQ ID NO: 10599 - DNA, 6067 bp, Homo sapiens
ttttatttatttatttatttattttattattattattatacttttaagttttagggtacatgtccatattgtgcaggttagttacgtatgtacacatgtgacatgctggtgcgctgcacccactaactcgtcatctagcattaggtgtatctcccaatgccatccctcccccctccccccaccccacaacagtccccagagtgtgatattccccttcctgtgtccatgtgatcgcattgttcaattcccacctatgagtgagaatatgcgatgtttggttttttgttcttgcgatagtttactgagaatgatgatttccaatttcatccatgtccctacaaaggacatgaactcatcattttttatggctgcatagtattccatggtgtatatgtgccacattttcttaatccagtctatcattgttggacatttgggttggttccaagtctttgctattgtgaataatgccgcaataaacatacgtgtgcatgtgtctttatagcagcatgatttatagtcctttgggtatatacccagtaatgggatggctgggtcaaatggtatttccagttctagatccctgaggaatcgccacactgacttccacaatggttgaactagtttacagtcccaccaacagtgtaaaagtgttcctatttctccacatcctctccagcacctgttgtttcctgactttttaatgattgccattctaactggtgtgagatgatatctcattgtggttttgatttgcatttctctgatggccagtgatgatgagcattttttcatgtgttttttggctgcataaatgtcttcttttgagaagtgtctgttcatgtccttcacccactttttgatggggttgtttgtttttttcttgtaaatttgtttgagttcattgtagattctggatattagccctttgtcagatgagtaggttgtgaaaattttctcccattttgtaggttgcctgttcactctgatggtagtttcttttgctgtgcagaagctctttagtttaattagatcccatttgtcaattttggcttttgttgccattgctttttggtgttttagacatgaagtccttgcccatgcctatgtcctgaatggtaatgcctaggttttcttctagggtttttatggttttaggtctaacatttaagtctttaatccatcttgaattaattttgtataaggtgtaaggaagggatccagtttcagctttctacatatggctagccagttttcccagcaccatttattaaatagggaatcctttccccattgcttgtttttctcaggtttgtcaaagatcagatagtcgtagatatgcggcgttatttctgagggctctgttctgttccattgatctatatctctgttttggtaccagtaccatgctgttttggttactgtagccttgtggtatagtttgaagtcaggtagtgtgatgcctccagctttgttcttttggcttaggattgacttggtgatgcgggcttttttttggttccatgtgaactttaaagtagttttttccaattctgtgaagaaaggcattggtagcttgatggggatggcattgaatctgtaaattaccttgggcagtatggctattttcacgatattgattcttcctacccatgagcatggaatgttcttccgtttgtttgtatcctcttttatttcattgagcagtggtttgtagttctccttgaagaggtccttcacatcccttgtaagttggattcctaggtattttattctctttgaagcaattgtgaatgggagttcactcatgatttggctctctgtttgtctgttgttggtgtataagaatgcttgtgatttttgtacattgattttgtatcctgagactttgctgaagttgcttatcagcttaaggagattttgggctgagacaatggggttttctagatatacaatcatgtcatctgcaaaacagggacaatttgacttcctcttttcctaattgaataccatttatttccttctcctgcctaattgccctggccacaacttccaacactatgttgaataggagtggtgagagagggcatccctgtcttgtgccagttttcaaagggaatgcttccagtttttgcccattcagtatgatattggctgtgggtttgtcaaagatagctcttattattttgaaatacgtcccatcaatacctaatttattgagagtttttagcatgaagggttgttgaattttgtcaaaggctttttctgcatctattgagataatcatgtggtttttgtttttggctctgtttatatgctggattacatttattgatttgcgtatattgaaccagccttgcatcccagggatgaagcccacttgatcatggtggataagctttttgatgtgctgctggattcgttttgccagtattttattgaggatttttgcatcaatgttcatcaaggatattggtctaaaatcgtctttttttgttgtgtctctgcctggctttggtatcagaatgatgctggcctcataaaatgagttagggaggattccctctttttctgttgattggaatagtttcagaaggaatggtaccagttcctccttgtacttctggcagaatttggctgtgaatccatctggtcctggactctttttggttgggaagctattgattattgccacaatttcagatcctgttattggtctattcagagattcaacttcttcctggtttagtcttgggagggtgtatgtgtcgaggaatgtatccatttcttctagattttctagtttatttgcgtagaggtgtttgtagtattctctgatggtagtttgtatttctgtgggatcggtggtgatatcccctttatcattttttattgtgtctatttgattcttctctctttttttctttattagtcttgctagcggtctatcaattttgttgatcctttcaaaaaaccagctcctggattcattaattttttgaagggttttttgtgtctctatttccttcagttctgctctgattttagttatgtcttgccttctgctagcttttgaatgtgtttgctcttgcttttctagttcttttaattgtgatgttagggtgtcaattttggatctttcctgctttctcttgtgggcatttagtgctataaatttccctctacacactgctttgaatgcatcccaaggattctggtatgttgtgtctttgttctcgttggtttcaaagaacatctttatttctgccttcatttcgttatgtacccagtagtcattcaggagcaggttgttcagtttccatgtatttgagaggttttgagtgagattcttaatcctgagttctagtttgattgcactgttgtatgagagatagtttgttataatttctgttcttttacatttgctgaggagagctttacttccaagtatgtggtcaattttcgaataggtgtggtgtggtgctgaaaaaatgtatattctgttgatttggggtagagagttctgtagatgtctattaggtctgcttggtgcagagctgagttcaattcctgggaatccttgttgactttctgtctcattgatctgtctaatgttgacagtggggtgttaaagtctcccattattaatgtgtgggagtctaagtctctttgtaggtcactcaggacttgctttatgaatcttggtgctcctgtattgggtgcatatatacttagaatagttagctcttcttgttgaattgatccctttaccattatgtaatggccttctttgtctcttttgatctttgttggtttacagtctgttttatcagagactaggattgcaacccctgcctttttttgttttccatttgcttggtagatcttcctccatccttttattttgagcctatgtctgtttctgcacgtgagatgggcttcctgaatacagcacactgatgggtcttgactctttatccaatttgccagtctgtgtcttttaattggagcatttagtccatttacacttaaagttaatattgttatgtgtgaatttgatcctgtcattatgatgttagctggttattttgctcgttagttgatgcagtttcttcctagtctcgatggtctttacatgttggcatgattttgcagcggctggtaccggttgttcctttccatatttagtgcttccttcaggagctcttttagggcaggcctggtggtgacaaaatctctcagcatttgcttgtctgtaaagtattttatttctccttcgcttatgaagcttagtttggctggatatgaaattctgggttgaaaattctttcctttaagaatgttgaatattggcccccactctcttctggcttgtagggtttctgccaagagatccgctgttagtctgatgggcttccctttgagggtaagcagacctttctctctggctgcccttaacattttttccttcatttctactttggtgaatctgacaattatgtgtcttggagttgctcttctcgaggagtatctttgtggcgttctctgtatttcctgcatctgaacgttggcttgccttgctagattggggaagttctctggataatatcctgcagtgtgttttccaacttggttccattctccccatcactttcaggtacaccaatcagacgtagatttggtcttttcacatagtcccatagttcttggaggctttgctcatttctgttcttttttctctaaacttcccttctcgcttcatttcattcatttcatcttccattgctgataccctttcttccagttgatcgcatcggctcctgaggcttctgcattcttcacgtagttctcgagccttggttttcagctccatcagctcctttaagcacttctctgtgttggttattctagttatacattcttctaaatttttttcaaagttttcaacttctttgcctttggtttgaatgtcctcccgtagctcagagtaatttgatcatctgaagccttcttctctcagctcgtcaaagtcattctccatccagctttgttccgttgctggtgaggaactgcaaactgcattcctttggaggaggagaggcgctctgatttttagagtttccagtttttctgttctgttttttccccatctttgtggttttatctacttttgatctttgatgatggtgatgtacagatgggtttttggtgtggatgtcctttctgtttgttagttttccttctaacagacaggaccctcagctgcaggtctgttggaataccctgcagtgtgaggtgtatcagtgtgcccctgctgggggtgcctcccagttaggctgctcgggggtcaggggtcagggacccacttgaggaggcagtctgcccgttctcagatctccagctgcgtgctgggaaaaccagtgctctcttcaaagctgtcagacagggacatttaagtctgcagaggttactgctgtctttttgtttgtctgtgccctgcccccagaggtggagcctgcagaggcaggcaggcctccttgagctgtggtgggctccaccctgttggaacttcccagctgctttgtttacctaatcaagcctgggcaatggcgggcgcccctcccccagcctcgctgctgccttgcagtttgatctcagactgctgtgctagcaatcagcgagactccgtgggcgtaggaccctccgagccaggtgcgggatataatctcgtggtccgccgtcttttaagcccgtcagaaaagcgcagtattccggtgggagtgacccgattttccaggtgctgtccatcacccctttctttgactcggaaagggaactccctgaccccttgtgcttccggagtgaggcaatacctcgccctgcttcggctcgcgcacgatgcacgcacccactgacctgcgcccactgtctggcactccctagtgagatgaacctggtacctcagatggaaatgcagaaatcacccgtcttctgcgttgctcacgctgggagctgtagaccagagctgttcctattcggccttcttggctccttccctgggctcttt

SEQ ID NO: 10600 - DNA, 5236 bp, Homo sapiens; identical to SEQ ID NO: 10467

SEQ ID NO: 10601 - DNA, 4316 bp, Homo sapiens
tctgtatgttttgtatttttcttttttaaaattttattattattatactttaagttttagggtacgtgtacacaacgtgcaggtttgttacatatgtatacatgtgccatgttggtgtgctgtacccattaactcgtcatttaacattaggtatatctcctaatgctatctctccccacttcccccaccccacaacaggccccggtgtgtgatgttccccttcttgtgtccatgtgttctcattgttcaattcccacctatgagtgagaacatgcggtgtttggttttttgtccttgcaatagtttgctgagaatgatggtttccagcttcatccatgtccctacaaaggatatgaactcatcactttttatggctgcatagtattccatggtgtatatgtgctacattttcttaatccagtctatcattgttggacatttaggttggttccaagtctttgctattgtgaatagtgccgcaataaacatacgtgtgcctgtgtctttatagcagcatgatttataatcctttgggtatatacccagtaatgggatggctgggtcaaatggtatttctagttctagatccctgaggaatcgccacactgacttccacagggttgaactagtttacagtcccaccaacagtgtaaaagtgttcctatttctccatatcctctccagcacctgttgtttcctgactttttaatgatcgccattctaactggtgtgagatggtatctcattgtggttttgatttgcatttctctgatggccagtgatgatgagcattttttcatgtgttttttggctgtataaatgtcttcttttgagaagtgtctgttcatatccttcgcccactttttgatggggttgtttgttttttttcttgtaaatttgtttgagttcattgtagattctggatattagccctttgtcacatgagtaggttgcaaaaattttctcccattctgtaggttgcctgttcactctgatggtagtttcttttgctgtgcagaagctctttagtttaattagatcccatttgccaattttggcttttgttgccattgcttttggtgttttagacatgaagtccttgcccatgcctatgtcctgaatggtattgcctaggttttcttctagggtttttatggttttaggtctaacatttaagtctttaatcaatcttgaattaatttttatataaggtgtaaggaagggatccagtttcagctttctacatatggttagccagttttcccagcaccatttattaaatagggaatcctttccccatttcttgtttttgtcaagtttgtcaaagatcagatagttgtagatatgtggcattatgtctgagggctctgttctgttccattggtctatatctctgttttgtaccagtaccatgctgttttggttactgtagccttgtagtatagtttgaagtcaggtagcatgatgccttcagctttgctcttttggcttaggattgactgggcaatgcgggctcttttttggttccatatgaactttcaaatagttttttccaattctgtgaagaaagtcattggtagcttgatggggatggcactgaatctgtaaattaccttgggcagtatggccattttcacaatattgattcttcctacccattagcatggaatgtttgtatcctctttcattgtattgtatcttgtattgtatcctcttttatttcattgagcagtggtttgtagttctccttgaagaggtccttcacatcccttgcaagttggattcctaagtattttattctctttgaagccattgtgaatgggagttcactcatgatttggctctctgtttgtctgttattggtgtataagaatgcttgtggtttttgcacattgattttgtatcctgagactttgctgaagttgcttatcagcttaaggagattttgggctgagacaatggggttttctagatatacaatcatgtcatctgcaaacagggacaatttgacttcctcttttcctaattgaatgcccgttatttccttctcctgcctgattgccctggccagaacttccaacactatgttgaataggagtggtgagagagggcatccctgtcttgtgccagttttcaaagggaatgcttccagtttttgtccattcagtatgatattggctgtgggtttgtcatagatagctcttattattttgagatatgtcccatcaataactaatttattgagagtttttaccatgaagggttgttaaattttgtcaaaggccttttctgcatctattgagataatcatatggtttttgtcattggttctgtttatatgctggattacgtttattgatttgtgtatgttgaaccagccttgcatcccagagatgaagctcacttgatcatggtggataagctttttgatgtactactggattcggtttgccagtattttactgaggatttttgcatcaacgttcatcaaggatattcgtctaaaattctcttttttttgttgtgtctctgccaggctttggtatcaggatgatgctggcctcataaaatgagttagggaggattccctctttttctattgattggaatagtttcagaaggaatggtaccagttcctccttgtacctctggtagaatttggctgtgaagccatctggtcctggattttttttggttggtaagctattaattattgcctcaatttcagaatctgttattggtccattcagggattcaacttcttcctggtttagtcttgggagggtgtatgtgtctaggaatttatccatttcttctagattttctagtttatttgcatggaggtgtttatagtattctctgatggtattttgtatttctgtgggatcagtggtgatatcccctttgtcattttttattgcatctatttgattcttctctctttttttctttattagtcttgctagctgtctatcaattttgttgatcttttcaaaaaaccagctcctggattcattgattttttgaagggttttttgtgtctctatttccttcagttctgctctgatcttagttatttcttgccttctgctagcttttgaatgtgtttgctcttgcttctctggttcttttaattgtgatgttagggtgtcaattttaaatctttcctgctttctcttgtgggcatttagtgctataaagttccctctacacactgctttgaatgtgtcccagagattctggtatgtcgtgtctttgttcttgttggtttcaaagaacatctttatgtctgccttcattttattatgtacccagtagtcattcaggagcaggttgttcagtttccgtgtatttgaggggttttgagtgagtttctgaatcctgagttctagtttgattgtactgtggtctgagagacaattttttataatttctgttctttacatttgctgaggagtactttacttccaactatgtggccaattttggaataggtgtggtgtggtgctgaaaagaatgtatattctgttgatctggggtggagggttctgtagatgtctgttaggtctgcttggtgcagagctgagttcaattcctggatatccttgtgaaatttctgtctcgttgatctgtctaatgttgacagtggggtgttaaagtctcccattatttttgtgtgggagtctaagtctctttttatgtcactaaggacttgctttatgaatctgggtgctcctgtattgggtacatatatatttaggatagttagctcttcttgttgaattgatccctttaccattatgtaatggccttctttgtctcttttgatctttgttggtttaaagtctgttttatcagagactaggattgcaagccctgcctttttttgttttccatttgcttggtagatcttcctccatccctttattttgagcatatatgtgtctctgcatgtgagatgggtttcctgaatacagcacattgatgggtgttgactctttatccaatttgccagtctgtgtcttttaattggagcatttagcccatttacatttaaggttaatattgttatgtgtgaatttgatcctgtcattataatgttagctggttattttgctcgttagttgatgcagtttcttcctagccttgatggtctttacaatttggcatgtttttgcagcggctggtaccacttgttcctttccatgtttagtgcttccttcaggagctcttttagggcaggcctggtggtgacaaaatctctcagcatttgcttgtctgtaaaggattttatttcttcttcacttatgaagctt

SEQ ID NO: 10602 - DNA, 6032 bp, Homo sapiens
actattttttttttttttttttattatactctaagttttagggtacatgtgcacattgtgcaggttagttacatatgtatacatgtgccatgctggtgcgctgcacccactaatgtgtcatctagcattaggtatatctcccaatgctatccctcccccctccccccaccccaccacagtccccagagtgtgatattccccttcctgtgtccatgtgatctcattgttcaattcccacctatgagtgagaatatgcggtgtttggttttttgttcttgcgatagtttactgagaatgatggtttccaatttcatccatgtccctacaaaggatatgaactcatcattttttatggctgcatagtattccatggtgtatatgtgccacattttcttaatccagtctatcattgttggacatttgggttggttccaagtctttgctattgtgaatagtgccgcaataaacatacgtgtgcatgtgtctttatagcagcatgatttatactcatttgggtatatacccagtaatgggatggctgggtcaaatggtatttctagttctagatccctgaggaatcgccacactgacttccacaatggttgaactagtttacagtcccaccaacagtgtaaaagtgttcctatttctccgcatcctctccagcacctgttgtttcctgactttttaatgattgccattctaactggtgtgagatgatatctcatagtggttttgatttgcatttctctgatggccagtgatgatgagcatttcttcatgtgttttttggctgcataaatgtcttcttttgagaagtgtctgttcatgtccttcgcccactttttgatggggttgtttgtttttttcttgtaaatttgtctgagttcattgtagattctggatattagccctttgtcagatgagtaggttgcgaaaattttctcccatgttgtaggttgcctgttcactctgatggtagtttcttttgctgtgcagaagctctttagtttaattagatcccatttgtcaattttgtcttttgttgccattgcttttggtgttttggacatgaagtccttgcccacacctatgtcctgaatggtaatgcctaggttttcttctagggtttttatggttttaggtttaacgtttaaatctttaatccatcttgaattgatttttgtataaggtgtaaggaaggaatccagtttcagctttctacatatggctagccagttttcccagcaccatttattaaatagggaatcctttccccattgcttgtttttctcaggtttgtcaaagatcagatagttgtagatatgcggcgttatttctgagggctctgttctgttccattgatctatatctctgttttggtagcagtaccatgctgttttggttactgtagccttgtagtatagtttgaagtcaggtagtgtgatgcctccagctttgttcttttggcttaggattgacttggcgatgcgggctcttttttggttccatatgaactttaaagtagttttttccaattctgtgaagaaagtcattggtagcttgatggggatggcattgaatctgtaaattaccttgggcagtatggccattttcacgatattgattcttcctacccatgagcatggaatgttcttccatttgtttgtgtcctcttttatttccttgagcagtggtttgtagttctccttgaagaggtccttcacatcccttgtaagttggattcctaggtattttattctctttgaagcaattgtgaatgggagttcacccatgatttggctctctgtttgtctgttgttggtgtataagaatgcttgtgatttttatgcattgattttgtatcctgagactttgctgaagttgcttatcagcttaaggagattttgggctgagacgatggggttttctagataaacaatcatgtcgtctgcaaacagggacaatttgacttcctcttttcctaattgaataccctttatttccttctcctgcctgattgccctggccagaacttccaacactatgttgaataggagtggtgagagagggcatccctgtcttgtgccagttttcaaagggaatgcttccagtttttgcccattcagtatgatattggctgtgggtttgtcatagatagctcttattattttgaaatacgtcccatcaatacctaatttattgagagtttttagcatgaagggttgttgaattttgtcaaaggctttttctgcatctattgagataatcatgtggtttttgtctttggttctgtttatatgctggattacatttattgatttgcgtatattgaaccagccttgcatcccagggatgaagcccacttgatcatggtggataagctttttgatgtgctgctggattcggtttgccagtattttattgaggatttttgcatcaatgttcatcaaggatattggtctaaaattctcttttttggttgtgtctctgcccggctttggtatcagaatgatgctggcctcataaaatgagttagggaggattccctctttttctattgattggaatagtttcagaaggaatggtaccagttcctccatgtacctctggtagaattcggctgtgaatccatctggtcctggactctttttggttggtaaactattgattattgccacaatttcagagcctgttattcgtctattcagagattcaacttcttcctggtttagtcttgggagagtgtatgtgtcgaggaatgtatccatttcttctagattttctagtttatttgcgtagaggtgtttgtagtattctctgatggtagtttgtatttctgtgggatcggtggtgatatcccctttatcattttttattgtgtctatttgattcttctctctttttttctttattagtcttgctagcggtctatcaattttgttgatcctttcaaaaaaccagctcctggattcattgattttttgaagggttttttgtgtctctatttccttcagttctgctctgattttagttatttcttgccttctgctagcttttgaatgtgtttgctcttgcttttctagttcttttaattgtgatgttagggtgtcaattttggatctttcctgctttctcttgtaggcatttagtgctataaatttccctctacacactgctttgaatgcgtcccagagattctggtatgtggtgtctttgttctcgttggtttcaaagaacatctttatgtctgccttcatttcgttatgtacccagtagtcattcaggagcaggttgttcagtttccatgtagttgagcggctttgagtgagattcttaatcctgagttctagtttgattgcactgtggtctgagagatagtttgttataatttgtgttcttttacatttgctgaggagagctttacttccaagtgtgtggtcaattttggaataggtgtggtgtggtgctgaaaaaaatgtatattctgttgatttggggtggagagttctgtagatgtctattaggtctgcttggtgcagagctgagttcaattcctgggtatccttgttgactttctgtctcgttgatctgtctaatgttgacagtggggtgttaaagtctcccattattaatgtgtgggagtctaagtctctttgtaggtcactcaggacttgctttatgaatctgggtgctcctgtattgggtgcataaatatttaggatagttagctcctcttgttgaattgatccctttaccattatgtaatggccttctttgtctcttttgatctttgttggtttaaagtctgttttatcagagactaggattgcaacccctgcctttttttgttttccattggcttggtagatcttcctccatccttttattttgagcctatgtgtgtctctgcacgtgagatgggtttcctgaatacagcacactgatgggtcttgactctttatccaacttgccagtctgtgtcttttaattgcagaatttagtccatttatatttaaagttagtattgttatgtgtgaatttgatcctgtcattatgatgttagctggtgattttcctcattagttgatgcagtttcttcctagtctcgatggtctttacattttggcatgattttgcagcggctggtaccggttgttcctttccatgtttagcgcttccttcaggagctcttttagggcaggcctggtggtgacaaaatctctcagcatttgcttgtctataaagtattttatttctccttcacttatgaagcttagtttggctggatatgaaattctgggttgaaaattcttttctttaagaatgttgaatattggcccccactctcttctggcttgtagggtttctgccgagagatccgctgttagtctgatgggctttcctttgagggtaacccgacctttctctctggctgcccttaacattttttccttcatttcaactttggtgaatctgacaattatgtgtcttggagttgctcttctcgaggagtatctttgtggcattctctgtatttcctgaatctgaacgttggcctgcattgctagattggggaagttctcctggataatatcctgcagagtgttttccaacttggttccattctccacatcactttcaggtacaccaatcagacgtagatttggtcttttcacatagtcccatatttcttggaggctttgctcatttctttttattcttttttctctaaacttcccttctcgcttcatttcattcatttcatcttccattgctgataccctttcttccagttgatcgcatcggctcctgaggcttctgcattcttcacgtagttctcgagccttggttttcagctccatcagctcctttaagcacttctctgtattggttattctagttatacattcttctaaatttttttcaaagttttcaacttctttgcctttggtttgaatgtcctcccgtagctcagagtaatttgatcgtctgaagccttcttctctcagctcgtcaaaatcattctccatccagctttgttctgttgctggtgaggaactgcgttcctttggaggaggagaggcgctctgcgttttagagtttccagtttttctgttctgttttttccccatctttgtggttttatctacttttggtctttgatgatggtgatgtacagatgagttttcggtgtagatgtcctttctggttgttagttttccttctaacagacaggaccctcagctgcaggtctgttggaataccctgccgtgtgaggtgtcagtgtgcccctgctggggggtgcctcccagttaggctgctcgggggtcaggagtcagggacccacttgaggaggcagtctgcctgttctcagatctccagctgcgtgctgggagaaccactgctctcttcaaagctgtcagacagggacatttaagtctgcagaggttactgctgcctttttgtctgtctgtgccctgcccccagaggtggagtctacagaggcaggcaggcctccttgagctgtggtgggctccacccagttcgagcttcccggctgctttgtttacctaagcaagcctgggcaatggcgggcgcccctcccccagcctcgctgccgccttgcagtttgatctcagactgctgtgctagcaatcagcgagactccgtgggcgtaggaccctctgagccaggtgtgggatatagtctcgtggtgcgccgtttcttaagccggtctgaaaagcgcaatattcgggtgggagtgacccgattttccaggtgcgtccgtcacccctttctttgactcggaaagggaactccctgaccccttgcgcttcccaggtgaggcaatgcctcgccctgcttcggctcgcgcacggtgcgcacacacactggcctgcgcccactgtctggcgctccctagtgagatgaacccggtacctcagatggaaatgcagaaatcacccgtcttctgcgtcgctcaccctgggagctgtagaccggagctgttcctattcggccatcttcgc

SEQ ID NO: 10603 - DNA, 6071 bp, Homo sapiens
tttttttttttcttttacttatttatttaacttttccttttttttctttaattatactttaagttttagggtacatgtgcacattgtgcaggttagttacaaatgtatacatgtgccatgctggtgcactgcacccactaactcgtcatctagcattaggtatatctcccgatgctatccctcccccctccccccaccccacaacagtccccagagtgtgatattccccttcctgtgtccatgtgatctcattgttcaattcccacctatgagtgagaatatgcggtgtttggttttttgttcttgtgatagtttactgagaatgatgatttccaatttcatccatgtccctacaaaggacatgaactcatcattttttatggctgcatagtattccatggtgtatatgtgccacattttcttaatccagtctatcattgttggacatttgagttggttccaagtctttgctattgtgaataatgctacaacaaacatacgtgtgcatgtgtctttatagcagcatgatttatagtcctttgggtatatacccagtaatgggatggctgggtcaaatggtatttccagttctagatccctgaggaatcgccacactgacttccacaacggttgaactagtttacagtcccaccaacagtgtaaaagtgttcctatttctccacatcctctccaacacctgttgtttcctgactttttaatgattgccattctaacaggtgtgagatggtatctcattgtggttttgatttgcatttctctgatggccagtgatggtgagcattttttcatgtgttttttggctgcataaatgtcctcttttgagaagtgtctgttcatgtccttcgcccactttttgatggggttgtttgtttttttcttgtaaatttgtttgagttcattgtagattctggatattagccctttgtcagatgagtaggttgtgaaaattttctcccattttgtaggttgcctgttcactctgatggtagtttcttttgctgtgcagaagctctttagtttaattagatcccatttgtcaattttgtcttttgttgccattgcttttggtgttttagacatgaagtccatgcccatgcctatgtcctgaatggtaatgcctaagttttcttctagggtttttgtggttttaggtctaacgtttaagtctttaatccatcttgaattgatttttgtataaggtgtaaggaagggatccagtttcagctttctacatatggctagccagttttcccagcaccatttattaaatagggaaccctttccccattgcttgtttttgtcaggtttgtcaaagatcagatagttgtagatatgcggcgttatttctgagggctgtgttctgttccattgatctatatctctgttttggtaccagtaccatgctgttttggttactgtagccttgtagtatagtttgaagtcaggtagtgtgatgcctctagctttgttcttttggcttaggattgctttggtgatgtgggctcttttttggttccatatgaactttaaagtggttttttccaattctgtgaagaaagtcattggtagcttgatggggatggcattgaatctgtaaattaccttgggcagtatggccattttcacgatattgattcttcctacccatgagcatggaatgttcttccatttgtttgcatcctcttttatttccttgagcagtggtttgtagttctccttgaagaggtccttcacatcccttgtaagttggattcctaggtattttattctctttgaagcaattgtgaatgggagttcactcatgatttggctctctgtttgtctgttgttggtgtataagaatgcttgtgatttttgtacattgattttgtatcctgagactttgctgaagttgcttatcagcttaaggagattttgggctgagacaatggggttttctagatatacaatcatgtcatctgcaaacagggacaatttgacttcctcttttcctaattgaataccctttatttccttctcctgcctgattgccctggccagaacttccaacactatgttgaataggagtggtgagagagggcatccctgtcttgtgccagtttttaaagggaatgcttccagttttttcccattcagtatgatattggctgtgggtttgtcatagatagctcttattattttgaaatacgtcccatcaatacctaatttattgagagtttttagcatgaagagttgttgaattttgtcaaaggccttttccgcatctattgagataatcatgtggtttttgtctttggctctgtttatatgctggattacatttattgatttgcatatattgaaccagccttgcctcccagggatgaagcccacttgatcatggtggataagctttttgatgtgctgctggattcggtttgccagtattttattgaggatttttgcatcaatgttcatcaaggatattggtctaaaattctctttttttgttgtgtctgtgcctggctttggtatcagaatgatgctggcctcataaaatgagttagggaggattccctctttttctattgattggaatagtttagaaggaatggtaccagttcctccttgtacctctggtagaattcgcctgtgaatccatctggtcctggactttttttggttggtaagctattgattattgccacaatttcagctcctgttattggtctattcagagattcaacttcttcctggtttagtcttgggagagtgtatgtgtccaggaatttatgcatttcttctagattttctagtttatttgcgtagaggtgtttgtagtattccctgatggtagtttgtatttctgtgggattggtggtgatatcccctttatcattttttattgcgtctatttgattcttctctctttttttctttattagtcttgctagcggtctatcaattttgttgatcctttcaaaaaaccagctcctggattcattaattttttgaagggttttttgtgtctctatttccttcagttctgctctgattttagttatttcttgccttctgctagcttttgaatgtgtttgctcttgcttttctagttcttttaattgtgatgttagggtgtcaattttggatctttcctgctttctcttgtggacatttagtgctataaatttccctctacagactgctttgaatgcatcccagagattctggtatgttgtgtctttgttctcgttggtttcaaagaacatctttatttctgccttcatttcgttatgtacccagtagtcattcaggagcaggttgttcagtttccatgtagttgagcggtattgagtgagattcttaatcctgagttctagtttgattgcactgtggtctgagagatagtttgttataatttctgttcttttacatttgctgaggatttcttcacttccaactaagtggtcagttttggaataagtgccatgtgatgctgacaaagatatatatgctgttgatttggggtggagagttctttagatgtctattaggtccgcttggtgcagagctgagttcaattcctgggtatccttgctgactttctgtcttgttgatctgtctaatgttgacagtggggtgttaaagtctcccattattaatgtgtgggagtctaagtctctttgtaggtcactcaggacttgctttatgaatcttggtgctcatgtattgggtgcatatatatttaggatagttagctcttcttgttgaattgatccctttaccattatgtaatggccttctttgtctcttttgatctttgttggtttaaagtctgttttatcagagactaggattgcaaccccttccttttttggttttccattggcttggtagatcttcctccatccttttattttgagcctatgtgtgtctctgcatgtgagatgggtttcctgaatacagcacactgttgggtcttgactctttatccaatttgccagtctgtgtcttttaattggagcatttagtccatttacatttaaagttaatattgttatgtgtgaatttgatcctgtcattatgatgttagctggtgattttgctcgttagttgatgcagtttcttcctagtcttgatggtctttatattttggcatgattttgcagtggctggtaccggttgttcctttccatgtttagtgcttccttcaggagctcttgtaaggcaggcctggtggtgacaaaatctctcagcatttgcttgtctataaagtattttatttctccttcacttatgaagcttagtttggctggatatgaaattctgggttgaaaattcttttctttaagaatgttgaatattggcccccactctcttctggcttgtagggtttctgccgagagatctgctgttagtctgatgggcttccctttgagggtaacccgacctttctctctggctgcccttaacattttttccttcatttcaactttggtgaatctgacaattatgtgtcttggagttgctcttctcgaggagtatcttcgtggcattctctgtatttcctgaatctgaacgttggcctgccttgctagattggggaagttctcctggataatatcctgcagagtgttttccaacttgattccattctccacatcactttcaggtacaccaatcagacgtagatttggtcttttcacatagtcccatatttcttggaggctttgttcatttctttttattcttttttctctaaacttcccttctcgcttcatttcattcatttcatcttccatcgctgataccctttcttccagttgatcgcatcggctcctgaggcttctgcattcttctcgtagttctcgagccttggttttcagctccatcagctcctttaagcacttctctgtattggttattctagttatacattcttctaaatttttttcaaagttttcaacttctttgcctttggtttgaatgtcctcccgtagctcagagcaatttgatcgtctgaagccttcttctctcagctcgtcaaagtcattctccatccagctttgttccgttgctggtgaggaactgcgttcctttggaggaggagaggtgctctgctttttagagtttccagttcttctgttccgttttttccccatctttgtggttttatctacttttggtctttgatgatggtgatgtacagatgggtttttggtgtggatgtcctttctgtttgttagttttccttttaacagagaggaccctcagctgcaggtctgttggagtacccggccgtgtgaggtgtcagtgtgcccctgctggggggtgcctcccagttaggctgctcggggatcaggggtcagggacccacgtgaggaggcaatctgcccgttctcagatctccagctgcgtgctgggagaaccactgctctcttcaaagctgtcagacagggacatttaagtctgcagaggttactgctgtctttttgtttgtctgtgccctgcccccagaggtggagcctacagaggcaggctggcctccttgatctgtggtagtctccacccagttggagcttcccggctgctttgtttacctaagcaagcctgggcaatggagggcgcccctcccccagcctcgctgccgccccgcagctccatctcagagtgctgtgctagcaaccagtgagactccgtgggcgcaggaacctccgagccaggtgcgggatacaatctcgcggtgcgccgctttccaagcccgtcggaaaagcgcagtattcgggtgggagtgacccgattttccaggtgccgtccgtcacccctttctttgactcagaaagggaactccctgaccccttgcgcttcccaagtgaggcaatgcctcgtcctgcttcgggtcgcgcacggtgcgcacacccactgacctgcgcccactgtctggcactccctagtgagatgaacccggtacctcagatggaaatgcagaaatcacccgtcttctgcgtcgcttactctgggagctgtagaccggagctgctcctattcggccatcttggctcctcctcctc

SEQ ID NO: 10604 - DNA, 5483 bp, Homo sapiens
atcttttttttaaattttattattattatactttaagttttagggtacatgtgcacaatgtgcacgtttgttacatatgtatacatgtgccatgttggtgtactgcacccattaactcgtcatttagcattagatatatctcctaatgctatccctcccccctccccccaccccacaacagtcaccggagtgtgatgttccccttcctgtgtccatgtgttctcattgttcagttcccacctatgagtgagaacatgcggtgtttggttttttgtccttgtgatagtttgctgagaatgatggtttccagtttcatccatgtccgtataaaggacatgaactcatcgttttttatggctgcatcgtattccatggtgtatatgtgccacattttcttaatccaatctatcgttgttggacatttgggttggttccaagtctttgctattgtgaatagtgccgcagtaaacatacgtgtgcatgtccctttatagcagcatgatttataatcctttgggcccagtaatgggatggctgggtcaaatggtatttctagttctagatccctgaggaatcgccacaccgacttccacaatggttgaactagtttacagtcccaccaacagtgtaaaattgttcctatttctccacatcctctccagcacctgttgtttcctgactttttaatgatcgccattctaactagtgtgagatggtatctcattgtggttttgatttgcatttctctgttggccagtgatgatgagcattttttcatgtgttttttggctgcataaatgtcttcttttgagaagtgtctgttcatatcctttgcccactttttgatggggttgtttgtttttttcttgtaagtttgtttgagttcattgtagattctggatattagccctttgtcagatgagtaggttgcaaaaatgttctcccattctgtaggttgcctattcactctgatggtagtttcttttgctgtgcagaagctctttagtttaattagatcccatttgtcaattttggcttttgttgccattgcttttggtgttttagacatgaagtccttgcccatgcctatgtcctgaatggtattgcctaggttttcttctagggtttttatggttttaggtctaacatttaagtctttaatccatcttgaattaatttttctataaggtgtaaggaagggatccagtttcagctttctacatatggctagccagttttcccagcaccatttattaaatagggaatcctttccccattgcttgtttttctcaggtttgtcaaagatcagatagttgtagatatgcagcattatttctgagagctctgttctgttccattgatctatatctctgttttggtaccagtaccatgctgttttggttactgtagccttgtagtatagtttgaagtcaggtagcgtgatgcctccagctttgttcttttggcttaggattaacttggcgatgcgggctcttttttggttccatatgaactttaaagtagtttttttccaattctgtgaagaaagtcattggtagcttgatggggatggcattgaatctataaattaccttgggcagtatggccattttcacgatattgattcttcctacccatgagcatggaacgttcttctatttgtttgtatcctcttttatttcattgagcagtggtttgtagttcttcttgaagaggtccttcacatcccttgtaagttggattcctaggtattttattctctttgaagcaattttgaatgggagttcacttatgatttggctttctgtttgtctgttattggtgtataagaatgcttgtgatttttgtacgttgattttgtatcctgagactttgctgaagttgcttatcagcttaaggagattttgggctgagacaatggggttttctagatatacaatcatgtcatctgcaaacagggacaatttgacttcctcttttcctaatcgaataccctttatttccttctcctgcctaattgccctggccagaacttccaacactatgttgaataggagtggtgagagagggcatccctgtcttgtgccagttttcaaagggaatacttccagtttttgcccattcagtatgatattggctgtgggtttgtcatagatagctcgtattattttgaggtatgtcccgtcaatacctaatttattgagagtttttagcatgaagcattgttgaattttgtcaaaggccttttctgcatctattgagataatcatgtggtttttgtctttggttctgtttatatgctggattacatttattgattttcatatgttgaaccagccttgcatcccagggataaagcccacttggttatggtggataagctttttgatgtgctgctggattcggtttgccagtattttattgaggatttttgcatcaatgttcatcaaggatatcggtctaaaattctcttttttggttgtgtctctgccaggctttggtatcaggatgatgctggcctcataaaatgagttagggaggattccctctttttctattgattggaatagtttcagaaggaatggtaccagctcttccttgtacctctggtagaattcggctgtgaatccatctggtcctggactctttttggttggtaagctattgattattgccacaatttcagatcctgttattggtctattcagagattcaacttcttcctggtttagtcttgggagggtggatgtgtcgaggaatttatccatttcttctagattttctagtttatttgcgtagaggtgtttgtagtattctctgatggtagtttgtatttctgtgggatcggtggtgatatcccctttatcattttttattgcgtctatttgattctttcctcttttcttctttattagtcttgctaacagtctatcaattttgttgatcttttcaaaaaaccagctcctggattcattgattttttgaagggttttttgtgtctctgtttccttcagttctgctctgattttagttatttcttgccttctgctagcttttgaatgtgtttgctcttgcttttctagttcttttaattgtgatgttagggtgtcaattttggatctttcctgctttctcttgtgggcatttagtgctataaatttccctctacacactgctttgaatgtgtcccagagattctggtatgttgtgtctttgttttcattggtttcaaagaacatctttatttctgccttcatttcgttatgtacccagtaatcactcaggagcaggttgttcagtttccatgtagttgagcggttttgagtgagtttcttaatcctgagttctagttttattgcactgtggtctgagagacagtttgtcataatttctgttcttttacatttgctgaggagtgctttacttccaactatgtggtcagttttggaataggtgtggtgtggtgctgaaaagaatgtatattctgttgatttggggtagagagttctgtagatgtctattaggtcagcttggtgcagagctgagttcaattcctgggtatccttgttaactttctgtctcgttgatctgtctaatgttgacagtggggtgttaaagtctcccattattattgtgtgggagtctaagtctctttgtaggtcactcaggacttgctttatgaatctgggtgctcctgtattggatgcatatatatttaggatagttagctcttcttgttgaattgatccctttaccattatgtaatggccttctttgtctcttttgatctttgctggtttaaagtctgttttatcagagactaggattgcaacccctgcctttttttgttttccatttgcttggtagatcttcctccatccctttattttgagcctatgtgtgtctctgcatgtgagatgggtttcctgaatacagcacactgatgggtcttgactctatccaatttgccagtctgtgtcttttaattggagcatttagcccatttacatttaaagttaatattgttatgtgtgaatttggtcctgtcattatgatgttagctggttattttgctcattagttgatgcagtttcttcctagccttgatggtctttacattttggcatgtttttgcagtggctgataccggttgttcctttccatgtttagtgcttccttcaggagctcttttagggcaggcctggtggtgacaaaatctctcagcatttgcttgtctgtaaaggattttatttctccttcacttatgaagcttagtttggctggatatgaaattctgggttgaaaattcttttctttaagaatgttgaatattggcccccactctcttctggcttgtagagcttctgccaagagatctgctgttagtctgatgggcttccctttgtgggtaacccaacctttctctctggctgcccttaacattttttccttcatttcaactttggtgaatctgacaattatgtgtcttggagttgctcttcttgaggagtatctctgtggcgttctctgtatttcctgaatctgaatattggcctgcattgctagattggggaagttcttctgggtaatgtcctgcagagtgttttccaacttggttccattctccccgtcactttcaggtacaccaatcagatgtagatttggtcttttcacatagtcccatatttcttggaggccttgttcgtttctttttattcttttttctctaaacttcccttcttgcttcatttcattcatttcatcttccatcactgataccctttcttccagttgattgcattggctcctgaggcttctgcattctttacgtagttctcgagccttggctttcagctccatcaggtcctttaaggacttgtctgcattggttattctagttatccattcatctaatttttttttcaaagtttttaacttctttgccattggtttgaatttcctcctgtagcttggagtagtttgatcgtctgaagccttctctcaacttgtcaaagtcattctccgtccagctttgttccgttgctggtgaggagctgtgttcctttggaggaggagaggtgctctgctttttagagtttccagtttttctgctctgttttttccccatctttgtggttttatctacttttggtctttgatgatggtgacgtacagatgggtttttggtgtggatgtcctttctgtttgttagttttccttctaacagataggaccctcagctgcacgtctgttggagtttgctagagatccactccagatgctgtttgcctgggtatcagcagtggtggctgcagaacagcggtggctgtagaacagcggatattggtgacctgcaaatgctgctgcctgatcattcctctggaagttttgtctcagaggagtacctggctgtgtgaggtgtcagtctgcccctactggggggtgccctcccagttaggctgcttgggggtcagggacccact

SEQ ID NO: 10605 - DNA, 5583 bp, Homo sapiens
gtttttatttttatttatttatttttttattattattatactttaaattttaggatacatatgcacaacgtgcaggtttgttacatatgtatacatgtgccatgttggtgtgctgcacccattaactcatcatttagcattaggtatacctcctaatgctatccctccccgctccccccaccccacaacagtccctggtgtgtgatgttccccttcctgtgtccatgtgttctcattgttcaattcccacctatgagtgagaacatgcggtgtttggtttttttgtccttgcgatagtttgctgagaatgatggtttccagcttcatccatgtccctacaaaggacatgaactcatcattttttatggctgcatagtattccatggtgtatatgtgtcacattttcttaatccagtccatcattgttggacatttgggttggttccaagtctttgctattgtgaatagtgctgcaataaacgtacatgtgcatgtgtatttatagcagcatgatttataatcctttgggtatatgcccagtaataggatggctgggtcaaatcgtatttctagttctagatccctgaggaatcgccacactgacttccacaatggttgaactagtttacagtcccaccaacagtgtaaaagtgttcctatttctccacatcctctccagcacctgttgtttcctgactttttaatgatctccattctaactggtgtgagatggtatcgcattgtggttttgatttgtatttctctgatggccagtgatgatgaacattttttcatgtgttttttggctgcataaatgtcttcttttgagaagtgtctgttcatatcctttgcccactttttgacggggttgtttgtttttttcttataaatttgtttgagttcattgtagattctggatattagccctttgtcagatgagtaggttgcaaaaattttctcccattctgtaggtttcctgttcactctgatggtggtttcttttgctgtgcagaagctctttagtttaattagatcccatttgtcaattttggcttttgttgccattgcttttggtgttttagacatgaagtccttgcccatgcctatgtcctgaatggtattgcctaggttttcttctagggtttttatggttttaggtctaacatttaagtctttaatacatcttgaattaatttttgtataaggtgtaaggaagggatccatttcagctttctacatatggctagccagttttcccagcagcatttattaaatagggaatcctttccccattgcttgtttttgtcaggtttgtcaaagatcagatagttgtagatatgcagcattatttctgagggctctgttctgttccattggtctatatctctgttttggtacgagtaccatgctgttttggttactgtagccttgtagtatagtttgaagtcaggtagcatgatgcctccagctttgttcttttggcttaggattgacttggtgatgtgggctcttttttggttccatatgaactttaaagtagttttttccaattctgtgcagaaagtcattggtagcttgatggggatggcattgaatctataaattaccttgggcagtatggctattttcacgatattgattcttcctacccacgagcatggaatgttcttccatttgtttgtatactcttttatttcattgagcagtcgtttgtagttccccttgaagaggtccttcatgccccttgtaagttggattcctaggtattttattcttttgaagcaattgtgaatgggagttcaactcatcatttggctctctgtttgtctgttattgatgtataagaatccttgtgatttttgcacattgattttgtatcctgagactgctgaagttgcttatcagcttaaggagattttgggctgagacaatggggttttctagacattcaatcatgtcatctgcaaacaggaacaatttgacttcctcttttcctaattgaatgccctttatttccttctcctgcctgattgccctggccagaacttccaacactatattgaataggagtggtgagagagggcatccctgtcttgtgccagttttcaaagggaatgcttccagtttttgtccattcagtatgatattggctgtgggtttgtcatagatagctcttattattttgagatacgtcttatcaatacctaatttattgagaatttttagcgtgaagcattgttgaattttgtcaaaggtcttttctgcatctattgagataatcatgtggtttgtgtctttgtttctgtttatatgctggattacgtctattgattttcgtatgttgaaccaggcttgcatcccagggatgaagcccacttgatcatggtggataagctttttgatgtgttgctggatgcggtttgccagtattttattgaggatttttgcatcaatgttcatcaaggatattggtctaaaattctcttttttttgttgcgtctctgcccggctttggtatcaggatgatgctggcctcataaaatgagttagggaggattctctcattttctattcattggaatagtttcagaaggaacggtaccagctcctccttctacctatggtagaatttggctgtgaatccatcttgtcctggacttttttttggttggtaagctcttaattattgcctcaatttcagagcttgctattggtctcttcagagattcaacttcttcctggtttagtcttgggagagtgtatgtgtcaaggaatttatccatttcttctagattttctagtttatttgcatagaggtgtttatagtattctctgatggtagtttgtatttctgtgggatcggtggtgatatcccctttgtcattttttattgcgtctctttgattcttctctcttttcttctttattagtcttgctagcggtctatcaattttgttgatcttctcaaaaaaccagctcctggattcattgattttttgaagggttttttttgtctctatttccttcagttctgctctgatcttagttatttcttgccttctgctagcttttgaatgtgtttgctcttgcttcgctagttcttttaattgtgatgttagggtgtcaattttagatctttcctgctttctcttgtgggtatttagtgctataaatttccctctatgcactgtttttaaagtgtcccagagattctggtatgttgtgcctttgttctcattggtttcaaagaacatctttatttctgccttcatttcgtgtacccagtagtcattcaggagcaggttgttcagtttccatgtagttgagcagttttgagtgagtttcttaatcctgagttctagtttgattgcactgtggtctgagagacagtttgtcataatttctgatcttttacatgtgctgaggagtggtttacttccaactatgtggtcaattttggaataggtgtggtgtggtgctgaaaagaatgtatattctgttgatttggggtggagagttctgtagatgtctattaggtctgcttggtgcagagctgagttcaattcctggatatccttgttaactttctgtctcattgatctgtctaatattgacagtgggctgttaaagtctcccattattattgtgtgggaatctaagtctctttgttggtctgtaaggacttgctttatgaatctgggtgctcctgtattgggtgcatatatatttaggatagttagttcttcttgttgaattgatccctttaccattatgtaatggccttctttgtctcttttgatctttgttggtttaaagtctgttttatccgagactaggattgcaacccctgcctttttttcttttccgtttgcttggtagatcttactccattcctttatttttagcctatgtgtgtctctgcacatgagataggtttcctgaatacagcacactgatgggtcttgactctttatccaatttgccaatctgtgccttttaattggagcatttagcccatttacatttaaggttagtattgttatgtgtgaatttgatcctatcattatgatgttagctggttagtttgctcattagttggtgcagtttcttcctagccttgatggtctttacaatttggcatgtttttgcactggctggtaccggttgttcctttccatgtttagtgcttccttcaggagctcttttagggcaggcctggtggtgacaaaatctctcagcatttgcttgtctgtaaagtattttatttctccttcacttatgaagcttagtttggctggaaatgaaattctagcttgaaaattcttttctttaagaatgttgaatattggcctccactctcttctggcttgtagagtttctgccgagagatcagctgttagtctgatgggcttccctttgtgggtaacccgacctttctctctggctgcccttaacattttttccttcacttcaactttggtgaatctgacaattacgtgtcttggagttgctcttctcgaggagtatctttgtggcattctctgtatttcccgaatttgaatgttggcctgccttgctagattggggaagttctcctggataatatcctgcagagtgttttccaacttggttccattctccctgtcactttcaggtacaccaattagacgtagatttggtcttttcacatagtcccatatttcttggaggctttgtttgtttctttttattctttttcctctaaacttctcttcacacttcatttcattcatttcatcttccatcgctgataccctttcttccagttgatcgcatcagttactgaggcttgtgcattcatcacgtagttctggtgccttggttttcagctccatcagttcctttaagtacttctctgcattgcttattctagttagccattcatctaatttttttttcaaagtttttaacttctttgccattggttagaacttcctcctttagctcggagtagtttgatcttctgaagccttcctctctcaactcgtcaaagtcattctccatccagctttgttccattcctggtgaggagctgcgttcctttggaggaggagaggcgctctgatttttagagtttctggtttttctgctgttttttcccatctttgtggttttatctacctttggtctttgatgatggtgacgtacagatggatttttggtgtggatgtcctttctgttttttagttttccttctaacagtcaggaccctcagctgcaggtctgttggagtttactggaggtccactgcagaccctgtttgcctgggtatcagcagcagtagctgcagaacagcggatattggtgaaccgcaaatgctgctgcctgatcattcctctggaatttttgtctcagaggagtacccggccgtgtgaggtgtcagtctgcccctactggggggtgtctcccagttaggctactcgtgggtcagggacccacttgaggaggcactctgctcattctcagatctcaagctgcatgctgggagaaccactactctcttcaaagctatcagacagggacatttaagactgcagaggttat

SEQ ID NO: 10606 - DNA, 7185 bp, Homo sapiens
ttccagtttgggataattatgaatgaagctattgtgaacatttgtttacaagtgtttttatggccatgttttcatttctcttgggtaaatacctataatggaattgctgaattatatagcaattagtgtatgattaactttataggaaatatatatggttagtgtatgattaactttataagaaaccgccagacaaatttgccagagtggttgttaagtgtctcatcccactaacaatggagaagagttcccattgctctacatcctcatcaacacttaaaatggtgaaaacgctttaaattgttaatattttggtcattttaataggtatgtaatggcatttcattgtgattgtaacttgtacttctctaatgagtaatgttgttgagtatactttttcatgtgtttcttggccatttgaatattatcttttgtgacaaatattgcaaacatggtagctgaagacaaattatttactttgctcacaaaatggcaatttgatcagagctcgttgaagacaactaaatgtctgctctgcatggcatcagccagggcaacttgaaggctgagggtaattcaacagccgggaactgaaatcatctgaagactcactcattcctgtgtctgaagttgatgctggccctcagctggatctcgagggaggccattggccagaacacctcctcatggcctctccatgtagcagtttggcctgctgggttccaaaagcatcccaagagaacgaagtggaagttcatggcgtcttatgacctagcttcagtcacagtgttattttcacaatacgctaatggttgaggcagtcactcaggtgcaaggggaggggtcatagccaccacctctcaatggaagaagtgtcagcatcatgtcagggaaaaaaacttgtggaatggaatatactgtggggatatctttggaaaatacaatctgtcacatgtctgtccaaatcttttactcattgctttgtgttgttttcctattatccagttaaaatctttacgttttctggaaatgagtcctttttctgtctgaagcttgacttttcattttcttcatggtgtctcagaaagagtaaacattttttcatttgaacgaagcccatctatcgattttgtcttttaaggtagtactttttgtttcctgcctaaaacatttgtgcctaccccaggctcttcaatattttcttgtataatttttttagtttcagtgtttatgtctagatttctaattcatttcaagtgaactttttttttattactatactttaagttttacggtacatgtgcacaatgtgcaggttagttacatatgtatacatgtgccatgttagtgtgctgaaccctgtaactcatcatttaacattaggtatatctccaaatgctatccctccctcataacccaccgacaacaggccctggtatgtgatgttccccttcctgtgtccaagtgttctcattgttcaattcccacctatgagtgagaacatgtggtgtttggttttttgtccttgcaatagtttgctgagaatgatggtttccagctccatccatgtccctacaaaggacatgaactcatcattttttatggctgcatagtattccatgctgtatatgtgccccatattcttaatccagtctattgttgttggacatttgggttggttccaagtctttgctattgtgaatagtgccacaataaacatacatgtgcatgtgtctttatagcagcatgatttataatcctttgggtatatacccagtaatgggatggctgggtcaaatggtatttctagttctagatccctgaggaatcaccacactgacttccacaatggttgaactagtttacagtcccaccaacagtgtaaaagtgttcctgtttctccatatcctctccagcacctgttttttcctgactttttaatgattgccattctaactggtgtgagatggtatctcattgtggttttgatttgcatttctctgatgtccagtgatgatgagcattttttcatgtgtcttttggctgtataaatgtcttcttttgagaaatgtctgttcatatccttcgcccacttgttgatgggcttgtttttttcttgtaaatttgtctgagttcattgtagattctggatattagccctttgtcagatgagtagattgcaaaaattttctcccattctgtaggttgcctgttcactctgatgatagtttcttttgctgtgcagaagctctttagtttcattagatcccatttgtcaattttggcttttgttgccattgcttttggtgttttagacatgaagtccttgcccatgcctatgtcctgaatggtattgcctaggttttcttctagggtttttatggttttaggtctaagatttaagtctttagtccatcttgaattaatttttgtataaggtgtaaggaagggatccagtttcagctttctccatatggctagccagttttcccagcactaattattaaatagggaatcgtttccccatttcttgtttttgtcaggtttgtcaaagatcagatggttgtagatatgcggcattatttctgagggctctgttcggttccattgctctatatctctgttttggtaccagtaccatgctgtcttggttactgtagccttgtagtatagtttgaagtcaggtagcgtgatgcctccagctttgtccttttggcttaggattgacttggcgatgcgggctcttttttggttccatatgaactttaaagtagttttttccaattctgtgaagaaagtcattggtagcttgatggggatggcattgaatctataaattaccttgggcagtatggctgttttcacgatattgattcttcctacccgtgagcatggaatgttcttccatttgtttgtatcctcttttatttcgttgagcagtggtttgtagttctccttgaagaggtccttcacatctcttgtaagttggattcctaggcattttattctctttgaagcaattgtgaatgggagttcactcacgatttggctctctgtttgtctgttattggtgtataagaatgcttgtgatttttgcacattgattttgtatcctgagactttgctgaagttgcctatcagcttaaggagattttgggctgagacaatggggttttctaaatatacaataatgtcatctgcaaacagggacaattggatttcctcttttgctaattgaataccctttatttccttctcctgcctgattgccctggccagaacttccaacactatgttgaataggagtggtgagagagggcatccctgtcttgtaccagttttccaagggaatgcttccagtttttgcccattcagtatgatattggctgtgggtttgtcatagatagctcttattattttgagatacatcccatcaataccgaatttattgagagtttttagcatgaagggctgttgaattttgtcaaaggccttttctgcatctgttgagataatcatatggtttttgtctttggttctgtttgtatgctggattacatttattgatttgtgtctgttgaaccagccttgcatcccagggatgaagccctcttgatcatggtggataagctttttgatgtgctgctggattcggattgccagtattttagtgaggatttttgcatcaatgttcatcagggatattggtctaaaattctctttttttgttgtgtctctgctaggctttggtatcaggatgatgctggcctcataaaatgagttagggaggattccctctttttctattgattggaatagtttcagaaggaatggtaccagctcctccttgtacctctggtagaattcggctgggaatccatctggtcctggactttttttggttggtaagctattaattattgcttcaatttcagagcctgttattggtctattcagagattcaacttcttcctggtttagtcttcggagggtgtatgtgtcgaggaatttatccatttattctagattttctagcttatttgcatagagatgtttatagtattctctgatggtagtttgtatttctgtgggatcggtggtgatatcccagttatcattttttattgcgtctatttgattcttctctcttttcttctttattagccttgctagcaatctatcgattttgttgatcttttcaaaaaaccagctcctggattcattgatttttttgaaggtttttttgagtctctatttccttcagttctgctctgatcttagttatttctcaccttctgctagcttttgaatgtgtttgctcttgcttctctagttcttttaattgtgatgttagggtgtcaattttagatctttcctgctttctcttgtgggcatttagtgctataattttccctctacatactgctttgaatgtgtcccagagattctggtatgtcgtgtctttgttctcattggtttcaaagaacatctttatttctgccttcatttcgttatgtacccagtagtcattcaggagcaggttgttcagtttccaagtagttgagcgattttgagtgagtttcttaatcctgagttctagtttgattgcactgtgttctgagagacagtttgttataatttctgttcttttacatttgctgaggagtgctttagttccaactatgtggtcaattttggaataagtgcggtgtggtgctgagaagaatgtatattctgttgatttggcgtggagaattctgtagatgtctgttaggtctgcttggtgcagagctgagttcaattcctggatattcttgctaactttctgtctcattgatctgtctaatgttgacagtggggtgttaaagtatcccattattattgtgtgggagtctaagtctctttccaggtctctaaggacttgctttatgaatctgggtgctcctgtattgggtgcatatatatttaggatagttagctcttcttgttgaattgatccctttaccattatgtaatggccttctttgtctcttttgatctttgttggtttaaagtctgttttatgagagactaggattgcaacccctgcctttttttgttttccatttgtttggtagatcttcctccatccctttattttgagcctatatgtgtctctgcatgtgagatgggtctcctgaatacagcacactgatgggtcttaactctttatccaatttgccagtctgtgtcttttaattggagcatttagcccatttacatttaaggctaatattgttatgtgtgaatttgatcctgccattatgatgttagctggttattttgcttgttagtggatgcagtttcttcctagcctcaatggtctttacaatttggcatgctttttcagtggctggtaccagttgttcctttccatgtttagtgcttccttcaggagctcttgtagggcaggcctggtggtgacaaaatctctcatcatttgcttgtctataaaggattttatttctccttcatttatgaagcttagtttggctggatattaaattctgggttgaaaattcttttctttaagaatgttgaatattggcccccactctcttctggcttgtagtgtttctgctgagaggtcagctgttagtctgctgggcttccctttgtgggtaacccgacctttctctctggctgcccttaacattttttccttcatttcaactttggtgaatctgacaattatgtgtcttggagttgctcttctggaggagtatctttgtggcattctctgtatttcctgaatttgaatgttggcctgccttgctagattggggaagttctcctgtatgatatcctgcagagtgttttccaacttggttccattctccctgtcactttcaggtacaccaatcagacgtagatttggtcttttcacatactcccatatttcttggaggctttgttcatttctttttattcttttttctctaaacttctcttctcgcttcatttcattcatttgatcttccatcactgatagcctttcttccagttgatctaatcggctactgaggcttatgcatttgtcatgtagttctcgtgccttgtttttcagctccatcaggtcctttaaggacttctccgcattggttattctagttagccattcgtctaattttttttcaaggtttttaacttctttgacatgggtttgaacttccacctttagctctgagtagtttgatcgtctgaagccttcttctctcaactcatcaaagtcattctctgtccaactttgttccattgctggtgaggagctgcgttcctttggaggaagagaggcactctgatttttagaatttccagtttttctgctctgttttttccccatctttgtggttttatctacctttggtctttgatgatggtgacgtacagatggggttttggtgtggatgtcctttctgttttttagttttccttctaacagtcaggaccttcagctgcaggtctgttggagtttgctggaggtccactccagaccccgtttgcctgggtatcagcagcggaggctgcagaacagcggatattggtgaacatcaaatgttgctgcctgatcatgcctctggaagttttgtctcagaggagtacccggccatgtgaggtgtcagtctgcccctactaggaggtgcctcccagttacgctactcgggggtcaaggacgtgcttgaggaggcagtctgtccattctcagatctccagctgcgtgctaggagaacctctactctcttcaaagctgtcagacagggacatttaaatctgcagaggattctgctgccttttgtttggcaatgccctgcccccagaggtggagtctacagaggcaggcaggcctccttgagctgcggtgggctctacccagtttgagcttccaggctgctttgtttacctagtcaagcctcagcaatggcaggcacccctcccccagcctcgctgctgccttgcagtttgatctcagactgctgtgctagcaatgagtgaggctccgtgggcataggaccctccaagccaggcacgggatataatctcttgctgtgccgtttgctaagacagttggaaaagcaccatattggggtgggagtgacttgattttccaggtgccatccatcacccctttctttgactaggaaaggg

SEQ ID NO: 10607 - DNA, 6041 bp, Homo sapiens; identical to SEQ ID NO: 10493

SEQ ID NO: 10608 - DNA, 4726 bp, Homo sapiens
atattttattctcttattttttgtactttaagttctagggtacatgtgcacaatgtgcaggtttgttacatatgtatacacgtgccatgttggtatcctgcacccattaacttgttatttacattaggtatttctcctaatgctatccctccccactaacccactccacgacaaggccctggtgtgtgacattccccttcctgtgtccaagtgttcttattgttcaattccccccatgagtgagaacatgaggtgttttgttttctgtccttgttatggtttgctgagaatgatggtttccagcttcatccatgtccctacaaaggacatgaactcatccttttttatggctgcatagtattccatggtgtatatgtgccacattttcctaatccagtctatcattgatggatatttgggttgttccaagtctttgctattgtgaatagtgccgcaataaacatatgtgtgcatgtgtctttatagtagcataatttataatcctttgggtatatacccagtaatgggattgctgagtcaaatagtatttctagttctagatccttgaggaattatcacactgtcttccacgatggctgaactagtttacagtcccaccaacagtgtaaaagcattcctatttctccacatcctctccagcacctgttgtttcctgactttttaatgatcaccatcctaactggtgtgagatggtatctcattgtggttttgatttgcatttctctgatggccagtgatgatgagcattttttcatgtgtcttttggctgcataaatgtcttcttttgagaagtgtctgttcatatcctttgcccactttttgtgtgatggggttgtttgattttttcttgtaaatttgtttgagttctttgtagattctggatattagccctttgtcagatgggtagattgcaaaaatttactcccattctgtaggttgcctgttcactctgatggtagtttcttttgctgtgcagaagctctttagtttaattagatcccatttgtttattttggcttttgttgtcattgcttttggtgttttagtcatgaagtccttgtccatacctatgtcctgaatggtattgcctaggttttgttctagggtttttatggttttaggtctaacatttaagtctttcatccatcttgaattaatttttgtataaggtgtaagggagggatccagtttcagctttctacatatggctagccagttttctcagcaccatttattaaatagggaatcctttccccatttcttgtttttgtcaggtttgtcaaagatcaaatggttgtagacgtgtggtattatttctgagggctctattctgttccattggtctatatctctattttggtgccagtaccatgctgtttcagttactgtagccatatagtatagtttgaagtcaggtagcatgatgcctccagctttgttcttttggcttaggattgtcttggcaatgcaggctcttttttggttccatatgaactttaaagtagtcttttccaattctgtgaataaagtcattggtagcttgagggggatggcattgaatctataaattaccttgggcagtagggccattttcatgatattgattcttcctatccatgagcatggaatgttcttccatttgtttgtgtcctcttttattttgttgagcagtggtttgtagttcttcttgaggaggtccttcacatcccttgtaagttggattcctaggtattttattctctttgtagcaattgtgaatgggagttccctcatgatttggctctctgtctgttactgatgtataggaatgcttgtgatttttgcacattgattttgtatcctgagactttgctgaagttgcttatcagcttaaggagattttggactgagacgatggggttttctaaatatacaatcatgtcatctgcaagcagggacaatttgacttcctcttttcctaattgaataccctttatttgtttctcttgcctgattgccctggccagaacttccaacactatgttgaatagaagtggtgagagagggcatccctgtcttgtgccagctttaaaagggaatgcttccagtttttgcccattcaatatgatattggctgtgggtttggcataaacagctcttattattttgagatacgtcccatcaatacctagtttattgagagtttttagcatgaagggctgttgaattttgtcgaaggccttttctgcatctattgagataatcacatggtttttggctttggttctgtttatgtgatggattacatttattgattttcatatgttgaacaagccttgtatcccagggatgaagccaacttgttcttggtggataagctttttgatgtgctgctcgatttggtttgcctgtattttattgaggattttcgcatcgatgttcatcagggatattggtctaaaattctctttttttgtcatgtctctgccaggctttggtatcaggataatgcttgcctcataaaatgagttagggatgagtccctctttttctattgtttggaatagtttcagaagaaatcggactagctcctctttgtacctgtggtagaattctgctgtgaatccgtctggtcctggactttttttggttggtaggctattaattattgcctcaatttcagagcctgttattggtctattcagggattcaacttcttcccagtttaatcttaggagagtgtatgtgtccaggaatttatccatttcttctagattttctagtttatttgcatagaggtgtttatagtattctctgatggtagtttgcatttctgtgggatcggtggtgatatcccctttatcatttttcattgcatctgtttgattagtctctattttcttctttattagtcttgctggtgatgtatcaattttgttgatcttttcaaaaaagccagcgcctggattcattgattttttgaatggttttttgtgtttctgtctccttcagttctgctctgatcttagttatttcttgccttctgctagcttttgaatgtgtttgctcttgcttctctagttcttttcattgtgatgttaggatgtcgattttagatctttcctgctttcccttgtgggcatttagtgctataaatttccctctacacactgctttaaatgcgtcccagagattctggtatgttgtgtctttgttctcattggtttcaaagaacatctttatttctgccttcattttgttatttacccagtagtcattcaggagtaagttgttcagtttccatggtagttgtgcagttttgaatgaggttcttaatcctgagttctaatttgattgcactgtggtttgagagacagtttgttgtgatttctgttcttttacatttgctgaggagtgctttacttccaactttgtggtcaattttggaataagtgtgatttggtgtctaatgatgactttctgtttatttggggtggtattgtctgtagatgtctattaagatctccttggtccagagctgagttcaagtcctggatatccttgttaaccttctgtctcattgatctgtctaatattgacagtggggtgttaaagtctcccattattattgtgtgggagtctaagtcttttttttgtctctaaggacttgctttatgaatgtgggtgctcctgtattgggtgcatatatatttaggatagttagctcttcttgttgaattgacccctttaccattatgtaatggccttctttgtctttgttgatctttgttggtttaaagtctgttttatcagagactaggattgcaactgctgcttttttttttgctttacatttgcttggtagatcttcctccatccctttattttgagcctgtgtgcgtctctgcatgtgagattggtctcctgaatacagcacacttgatgggtcttgactctttatccaatttgccagtctgtgtctaatttaattggggcatttagcccatttacatttaaggttaatattgttatgtgtgaatttgatcctgtcatgatgttagctggttattttgcccattagttgatgcagtttcttcctagcatcgatggtctttacaatttggcatgattttgcagtggctggtaccagttgttcctttccatgtttagcgcttccttcaggagctcttgtaaggcaggcctggtggtgacaaaatctctcagcatttgcttgtctgcaaaggattttatttctccttcaattatgaagcttagtttggctggatatgaaattctaggttgaaaattcttttctttaagaatgataaatattggcccccactctcttctggcttgtagagtttctgccaagagatctgctgttagtctgatgggattccctttgcgggtaacccgacctttctctctggctgcccttaacattttttccttcatttcaaccttggtgaatctgacaattatgtgtcttgggattgtttttctcgaggagtatctttgtggtgttctctgtatttcctgaatttgaatgttggcctgccttactaggttggggaagttctcctggataatatcctgaagagtgttttccaacttggttccattctccccgtcagtgtcaggtacaccaatcagacgtagatttggtcttttcacatagtcccatatttcttggaggctttgtttgtttctttttagccttttttct

SEQ ID NO: 10609 - DNA, 9663 bp, Homo sapiens
cggtttttttttttttttttttttttttttttttttttggtaaacatagggtctcgccatgttgcctaggccatacttgaactcctgggctcaaccaatcctcccaccttggcctttcaaagtgctaggattatagtactgtaagccaccacacacagccccagctgggattttgattgggattgctttgaatctatagatcaatttgggaaaactgatatatcctaacaatattgagttttctaacacatgaacatggcatatatctgcatttatttagacctttaaaaatttctttcagccatgtttcaaggttttgtggctttcagtgcagaggtcttatacatctttcattatagattactaggcatttgatggattttgatgctatcaaaaattgtattttaaaggtcactttccaataatttcttgctagtatacagaaatataattaattatttatatataaacctgtatccaacaaccatatcaatttactttttttttttttttttttgacagagtctcgttctgtcgcccaggctggagtgtggtggcgtgatctcagctcactgcaaccctcacttcctgggttcaagcaattcttctacctcagcctcccgagtagctgggactacaggcacgtgccaccatgcccagctgatttttgtatttttagtagagacggggtttcaccatattggccaggctggtctcgaactcctgacttcatgatccacctgccttggcctcccaaagtgctgagattacaggtgtgagccaccgtgcccagcccaaatttacttatttttaaaactttattccaaatcacagataaagaaaaccatattatatgcatgtctatttgcatatacataatacatactatatatacacacacatacatacagttgttataatgtttgttttgaaaatgtgaatttgttccaacatgattgatatattaggtaacaattaatgtaaattatgtaaattaagtacttgcttatgtgcaatttagtctatgtgaaatagtaagtgaatgcagaaagcagcatctggctgaaccaagctgtataggaatatgcataacacacacatgtgcacaactcaaacttctatccactacctcagttcactgaatgtgttatgggccacactcatccacatctgttgctacaactttccatcagatttcagacaacctcctcccaccacttcacagtatctcacaagctgcagtccttctgatattcacttccataagcaaatgccaggtcttttttaaggtaaatagccatatttattgtagtattcatgtatttttagtcatttaacatatataaaaccatgctgtcattttattaggctcttatcttttttttaatatgtcacagaccaaattttttagtgttataccccaaccccattttttcccgtaagccctgtggtctttattacacaattttggatactgtaataatttttaggcatgcatatgccatgtaacagcaaaactgactaaatatgtaaagtattttcattattgctaatccatatccacgtgaaaaaagttaccaactagaatacagtattgtgcatagttctttttgtctttagccttgcatctaatcaaaacagagtttttcaaagttacttaaatcggcttctttcttcctcacccccttccatgtggctatgtagttcattcgtaatagagtcagattcatttgtcacagtctgaattccatctgggattccctccacatcctgattgatttattttaaaattgtatccggtaaaatctactctttgtggcatatagttctattggttgtgaaaaatgcatagaattgtgtgtccactatcactgctccttatagaacattcattaccctaaagattctctcatgttacccctttatagggaactcctactccaatgtccaacctctggcaatcactgatgtgttttcttttcctatggttttaccttttccaggatatcatataaatggaatcatagccttttggatctgtcttttttcacttggcaaatgcatttaacattcatttacttctgagtagtattccattatagagatgtacagtttgtttatctatttcaggttacatttgttgttggaattatgttgtaagctcctggaaatggtagattggctgggtctctgcagtgttttcaaagtcatggtttagaaattgctccattattctgagttcttcggataggcgaaatgcccttctaatgcatacacagggcaggggttattaaccccactttccagatgagaagattatggctgagaaactaaatgctgttcctacccatagaaacagcaaattaatggagagccaggaccctaatcccacatgttctgattcacaatccactactggaaaacatgtaaaggagaagaatggctatgactagaaggttggaaaatagaacctatttctgaaatagttgatctgaagaagacagagcttaacaaatgctttggaaaccgtcttaaagcatataaagggtttacaactgaagttaaaaaagaacatattgtctttaagaggcagcatggagagagtgatcaattagacctaagatgtgaaatgggttactaggaggcctggaattattccagtataatattgaatggaagtggtgatagtgtatatccatgtttcattccctgacatcagtgagaaagtgttcatattttaccattaaatacaaaataaggagtagtttgttttcaagtaatgtttatcagattgaggaagtgactttctattcctagttcgttgagtgttctcgtcatgaatgggtatggaatttttttcaaatgctttttctgcatctattgagattattatattttcctcttttattttgttaatgtgcactcatttttgaatgttgaattcctgggataagcaatattggtcatgatgcagtatcctttttatatattgctggattcaattttctaaaatgtatttaggatctttgcatctatcatttaagatactggcctgatgccgggtgtggtggtccacgcctgtaatcccagcactttgggaggccgaggcgggcggatcacctgaggtcaggagttcaagaccagccttgccaacatggtgaaaccccatctctactaaaaatacaaaaattagctgggcgtggtggtgcatgcctgtagtcccagctacttgggaggctgaggctggagaatcgctggaacctgggaggcaaatattgcagtaagctgagatcgtgccactgcgctccagcctgggcgacagagtgagacttcatctcaaaaaaacaaaaacaaaaacaaacaaacaaaaaagacactgacactgacttgtatttttctttttagtttttggaatcagagtatgctggcctcataaaatccatgtattacttttttctctattttccataagagatatttgtatgagattgatattatttctttctttttattttattttattattataatactttaagttttagggtacatgtgcacaatgtgcaggttagttacatatgtatacatgtgccatgatggtgtgctgcacccattaactcgtcatttagcattaggtatatctcctaaagctatccctcgcccctccccccaccccacaacagtccccagagtgtgatgttccccttcctgtgtccatgtattctcatcgttcaattcccacctattagggagaacatacagtgtttggttttttgttcttgcaatagtttactgagaatgatgatttccaatttcatccatgtccctacaaaggacatgaactcatcattttttatggctgcatagtattccatggtgtatatgtgccacattttcttaatccagtctatcattgttggacatttgggttggttccaggtctttcctattgtgaatagtgccacaataaacatacgtgtgcatgtgtctttatagcagcatgatttatagtcctttgggtatatacccagtaatgggattgctgggtcaaatggtatttctagttctagatccctgaggaattgccacactgacttccacaatggttgaactagtttacagtcccaccaacagtgtaaaagtgttcctatttctccacatcctctccagcacctgttgtttcctgactttttaatgattgccattctaactggtgtgagatggtatctcattgtggttttgatttgcatttctctgatggccagtgatggtgagcattttttcaatgtgtttattggctgcataaatgtcttcttttgagaagtgtctgttcatgtccttcacccactttttgatggggtttttttttttcttgtaaatttgtttgagttctttgtagattctggatattagccctttgtcagatgagtaggttgtgaaaattttctcccattttgtaggttgcctgttcactctgatggtagtttcttttgctgtgcagaagctctttagtttaattagatcccatttgtcaattttggctttggttgccattgcttttggtgttttagacatgaagtccttgcccatgcctatgtcctgaatggtaatgcctaggttttcctctagagtttttacggttttaggtctaacgtttaagtctttaatccatcgtgaattgatttttgtataaggggtaaggaagggatccagtttcagctttctacatatggctagccagttttcccagcaccatttattaaatagggaatcctttccccattgcttgtttttctcaggtttgtcaaagatcagatagttgtagatatgcggctttatttctgagggctctgttctgttccattgatctatatctctgttttggtaccagtaccatgctgttttggttactgtagccttgtagtatagtttgaagtcaggtagcttgatgcctccaactttgttcttttggcttaggattgacttggagatgcaggctcttttttggttccatatgaactttaaagtagttttttccaattctgtgaagaaagtcattggtagcttgatggggatggcattgaatctataaattaccttgggcagtatggccattttcacgatattgattcctcctacccatgagcatggaatgttcttccatttgtttgtatcctcttttatttccttgagcagtggtttgtagttctccttgaagaggtccttcacatcccttgtaagttggattcttaggtattttattctctttgaagcaattgtgaatgggagttcactcatgatttggctctctgtttgtctgttattggtgtataagaatgcttgtgatttttgtacattgattttgtatcctgagactttgctgaagttgcttatcagcttaaggagattttgggctgagacaatggggttttctagatatacaatcatgtcatctgcaaacagggacaatttgacttcctcttttcctaattgaataccctttatttccttctcctgcctgattgccctggccagaacttccaacactatgttgaataggagtggtgagagagggcatccctctcttgtgccagttttcaaagggaatgcttccgtttttgcccattcagtatgatattggctgtgggtttgtcatagatagctcttattattttgaaatacatcccatcaatacctaatttattgagaatttttagcatgaagggttgttgaattttgtcaatggccttttctgcatctattgagataatcatgtggtttttgtctttggttctgtttatatgctggattacatttattgatttgcatatattgaaccagccttgcatcctagggatgaagcccacttgatcatggtggataagctttttgatgtgctactggattcggattgccagtattttattgaggatttttgcatcaatgttcttcaaggatattggtctaaaattctcttttttggttgtgtctctgcccggctttggtatcagaatgatgctggcctcataaagtgagttagggaggattccctctttttctactgattggaatagtttcagaaggaatggtaccggttcctccttgtacctctggtagaattcggctgtgaatccatctggtcctgggctctttttggttggtaagctattgattattgccacaatttcagagcctgttattggtctattcagtgattcaacttcttcctggtttagtcttgggagggtgtatgtgtcgaggaatttatccatttcttctagattttctagtttatttgcgtagaggtgtttgtagtattctctgatggtagtttgtatttctgtgggatcggtggtgatatcccctttatcattttttattgcatctatttgattcttctctcttttcttccttattagtcttgctagaggtctatcaattttgttgatgctttcagaaaaccagctcctggattcatgaattttttgaaggggtttttgcgtctctatttccttcagttctgctctgattttagttatttcttgccttctgctagcttttgaatgtgtttgctcttgcttttctagttcttttaattgtgatgttagggtgtcaattttagatctttcctgctttctcttgtgggcatttagtgctataaatttccctctacatactgttttgaatgcatcccagagattctggtatgttgtgtctttgttctcgttggtttcaaagaacatctttatttctgccttcgttttgttatgtacccagtagtcattcaggagcaggttgttcagtttccgtgtagttgagcagttttgagtgagtttcttaatcctgagttctagtttgattgcactgtgatctgagagacagtttgttataatgtttgttcttttacatttgctgaggagagctttacttccaagtatgtggtcaattttggaataggtgtggtgtggtgcagaaaaaaatgtatattctgttgatttggggtgaagagttctgtagatgtctattaggtccacttggtgcagagctgagttcaattcctgggtatccttgttaactttctgtctcgttgaactgtctaatatttacagaggggtgttaaagtctcccattattattgtgtgggagtctaagtctctttgtaggtcactcaggagttgctttatgaatcagagtgctcctgtattgggtgcatatatatttaggatagttagctcttcttgttgaattgatccctttaccattatgtaatggccttctttgtctcttttgatctttgttggtttaaagtctgtttgatcagagaataggatcgcaacccctgcctttgtttgttttccatttgcttggtagatcttcctccatccttttattttgagcctatgtgtgtctctgcatgtgagatgggtttcctgaatacagcacattgatgggtcttgactctttatccaatttgccagtctgtgtcttttaattggagcatttagtccatttacaattaaagttaatattgttatgtgtgaatttgatcctgtcattatgatgttagctggttattttgctcgttagttgatgcagtttcttcctagtctcgatggtctttacattttggcatgattttgccgtggctggtcccagttgttcctttccatgtttagtgcttccttcgggagctcttttagggcaggcctggtggtgacaaaatctctcagcatttgcttgtctgtaaagtattttatttctccttcacttatgaagcttagtttggctggacatgaaattctgcattgaaaattcttttctttaagaatgttgaatattggcccccactctcttctggcttttagagtttctgccgagagatcagctgttagtctgatgggcttccctttgtgggtaacccgacctttctctctggctgcccttaacattttttccttcatttcaactttggtgaatctgacaattatgtgtcttggagttgctcttctcgaggagtatctttgtggcgttctctgtatttcctgaatctgaatgttggcctgccttgttagattggggaagttctcctggataatatcctacagagtgttttccaacttggttccattctccccgtcaccttcaggtacaccaatcagatgcagatttggtcttttcacatagtcccatatttcttggaggctttgttcatttctttttattctttcttctctaaacttcccttcttgcttcatttcattcatttcatcttccatcactgacaccctttcttccagttgatcgcatcggctcctgaggcttctgcattcttcacgtagttcttgagccttggctttcagctccatcagctcctttaagcacttctctgtattggttattctagttatatattcgtctaaatttttttcaaagttttcaacttctttgcctttggtttgaatttcctcctgtagctcagagtagtttgattgtctgaagccttcttctctcacctcgtcaaagtccttctccgtccagctttgttccgttgctggtaaggagctgcgttcctttggaggaggagagacgctctgatttttagagtttccagtttttctgctctgttttttccccatctttgtggttttatctacttttggtctttgatgatggtgatgtacagatgggtttttagtgtggatgtcctttctgtttgttagctttccttctaacagacaggaccctcagctgcaggtctgttggagtttgctagaggtccactccagaccctgtttgcctgggtaccagcagcggtggctgcagaacagcggattttcgtgaaccgcaaatgctgctgtctgatcgttccgctggaagttttgtctcagaggagtacccagctgtgtgaggtgtcagtctgcccctactggggggtgcctcccagttaggctgctcgggggtcggtgtcagggacccacttgaggaggcagtctgctgattctcagatctccagctgtgtgctgggagaaccactgctctcttcaaagctgtcagacagggacatttaagtctgcagaggttattgctgtctttgtttgtctgtgccctgcccccagaggtggagcctacagaggcaggcaggcttcctcgagctgtggtgggctccacccagttcaagcttccaggctgctttgtttacctaagcaagcctgggcaatggcaggcacccctcccccggcctcgctgccgccttgcagtttgatctcagactgctgtgctatcaatcagtgagactctgtgggcataggaccctacgagccaggtgcgggatataatctcctggtgcgccattttttaagcccgtcagaaaagcgcagtattggggtgggagtgacccgattttccaggtgccgtctgtcacccctttctttgactaggaaagggaactccctgaaaccttgcacttcccaagtgacgcaatgcctcgccctgcttcagctcactcacggtgcgctgcacccactgtcctgcgcccactgtctggcactccctaatgagatgaacccggtacctcagatggaaatgcagaaatcacccgtcttctgcgtcgctcacgctgggagctgtagaccagagctgttcctatttggccatcttggctcc

SEQ ID NO: 10610 - DNA, 5774 bp, Homo sapiens
tttttctttattattattattattattattattattattatactttaagttgtagggtacatgtgcacaatgtgctggttagttacatatgtatacacgtgccatgctggtgcgctgcacccactaactcatcatctagcattaggtatacctcccaatgctatgcctcccccctccccccacccaacaacagtcctcagagtgtgatgttccccttcctgtgtccatgtgttctcattgttcaattcccacctatgagtgagaatatgcggtgtttggttttttgttcttgcgatagtttactgagaatgatgatttccaatttcatccatgtccctacaaaggacatgaactcatcatttttttatggctgcatagtattccatggtgtatatgtgccacattttcttaatccagtctatcattgttggacatttgggttggttccaagtctttgctattgtgaataatgctgcaataaacatacctgtgcatgtgtctttatagcagcatgatttatagtcctttgggtatatacccagtaatgggatggctgggtcaaattgtatttgtagttctagatccctgaggaatcaccacactgacttccacaatggttgaactagtttacagtcccaccaacagcgtaaaagtgttcctatttctccacatcctctccagcacctgttttttcctgactttttaatgatcgccattctaactggtgtgagatggtatctcattgtggttttgatttgcatttctctgatggccagtgatggcgagcattttttcatgtgttttttggctgcataaatgtcttcttttgagaagtgtctgttcatgtccttcacccactttttgaaggggttgtttgtttttttcttgtaaatttgttggagttcattgtagattctggatattagccctttgtcaggtgagcaggttgcgaaaattttctcccattttgtaggttgcctgttcactctgatggtggtttcttttgctgtgcagaagctctttagtttaattagatcccatttgtcaattttggcttttgttgccattgcttttggtgttttagagatgaagtcctcgcccatgcctatgtcctgaatggtaatgcctgggttttcttctagggtttttatggttttaggtctaacgtttaagtctttaatccatcttgaattgatttttgtataaggtgtaaggaagggatccagtttcagctttctatagatggctagccagttttcccagcaccatttattaaatagggaatcctttccccatttcttgtttttgtcaggtttgtcaaagatcagatagttgtagatatgcggcattacttctgagggctctgttctgttccattggtctatatctctgttttggtacgagtaccatgctgttttggttactgtagccttgtagtatagtttgaagtcaggtagtgtgatgcctccagctttgttcttttggcttaggattgacttggtgatgcgggctcttttttggttccatatgaactttaaagtagtttttttctaattctgtaaagaaagtcattggtagcttgatggggatggcattgaatctataaattaccttgggcaatatggccattttcacaatattgattcttcctacccatgagcatggaatgttcttccatttgtttgtatcctcttttatttccttgagcagtggtttgtagttctccttgaagaggtccttcacatcccttgtaagttggattcctaggtattttattctctttgaagcaattgtgaatgggagttcactcatgatttggctctctgtttgtctgttgttggtgtataagaatgcttgtgatttttgtacattgattttgtatcctgaaactttgctgaagttgcttatcagcttaaggagatttggggctgaaacaatggggttttctagatatacaatcatgtcatctgcaaacagggacaatttgacttcctcttttcctaattgaataccctttatttccttctctgcctgattgccctggccagaacttccaacactatgttgaataggagtggtgagagagggcatccctgtcttgtgccagttttcaaagtaatacttccagtttttgcccattcagtatgatattggctgtgggtttgtcataaatagctcttattgttttgaaatacgtcccatcaatacctaatttattgagagtttttagcatgaagggttgtggagttttgtcaaaagccttttctgcatctattgagataatcatgtggtttttgtctttggttctgtttatatactggattacatttattgatttgcgtatattgaaccagccttgcatcccagggatgaagcctacttgatcatggtggataagctttttgatgtgctgctggatttggtttgccaatattttattgaggatttttgcatcaatgttcatcaaggatattggtctaaaattctcttttttggttgtgtctctgcctggctttggcatcaggatgatgctggcctcataaaatgagttagggaggattctctctttttctgttgattggaatattttcagaaggaatggtaccagttcctccttttacctctggtagaatttggctgtgaatgcatctggtcctggactctttttggttggtaagctattgattattgccacaatttcagatcctgttattggtctattcagagattcaacttcttcctggtttagtcttgggaaagtgtatgtgttgaggaatttatccatttcttctagattttctagtttatttgcgtagaggtgtttgtagtattctctgatggtagtttatatttctgtgggattggtggtgatatcccctttatcattttttattgtgtctatttgattcttctctctttttttctttattagtcttgctagcggtctatcgattttgttgatcctttcaaaaaaccagctcctggattcattgattttttgaagggttttttgtatctctacttccttcagttctgctctgattttagttatttcttgccttctgctagcttttgaatgtgtttgctcttgcttttctagttcttttaattgtgatgttagggtgtcaattttgaatctttcctgctttctcttgtgggcatttagtgctataaatttccctctacacactgctttgaatgggtcccagagattctggtatgttgtgtctttgttctcgttggtttcaaagaacatctttatttctgccttcatttcgttatgtacccagtagtcattcaggagcaggttgttcagtttccatgtagttgagcggttttgagtgagattcttaatcctgagttctagtttgattgcactgtggtctgagagatagtttgttataattactttctttttacatttgctgaggagtgctttacttccaagtatgtggtcaattttggaataggtgtggtgtggtgctgaaaaaaatgtatattctgttgatttggggtggagagttctgtagatgtctattaggtccgcttggtgcagagctgagttcagttcctggatatccttgttaactttctgtctcattgatctgtctaatgttgacagtggggtgttaaagtctcccattattaatgtgtgggagtctaagtctcttggtaggtccctaaggacttgctttatgaatctgggtgctcttgtattgggtgcatatatatttaggatagttagctctttttgtttaattgatccctttaccattatgtaatggccttctttgtctcttttgatctttgttggtttaaagtctgttttatcagagactaggattgcaacccctgccttttttgttttccattttcttggtagatcttcctccatccttttattttgagcctatgtgtgtctctgcacgtgagatgggtttcctgaatacagcgcactgatgggtcttgactctttatccaatttgccagtctgtgtcttttaattggagcatttagtccatttacatttaaagttaatattgttatgtgtgaatttgatcctgtcattatgatgttagctggttattttgctcgttagttgatgcagtttcttcctagtctcgatggtctttacattttggcatgattttgcagtggctggtaccggttgttcctttccatgtttagcgcttccttcaggagctctttcagggcaggcctggtggtgacaaaatctctcagcatttgcttgtctgtaaggtattttatttctccttcacttatgaagcttagtttggctggatatgaaattctggattgaaaattcttttctttaagaatgttgaatattggcccccactctcttctggcttgcagagtttctcccaagagatccgctgttagtctgatgggcttccctttgagggtaactcgacctttctctctggctgcccttaacattttttccttcatttcaactttggtgaatctgacaattatgtgtcttggagttgctcttctcgagaagtatctttgtggcgttctctgtatttcctgaatctgaatattagcctgccttgctagattggggaagttctcctggataatatcctgcagagtgttttccaacttgtttccattctcccgtcactttcaggtacaccaatcagacatagatttggtcttttcacatagtcccatatttcttggaggctttgctcgtttctttttattcttttttctctaaacttcccttcttgcttcatttcattcatctcatcttccatcactgataccctttcttccagttcatcgcatcggctcctgaggcttctgcattcttcacgtagttcttgagccttggttttcagctccatcaactcctttaagcacttctctgtattggttattctagttatacattcttctaaatgtttttcaaagttttcaacttctttgcctttggtttgaatgtcctcccgtagctcagaataatttgatcgtcagaagccttctctcagctcgtcaaagtcattctctgtccagctttgttccgttgctggtgaggaactgcgttcctcagatggaaatgcagaaatcacccatcttctgtgtcgctcacgctgggagctgtagaccgaagctgttcctattcggccgtcttggctcctccctcaaatgtctggatctcgcttctctagttcttttaattgtgatgttagggtgacgattttagatctttcctgctttttcctgtgggcatttagtgctataaatttccctctacacactgccttagctgtgtcccagagattctggtacattgtgtctttgttctcattggtttaaaagaacttactttttttgccttaatttcgttatttacccagtggtcattcaggagcacattgttcatcttccatgtagttgtgtggttttgagtgagtttctaatcttgagttctaatttgattgaactgtttctgagagactgtttgctatgatttccattctttttcatttgctgaggagcgttttacttccaaattatgtggtcgattttagaataagtgctatatgttgctgagaagaatgtatattctgttgacttgaggcagagagttctgtagatgtctattaggtctgcctgctccagagctgaattcaaatcctgaatatgcttgttaattttctgtctcattgatctgtctaatattgacagtggggtgttaaagtctcccactattattgtgtgggagtctaagtctctttgta

SEQ ID NO: 10611 - DNA, 28257 bp, Homo sapiens
  SITE (10735): n equals a,t,g, or c
gtttctttttttaaatttaattttattattattatactttaagttttagggtacatgtgcacaatgtgcaggttagttacatatgtatacatgtgtcatgctggtgtgctgcacccattaactcgtcatttagcattaggtgtatctcctaatgctgtccctccccccttcccctaccccacaacagtccccagagtgtgatgttccccttcctgtgtccatgtgttctcattgttcaattcccacctatgagtgagaacatgcagtgtttggttttttgtccttgcgatagtttactgagaatgatgatttccaatttcatccatgtccctacaaaggacacgaactcatcattttttatggctgcatagtattccatggtgtatatgtgccacattttcttaatccagtctatcattgttggacatttgggttggttccaagtctttgctactgtgaatagtgctgcaataaacatacgtgtgcatgtgtctttatagcagcatgatttatagtcctttgggtatatacctagtaatgggatggtcaaatggtatttctagttctagatccctgaggaattgccacactgacttccacaatggttgaactagtttacagtcccaccaacagtgtaaaagtgttcctatttctccacatcctctccagcacctattgtttcctgactttttaatgattgccattctaactggtgtgagatggtatctcattgtgggtttgatttgcatttctctgatggccagtgatggtgagcattttttcatgtgttttttggctgcataaatgtcttcttttgagaagtgtctgttcatgtccttcacccactttttgatggggttgtttttttcttgtaaatttgtttgagttcattgtagattctggatattagccctttgtcagatgagtaggctgtgaaaatgttctcccattttgtaggttgcctgttcactctgatggtagtttcttttgctgtgcagaagctctttagtttaattagatccatttgtcaattctggcttttgttgccattgcttttggtgttttagacatgaagtccttgcccatgcctatgtcttgaatggtaatgcctaggtttttttctagggtttttatggttttaggtctaacgtttaagtctttaatccatcttgaattaatttttgtataaggtgtaaggaagtgatccagtttcagctttctacatatggctagccagttttcccagcaccatttattaaatagggaatcctttccccattgcttgtttttctcaggtttgtcaaagatcagatagttgtagatatgtggcgttatttctgagggctctgttctgttccattgatctatatctctgttttggtaccagtaccatgctgttttggttactgtagccttgtagtatagtttgaagtcaggtagcatgatgcctccagctttgttcttttggtttaggactgacttggcgatgcaggctcttttttggttccatatgaactttaaggtagttttttccaattctgtgaagaaagtctttggtagcttgatggggaaggcattgaatatataaattaccttgggcagtatggccattttcatgatatcgattcttcctacccatgagcatggaatgttcttccatttgtttgtatcctcttttatttcattgagcagtggtttctagttcttgaagaggtccttcacgtcccttgtaagttggattcctaagtattttattctctttgaagcaattgtgaatgggagttcactcatgatttggctctctgtttgtctgttattggtgtataagaatgcctgtgatttttgtacattgattttgctcctaatcatgtttctaatatgacaaactgatggatacttcactgctctcttcttattctatttctcaacagtatttatcatgatcatcaatcaatctggacctgaagccctcaactcgcctggcttctgaaactccacactcttggttttctttctattcctctgatcctgcctctactgggtctttcttctctaccctttcttggcttaatctggagcctctttccttttctcttgtttcctggcacagcttcattaagcaatctcatctagttccatggattaaaatggtctctttatgctgatgactactagactccaagaattatcctctgtcttgaccagtggttcttaaagtgggaaccctggaccagtagcatcagcatcacctggaaacttgttagaactgcaaattctctgactccacccagcccttcttaatcagaaactctgaaggtagggcccagcagtctgtatgttaacgagctctccagctgattgtgatgcacattgaagttgaagaacaactgctctagactaacatatttaatggcctcatttccatctctccttgtatgtctcacggaaatataaatcttcacacatccagtttcatgtcttttttctctctcaacttcctcagcccacatctaatccattagtaaatattgctaattctatctccaatttatataaaaaagtaccagtttctccacaattctatcaccaccactataattagaagcaccatcttactttttcatgcaagaccaatgcaacattttctacttattcccaacttgtccccctccaaccccaatctccatactgcaagcaagcaaggtcttttaaaaatgtaatttggctcctccatcctaaaacactctaagtggttttcccttagacctagaataggatccaaactccataccatggtctccaaggccctacccgatttgagtcaggtccattcctccattacttcacctagtggcagcctctccctctcctactgcatcccagatgcactggttttctctcttagttccctggagaagccagctgctttctgcctcagagactatgcccttttctttggaactttccttctcatcctgtgaatggctggctcagccgctcagccccgcagtctcagcttaaatgtcacttccttttatgtgctttttaccacctatattttcctccacaacccactattctcaatcatcacctttttatttccttcctagcatgtccacaatttggaatattttctttttttttttttttgaggcagagtctcactctgtcatccagactggagtgcaatggcgcgatgtctgctcactgcaacttctgtctcccaggctcaagtgactctcctgcctcagcctcccaagtagctgggattacaggcatgtgccaccatgctcggctaatttttgtatttttagtagagggagggtttcaccatgctggtcaggctggtctcgaactcctcacctcaaatgatccacccacctcggcctcccaaagtgctgggattacaagcgtgagccactgcacccagcccacaacttataaatgttctattcagtcacctactcacttgatgttggttttattttgtttgtctctgttcttctcttcctaccacactgaatgtgaactcatgagagaaggagactcatatatctccatcactgtcagtgtctggcacagtggcgggcacagggtaggtagttgttgatgtaatcactcttattagcatgtgaaaaggaggtgggggagacaccctgtcaggccttttggagctcctaggtgctggatcctaaatcacaagaagtcaaagcctcacttaagttttgtgttcctgtgtgcacagccctgagctaataggaggcaaccactgtccgcaaggagcatcccttctagatgggaacacaaggtgagacatacatgcgtgcaaacactggagagcaagtgaagacagacacaatcagaggtaagactaattggtccaaaatctaaatatcatgggaattttggggcaggaccgataacagggcactaggataggtgagaaaaatgagaaattggcaatagggcaatttcctcatgtgagctcctcatgggcatgagatatgtctttttgttattctgttaaatacctgttttgttttgcttaagggcataacttcaagtagataaagaatgtgtccatccctaaggaaatcagggccaccagtctagctaggaagcctcctttctttttctaaggaaacagtctgcaagcagcatagtcagctgtgaggatgagggcaaggacagcattgtgtataacacagtgtagcctttttactcaggtggctaatgcaatccacagaagaacttaaaagattcagaaatgacaaagctagcttatgacaaaaacagtcaagaactttcctcgcttcctctccttcttccccctgtttgggccctacatagcaatctgaaagagaagggagaatactacacaggtaagagggaaagggacatgatcgcttttcaccagaagggccagcctaaagcagaactcactgggagagaagagacgacttaccaggacacatgttcaaagtttgattcttacataggactggacaattaattacttaactaattaatagagggtgtgattatgacataaagtgactgtaggatttttgtttcctaagctaatggtgaagtaatgggacctacttgaatttttatccagaatgtgggagtggggctagctctgatgaatgaatgttaaaactttatgtgtcctgcttgagtaaaatactaaagaatgaaaaaataacaaatatatgaatgaataaaccaaagcacaaaaatcccacaggtgaagatgtctaagatggtggagacaattccagatgctggatcttccctcttgtctgttctacctgctaaaggagctcagaggtaaagccaggggaacacctaagaagagcatggatttattttattaattatttagccaaaagctatgatggtagaacaacttttgaagtaaagaagccaggtaactataacaacaaccctcttcttcaatattccagtccaactacccttccaagagatgacctggagtcagtagtttggcctataagcttctagtgcttcactatacttttatacacatatatagacatgaagccacatatattatggagtgtgtttgcatttttaatgggttcataatacatgttattcaatatttgttttcactgaacatgtgttttgcttttcactgaatgtacattattccacaacagtgatggctcataatttagccaaccacaattctactgatagacatttaagttgtgtttaatttttaccaatgtgatgccatgggatttttaacatatctttttacatgtgcaaacatttcttcaacacagatttctaaaaatgaaagttttagatcagagatttaaatgtatgtattttaacttttattttatagagatgggggtctcactatattgcccaggagggatggtcttgaactcctgaactcaagcaatcctcccaccttggcctcccaaagtgctggaattacaggcatgagccactgcacctggccttattttggatttagatggatacctatcaagactgactgagggtttcactcccccacacacttgctaatgctggatattaacaagctataaattttttccaatctcctgagtagaaactgataactcagtgttgtttttatttgtattcccctcactaggagcaaggctgaccatcttttcatgtttgtggaccatttgtacttttcagctgttcatattctttacccatttttccattggattgttcatcttttaaacatcatgggtaggatgtttttatgttggatactagttgtgagttacatgcttgacaaatgttttttcccagcttatcatttacgctttctttttaacttttaagacagcatcttttattgaggagaaatgtatgtggaaaaaagtgatattttttcctttatgtattatagattttgtatgctgcttaagaagaccttaccccaatgaaatatttcctcatctttccatctaatactcttgcaattttgtttttcaagttgaagtttttaattcatttgaaatttatcgtagtataaagtaggtatctgtatttttccaaaaacttccaacaccatttattgatagttcacacttttctgtctggttagaaatgccatttttattataaaccaaattgcaattcatgtattagtctgtttgaagaatttctgttctgttcaattgataactttatataggagctaacagcgcattaattactacagctttttagaatactttgatgttggataggtcaagttccatttcatttatcttcactcatttaaaaaaatctggtatgttgagaatcaggttttcaaatttcataaaaatgagaatttcatcaactttcttaatttgggaatgatatgagagctttacagtgttaagccttcccacccagaagacttccacaatttccatctttacttattgagatcttttatgtctttgggtagagttctcaagtattctttatataggttttgcacatttcttaacaggtttactgctggtattttatagtttatgctgccattgctattacatttcttaactgctggtgtagagattctacaaatatcttgtatccagacattttattacacactcctttaactgattcttttgcttctctaggcagaattcattagtatgactgatattttgacttcagagtgaaagatgcgagagatatgcagatgatctttaagtatctataagattctgtgtacaaccagagagaaagactacgtaaataattcagaattcaatcaggcagtaaagagattagttgaacagagttatcagctacctcagtggaaggctgtagacttaaatcagatggaagaattgggtaacttgtaatttgaacccaggagaaatgaaccccatttgaagggtttatacttggagtccctgttgtcacggcaactatgaaaggagctcatagtttctattgctgacaaggggagaatcatgctggatatacagctcccaggttcagatttcttaacctctggtctctcaagatgataaaacccagcttgctagcagtggtaaaactgtactctttgcaagtagtatgtttccaatctcatagaattttagaatgtaatatattctaaagaaaataaaactaatattattgatacttgtgtgttacatttaggataatttaggtcaatctggattctacattgacatattaggctatttggcagattagccttgtgatttcaatttggaatgtgtatgaataattgaattttagaatgagagctttattttgagatgtgtaagataatttgaccaaatctgaaaatagtattagaatgtttaaataaggtgagctacactatatttataggtttaacttactagatttgtaagaattgtgaaagtaacagaaagggttttcttattaagataggcattttttaaggctttgaagaaaattaaatttttaaaatttataagtggattttatttcctttaagagaatataagttgtaaatagggctagtttttaaagagtttagtctataaaacttaagttactcaaataattttttacaaagtaaaatgattgttcttattttctacacatataaaaagaaaacaaagatttgtaagttgcacttaacggcttggagagaattaaattttaaaatttttcgccataataaattgatattcatttttaaatacattgtttctctgtacacaaattattttcgctgtacagagattatttccttagattgtctaggtagatgatcatttcatatgaaataatgtcagttttgtcattgatatgtcatttatgccttttgtcagttttgtcatttatactttttacacctgcttcttgtttgtacactggccaaaacctgagtggtaatggtggctgtccatgttttattcctgattatggtaatatttcaccattaagtatgaggtatgctatcagttcttgaatataagttttgcctcatcaaagatatttttctatttctagtttaaacaacttttaaaatcataaacaaatattgattttgaaatacacttttttcagcctctgttgaaaagaccaaaatctttttcactttaatctgctaacagagaattacattaatacattttctcatactgaaactttagtaaagtaaatcctaacaggtcataatatattaacataccattgaattttacttggaaattaaaattttttttacatttatgttcataaatgaaatcagtctataattgtatcatatgttatctctggatttttctttttcatttttaatgaactttatttttcagagtgggctaaggttcacagcaaaattgagcagaaagtacagagagtttccatgtactctctgtctgcacatatgcacaacctcccctacgactgacaccttgcaccacagtggtacatttgttacaatcagtgaacctaggttgacatgtaactgtcacgcaaagtccatagtttacattagggtttactcttggtgttgtacattctatggattttgacaactgtataatgacatgtatccaccattgtagtatcatacagaatagtttcactgttctaaaattccgtgctctgcctactaatccctccctcccctctaacgcctggcaatcattaatctttttactgtctctgtacttttgtgttttccagaatgtcatatagtagaatgatacagtatgtagcccttccatattgacttctttcacttagtaatatacacttaagtttcctccatatcttttcatggcttgatagctcatttctttttagtgctgaataatattcaattgtccgaatgttccacagtttttttaatccattcacctactgaaggacatcttggttgtttccaagttttggcaattatgtataaggctgttataaacatctatgtttaggtttttctaaacatgttttcaattcatttgggtaaataccaaggagtaaaattactggatcatatgataagagtacgtttagttttctgagaaactgccaaactatctttcagagtggctatagcatttttcattcccaactgcaatgaatgagagttcctgttgctccatattcttggcagcatttggtgttgtcagtgttttggattcagaccattctaatgggtatgtagtggtatctcattattgttttaactagcaattctctagtgacacatgctgttgagcatcttttcatacgcttgcttgccatctgtctatcttctttggtgggatatctattcgggtcttttgcccattttttaattgggttgtttgtgttcttattgttgagtttttgttttattttgttttttttgagacggagttttgctcttgtcacccaggctggggtgtaatggtgcaatctcagctcactgcaacctccacctcctgggttcaagtgattatctagccttgcctcttgagtagctgggattacaggcatgtgccaccatgcccagctaatttttgtatttttagtagagatgaggtttcatcatgttggccaggctggtcttgaactcctgacgtaaggtgatccacccgcctcagcctcccaagggattacaggcatgagccaccacacccagcttattgttgagttttaagagtgctttgtatatttcagataacaaaccattaacagatgtgtcttttgcaaatgtattctccctgtctatggcttgtcatttcattctcttgacactgtcttccccagagaaaaaggatttaattttaatgaagcttagcttattaattatttctttcatggatcatgctttaggcgtatgaaaaagatcattgctatatccaaggtcatccaaattttctcctgtattatcttctaggagctttatagttttgcattttatattcaggtctatgatccgttttgagttaattcttataaggggtataaggtgtattctagattcttttttttgagggggggatgtccagttcttccagcattgtatgtagaaaagactttcactgcttcattgtattggcttcattcttttgtcaaaaatcagtttacaatatttatgtgggtgagggtctatttctggcctctctattttgttccattgatctatttggctatttttttcactaataccacaccctcttgattaatgtagctttataagaagttttgaattcaagtaatgtcagtcctccaactttataattctatttcaatattatgttggctattctgggtcttttgcctcttgatataaatattataatcagtttttcaatacccagaaaataacttgctgggattttgaccaggattgtgttgaatccagagatcaagttgggaagaacagacattttgacaatattgactctttctatccataaaatatggaatatttctccattcatttagttctttgctatcttttatcagaattttttagttttcttcatacagatcttgtacatactttgttagatttacaccttagtattcccttttttgagggtgctactagagatgataatgtgttgttaattccaaactccacttgtttattgctgtatatagaaaagcaattgacttttatatattagccttgtaccctgcaaccttgtaataatcacttattagttccagaaggtggtggtggttgtggcagcggtggtggtggcancggtggtggtggtggtggtggtggtggtgatggtgacggtgttattgattcttttggattttctatatggacaatcatgttacctgtgaacaaagagagtattacttcattcccaatctgtttcatttccttttcttgttttattggcttagctagaactttcagtatgatgttgaaaagcagtggtgagagaggaaggacatccttgcctttctcctgatcttactggaaaagccttgagtttgtcaacatgatgtatgatgttaaccgcagggtttttaaaaaatgttttctaaaatcaggttgaggtagttcccttcaattactagtttgctgagagtattactctatcatgaatgagtgttagattttgttaaatgctttttctgtatctattggtatgttcatgccatatttcttctttagcttatcattgtgataaattacgttaactgatttttgaatgttgaacgaaccttgcatacctgggttaaacctcaattagttgtggtgtttaattctttttatacaccattgaattagatttgctaatattttgttaataatttttgcgtctatgttcatgagaaatattggtctgtaacttttttgtagtgtctttatctggccttggtattacattaatgctgggatcatagaataaaacactgctcaaagaaatcagcaatgacacaaacaaatggaaaaacattccatgctcatgaatagaaagaatcaaaaacaaacagaatatacattcctctcatctgcacatggcacatgctctaaaactgaccacacagtgagacataaaacaatcctcagcaaaaattttaaaaacaaatttttattttattttattttatttatttatttatttgagatggtgtctcactgtgttgcctgggctggagtgcagtggcatgatcttggctcactgtaacctctgcctccctggttcaagcaattctcctacttcagcctcccaagtagctgggattacatgtgtgcaccaccacgcccagctaatttttgtatttttagtagagacagggtttcaccatgttggccgggctggtcttgaactccttacctcaggtgatccacccagctcagcctcctacagtgctgggattacaggcatgagccactgcacccagccccaaaattttaaaaagcaaaatcgtaccacactcttggaccacagagcaataaaaatagaaaccgatactaagaaaatcactcaaaatcacacaagtacatggaaattaaacaacctgcttctaaatgactgtggggtaaataatgaaattaaggcagaaatgaagtttttctttgaaactaaagagaacacagacacaacataccagatctccggacacagccaaagcagtgttaaggaggaaggaagtttatagcactatacaccaacatcacaaaattagaaagtctcaaattaacaatataatatcgcaactagaggaactagagaaacaagagcaaaccaatcccaaaactagcagaagacaagaaataactaaaatcaaagctgagctgaaggaaactgagacatcaaaaaccatgtggaagaacaaagaatccaggaatttattctttgaaaaaagttaatatagactgctagccagactaataaaaaagcagaagatccaaataaacacaatcagaaatgacaaaggggacactaccacggacccgaaagaaatacaaaaacccctcagagactactgtgaacagctgtatgcacacaagctagaaaacctaaaagaaatggataaattcctgcaaacatacagtcttccaagactgaaccacaaagaaattgaatcctcaaacagaccaataatgagttctaaaactgaaccagtaataaaaagcctaccaaccagtggttcaggcctccaatcctagcactttgggaggctgaaggtgggcagatttcctgagctcaggagtttgagaccagcctgggcaacatggttaaaccccgtctctactaaaatacaaaaaattagccaggtgtggtggagtgcaccagtagtcctagctacttgggaggctgaggcacaagaattgcttgaacctgggaggtgacaaagtgagactctgtctccaaaaaaagaagagctggtgccattcctaatgagactactccaaaaaattgaagaggagggactcctccccaattcattctatgtggacagcatcatgctgataccaaaacctggcagagatacaacaaaaaaagaaaagttcaggccaatatcctctatgaacatagataaaaaattctcaacaaaatactagcaaactgaatccaggagcacatacaaaagacaattcaccacaatcaagtaggctttatctctaggatgcaaggttggttcaacatatgcaaatcaataaatgtaattcatcacataaacagaactaaaaacaaaaaaatgcctatttcaatagatacagaaaagacttttgataaaatttaacattgcttaatgttaaaaaccctcaacaaagtgggcactgaataaacatacttcaaaataataagagctatctataataaacctacagctaacatgatactggataggcaaaagctggaaacattccccttaaaaactggcacaagacaaagatgccctctctcatcactcctactcatgtagtactggaagtcctggccagagcaatcaggcaagagaaagaaataaaaggcattcaaatgtaaagagaggaagtcaaactgttgctatttgcagacaatatgattctatatcagaaaaccccatagtctctgcccaaaggctccttgatctgatgaacaacttcagcaaagtttcaggacataaaatcaatgtacaaaaatgaatagcattcctatacaacaacaatattcaagctgagagctaaatcatgaacacaatcccattcacaatagccacaaaaagaataaaatacctgggaatacaggtaatcaggaagatgaaagatctctacaataaaaattataaaactctgctcaaagaaattagagatgacacaaacaaatggaaaaatattccatgcttggggactggaagaatcaatatcattaaaatggccatactacccaaagcaatttacacattcaatgctatttctataaaactaccaatgacattcttcatagaattaggaaaaactatttaaaatttcatatggaacaaaaaaagagcctgaagagcaaaggtaatcttaagcaaaaggaacaaagctggaggcatcacattacccaacttcaaactatactacaagcttacagtaaccaaaatagcatggtactgatacaaaacagacatatagaccaatgggacagaatagagagaccagaaataatgacacacacctacaaccatctgaccttgacaaaatcaacaaaaacaagcaatggggaaaggactccctatttaataaatggcgctgggctaactggctagccatttgcagaaaattgaaactggaccccttcctcacatcatatacaaaaattaactcaagatggattaaagacttaaacataaaaccaaaactgtaaaaaccctgaaagataacctaggaaataccattctggacagaacatttggcaaagatttcatgagtaagatgccaaaaccaattgcaacaaaaacaaaaactgacaaatgagatacagttaaacaagagcttccaaacagctaaagaaactatcaacagagcaaacagacaacatacagaatgggagaaaatatttcaaattatgcatccaacaaaggtctaatctccagaatctataaggaatttaaacaagttaacaagcaaaaacaaccccattaaaaagtgggtaaaggacatgaacagaagacgaaagaagacatacatgcagccaacaaccatatgaaaaaatgccaaatacttaaagccaactgatcttcgacaaagcatgcaagcacataaattggggaaaggacatcctattcaataatggtgctgggaagactggcaagccacatttagaagaatgaaactgaatcctcatctttcaccttatacaaaaatcaactcaagatgcatcatagacttaaatctaagacctgaaaccataaaaattctagaagataatatcagaaaaactcttctagacattggcttaggcaaataattcatgattaagatgtcaaaagcaaattcaacaaaaccaaaaataaataaaatgagttctaattaaactaaaaggcttctgcacagcaaataataataataataatcagcagagtaaacagacagctcacagagtgtgagaaaatattcacaaattatgcatctgacaaaggactaatatccaggatctacaaagaactcaaatgaatcagcaagaaaaaaaaaccacaaataatcccatcaaaaagtggcaaaggacataaatagacaatatcaaaagaagatatatgaacagccaacgaacatatgaaaaaatgctcaatatcagtaattatcagggaaataaaaattaaaatcacagtgagataccaccgtactcctgcaggactggccataattaaaaagtcaaaaaataatagatgttggcgtggatgtggtataaagggaagacttttacactgctggtgggaatgtaaactagtacaaccactatggaaaacagtacggagattccttaaagaactaaaaagagaactaccattcgatccagcaatcccactactgggtatctacccaaatgaaaagaagtcattatataaaaaagacacacgcacacacatgtttatagcagcacaatttgctattgcaaaaacatggaaccaacctaagtgcccatcaaccaatgagtggataaagcaaatgtggtatatatacagcatggactactactcagccagaaaaaggaataaaataacctcttttgcagcaacttggacggatttggaggccattcccttttttttatttggttctttttttttctgagatggaatctcactttgttgcccaggctggagtgcagtggcacaatcttggctcactgtaacctccgcctcccagattcaagcgattcttctgcctcagcctcctgagtagctgggattacaggcacgtgctaccacgcctggctaatttctgtatttttagtacagatgtggtttcatcatgttggccaggcttgtctcaaacttctgacctcaggtgatctgcctgctttggcatcccaaagtgctgggattacaggtgtgagccaccacgcctggtggagggcattattccaagtgaagtaactcaggaagggaaactcaaatatcatttgttttcacttacaagtgggagctaagctacaatgatgcagaggcataagaatgatataatggaccttgaggactcgagggggaagcctgagagggggatgagggatcaaagactacatattgggtactgtgtacactgctcaggtgatgggtgcatcaaaatctcagaaatcaccactaaagaacttctcatgtaaccaaaaaccacctgtatcccaaaaactattgaaattgaaaaaaaaatattcaaaatcactaattattagggaaatgcaaatcaaaaccacagtgagataccatttcatatcagtcagaatggctattatgaaaaagtcaaaaaaataaaagacgctgacaaggttgtggaggaaagggaatgcttgtatactgctggtgggaatgtaaattagttcagccattgtggaaagcagtttggcaatctgtcaaagaactcaaagcagaattaccattcaacccagcaatcccatgattgggtatatatacccaggagaatatcaattgttctaccctaaagacacacacacacacatgttcatcacagcaatattcacaatagcaaagacatggaatcaacctaaatgcctatcagcagttgactggataaagaaaatgtggtatatatatatacaccatggaacactatgcagccacaaaaaagaatgacatcatgtcctttgcagcaacatggaggccattatcctaagcgaactaacaaaggaacagaaaaccaaatactgcatgttctgacttacaagtgggagctaaacattgagcatataaggacacaaagaagggaacaacagacactggggcctactttagggtggtgggagagaggagccagaggttcatttttctacctattgggtactacgcatattacctgggggatgaaataatctgtacatcaaacctccatgacacgcaaattatctatacaaaaaatctgcacatgtaccccgaacctaaaataaaagtttgaagaaaaaaagaaattgttttttctacttctaacttctaagagagattgcagagaaattgtaagatttcttccttacacagtggaattcaacagtgaattcatttgggctggtgctttctgttttgaaagcttattaattattcattaaatttctttgatataagcctgctcagattgtctatttcttcttgggtaggttttaacagatggtgtcttccaaagatttgtcgatttcatgtaggatattaaattcatgggcatgtagtagtccatagtattcctttattgtcattttaatgtccatgggatctgtccttttcccttctttcatttccataatttgtggtctctctcttatcttcttagaagttgcacataattcttgcctttgctcttcaaggggggttaagtgtttattacctctggcttctttcaagatcttttctttaactttgatttctgaagtttgaatataatatgcctagatgtcaggtttctttggccatttatcccgttcagtgctctctaagcttccttggcctgtgatttggcgtctgacattaatttgggggaaactctcactgattattgcttcacctattacatctgtccctttctctgcttctccttcttgtactcacattatacagagttaacatcttttgtagttgggccacagttcttggatattctgttttgtttcttttcccaatctttcttttctttacttctcagttttggaagtttctattgttacttcctcaagttcagggattctttcatcaagctggtaatgagcctatcaaaggcattcttcatttctgatacaatgttttgatctctagcatttcttttttattccttctaatatatatgcttaaattatctatctgtttttgcattttaaaacagtttgaattagtgacagttttccactaaagcccttggcatactaatcagagttttaaaaaaattcctgatcagataactccaacatttttaccataacgtacttctcattctgatgcttgtttggtctcttcaatctggttttttaaaaaatcttttatgattattattattatctttagagacagggtctcactatgttgcctagtctggccttgaactcctggactcaagtgatcctcccacctcagcctcttaagtagctgggaatacaggcacgcaccattgccccttgctttaccttttagtatgccttgtacttttttattgaaaggtagacctgctgtattgagtaaaaggaactgcagtaaataggctgttagtaatgtagtggcaaggggaagcattctacagtcttataatcaggtctcagtctttgggtgagcctctgcccctggactgtgaatttcagcagtgtttctcaattttgttttttccaccttaggtgggacaggatggctaaagggaattggcattgggtattttccttcccctacatggaaagctagagttggctacaactctatggatatttgtattcccccaggttggttactctgataatatgccagcagactggctctgataaaatagcttctcttcagggaaggccttgctaaaaagagcagaatgcactggcatattttaaaatggtttcttgtctccttccccagcggaaacacgagaggctttttctctgatattcactgttaggacctggtagagttcctggaggcagaacaaaattgtgagaacctttcctcacaaccccactgcaccctctcccccggaagattggaagtcccctagagtttgtaattttcacagttgtccacattgggcctctggtaatgcttcactttcagtgtatgttttcctacactggtactcgttgccacagaggtgtatgctcacaggtttctgttcacacaagctgtgattttctgtatccacctgtcagtcactctaatttggggaggctgcagttagtcctgtgacctcacttctctgatgggtctcagattgctgctgatttttcagtttattcagacttttacttattattaggacagagtggtgaacttctaagctccttacatgctggaccagaaacagaaagtcccttgactagttttatatcagagttttgccagccacatagtattttttcatttaattttttaaaagaatattcaaatttatttaaataggcagataaaattctatgtatttattatttacaatataatgttctgaagtatacacacattgtgagatgataaaatctagctaattaacatatgcattacctcatacttaacatttttgcagtaagaacacttaccatccactctcttagcatttttcaagaatacaatatatcgtcattaactatagtcatcatgctgtacaatagatcttttgaacttattctgcctatctaactgtacttttgtatcctttgacaaacatctccgcaacttccccaccagccacctcaacgtctggcaaccaccattctactcgctgtttctgcaagaccaacttttttagattccatatatgagtgagaccatgtggtgtttgtgtttctgtgcctggcttatttcacttaacataatgtcctccaggtttatccatgtggttggaaatgacaggatttccttctttttacagccgaataatatttatatatatatatgatatatctgatatctgatatatataagatattcatatatacatatgacatatatatcacattttctttatccattcatctgttaatggacatgggttgattccatatcttgactattgtgaacaggggtaaaataaacatgggagtgcttagatgtctccccaacatactaactttatttcctttggatatatacccaacagtgggattattaaatcatatggtagtcttatttttaattttctgaggaaactatatactgtcttccataatggctgtactaatttgcattcccttagtgtgcaaggattcccttttctctacattagtgttctcatcaacacttatcttttgtcgttttgataatagccattctaacaggagtgaagtgatatatcactgtggtttttttttatttgcatttccatgatgattaatgatgcattttttcatatgcctattggtcatttgcatgtcttttgcctatttttaaattgggttgtttttttgctattgagttgtttgaattccctatatatttaggatattaacccttgtattagaagtataatttgcaaatattttccactattctgtagactgtctcttactctgtttcctttgctgtctttctagtttgatgtaatctcatttgtctatttttgcttttgtatcctgtgttgtcgaggtcatatccaaaaagagcatttcccaggccaatattgtggggattttcccctatttttttttttttagtagttctatggttttgggttttacattaatccattttgagttgatctttgtatatggtgtgaggtaagggtctaatttcattcttctgtatttggatatccagttttcaccactgtgtgttcttggcacctttgtcaaaaatcaactaggtgtaaatgtcatttagtttatatggcctaggaattatctaatatttaagaatgtggtacaatttgcacgtaagactatctgaacctggtgccttttttcagagtggtaggccttttactatctttttttattttattccttttattagcctatttcagatttttttttacctcctttagttaattttgataatttgcagttacctagaaaattatcgatttaatcaagattttcaagtctattgatatacacttacagacagattcttctcttttttttgagacagagtctcactctgtcacgaggctggagtgcagtggcgtgatctcagctcactgcaacctccacctcccatgttcaagtgattctcctgcctcagcctcccaagtagctggaactacaggcacacaccaccgtgcccagctaatttttttgtatttttaatagaggcagggtttcaccatgttggccaggatggtctcgatctcttgactccgtgatctgcccacctcggcatcccaaaatgctgagattacaggcgtgaaccaccacacccagcctaaagacagattcttaaataatttttcctatctaccattttgttgcctttctcattccaaatatttatttgccattctctctgtattaatctattagtggaatagcaatagtttttgtctatttcataagtcttttcaatttatgacctataggttttattgttaaaatcttttttgtggttgttgtagtttaaaagtatttctgtttttgtctctattatgcctctcttcaatttcgtttatttatcttttctagttttatgagttgagtgctttaaggaagacaatttcatataagactgtttattccagtaaggttaattcctaccccctgccaacaataaaagtccaatatcattattctgccaccaggtggctggccagtgatactgatttatggtgacatagcagggctcagtgttaatctctgatgttggcaaagtagacacacagcagtgaaagaagccatatcccacatatataattttcatccttcccaccacactttcaataagctcactgagcaatcactggagtggccaaggaaagtggctgctgacttacatccctgaactggccatctggtccatcctttgccatctgattgagaaagtccttagttttgagggccattggtgagcattcataaggcaccaatactgacacactctggacctaaggtggggaaatgggagtggttcaacaggtgcaggtgataagaagtgcattgttggcagataatttaaataataataataataatggcaactacgatttaatcttcttcttcttagcaccatctgctagcaattccaaacaatgccagttcacaatactccctctcaaaaaactttctgctggtctaagttctaaaaagttgcttgtacctggggcaagccactcctaccacccacccttggtataatagaggtttccatccacttaccctgcccctagatcctctcattatcaatcctcagtattgttcttctctagtccctgatgacccagacaagtattagccactgattataagtcattttagactcgtaatgcaggacaactttctttccaggatatgtgaagaaaagatattccacatataattctgcctattacagagaggatttctcttcatcattgtccttgtcatcacacacaattgaggttaatgagaacagtctgcatatagcacagtatcacctaaaaatcaagtttaatgttttgcttctttaatcaactggtcatagggtactcctcccacccatgaagctatgtaagcaggtagaaggtgatgtggctatgcatcaacagtaggaacactgagaatgtgagccgcttgctcacacaactcactggtacatttaaggcctgcttaaactcagtcttatgtcacttgcttagccttgttgagtaagtgctgctaggcaacccaattttatgacttgataagtaagataatacccattcatgataggcagtcttgcagcaaactagatagaacccacatctaggataggagctgattggagttactattactacctaactaattttacaataatcgactgatattctccaaaattacttgttattactaggtaacttgtcatgaagataggaggattcaccactcctttgtctttcaactttgtgatgatgttaataatttctgcaatacctccaggtataaagtattgcttctgatgtattgttcatctgtgttcttgaagttatttgcataaaattgttcatactacccctttactatccttttaatgcctctaggatcagtagtgatgacctctctttcattcctgacaactgtgacttgtacattctcttttttctctgtcttactatattttaatcaattttattaacattttcaaagaacaaacttttgactttgttacttttctctattttctgtcccttttctatgtaaattgcttttcattcttgtatgtatcattttcatatttcttcttaattttggttcaatttcctcctttttctgtcatcttcaagtagaagtgtagatcatttattttaagcattttttctaaaataaacacttaaaagtataaatgtccttctatgcactgctttagctgtttcctacaaatatgaaataccttcattatcatgtagttcaaaatacctttttctcaagttgagaattcttttatttatttatttacttattttttaaattatactttaagttctagggtacatgtgcacaacgtgcaggtttgttacatatgtatacatgtgccatgttggtgtgctgcacccattaactcgtcatttacgttaggtatatctcctaatgctatccttcgccccttcccccaccccacgacaggcccccagtgtgtgatgttccccatcctgtgtccaagtgttctcattgttcaattcccacctatgagtgagaacaagcagtgtttggttttctgtccttgcgatagtttgctcagaatgatggtttccagcttcatccatgtccctgtaaaggacatgaactcatccttttttatggctgcatagtattccatggtgtatatgtgccacattttcttaatccagtctatcattgttggacatttgggttggttccaagtctttgctattgtgaatagtgccacaataaacatatgtgtgcatctgtctttatagcagcatgatttataatcctttgggtatatacccagtaatgggatggttgggtcaaatggtatttctagttctagatccttgaggaatcaccacactgtcttccacaatggttgaactagtttacagtcccaccaacagtgtaaaagtgttcctatttctccacatcctctccagcacctgttgtctcctgactttttaatgattgccattctaactgatgtgagaagttacctcattgtggttttgatttgcatttctctgatggccagtgatgatgagcattttttcatgtgtctgttggctgcataaatgtcttcttttgagaagtgtctgctcatatccttcacccactttttgatggggatgtttgattttttcttgtcaatttatttaagttctttgtagattctggatattagccctttgtcagatgggtagattgtaaaagttttctcccattctgtaggttgcctcttcactctgatgatagtttcttttgctgtgcagaagctctttagtttaattagatcccatttgtcaattttggcttttgttgccattgcttttggtgttttagacatgaagtccttgcccatgcctatgtcctgaatggtatggcctaggttttcttctagggtttttatggttttaggtctaacatttaagtctttaatccatcttgaattaatttttgtataaggtgtaaggaagggatccagtttcagctttctacatatggctagccagttttcccagcaccatttattaaatagagaatcctttccccatttcttgttcttgtttttgtcagatttgtcaaagatcagatggttgtagatgtgtggtattatttctgagggctctgttctgttccattggtctatatctgttttggtaccagtaccatgctgttttgattacagtagccttgtagtgtagtttgaagtcaggcagcgtgatgcctccagctttgttcttttggcttaggattgtcttggcaatgcgggctccttttggttccatatgaattttaaagtagttttttccaattctgtgaagaaagtctttggtagcttgatggggatggcattgaatctataaattaccttgggcagtatggccattttcacgatattgattcttcctctccattagcatggaatgtttttccatttgtttgtgtcctcttttattttgttgagcagtggtttgtagttctccttgaagaggtccttcacatcccttgtaaattggattcctaggtattttattctctttgaagcaattgtgaatgggagttcactcatgatttggctctctgtttgtctgttattggtgtataggaatgcttgtggtttttgcacattgattttgtatcctgagactttgctgaagttgcttatcagcttaaggagtttttgggctgagacaatgaggttttctaaacatacaatcatgtcgtctgcaaacagggccaatttgacttcctcttttcctatttgaataccctttatttctttcccctgcctgattgccctggccagaaattccaacactatgttgaataggagtggtgagagagggcatccctgtcttgtgccagttttcaaagggaatgcttccagtttttgcccattcagtatgataatggctgtgggtttgtcctaaataggtcttatcattttgagatatgttccatcaatacgtagtttattcagtttttagcatgaagggctgctgaattttgtcaaaggccttttctacatctattgagataatcatgtggttgtctttggttctgtttatatgatggattgcctttattgatttgcatatgttaaaccaccgttgcatcccaaggatgaagccaacctgatcatggtcgataagcttttgatgtgctgctggatttggtttgccagtattttattgaggatttttgcatcgatgttcatcagggatattggtctaaaattctctttttttgttgtgtctctgccaggctttggtatcaggatgacgctggcctcataaaatgagttagggaggattccctctttttctattgattggaatagtttcagaaggaatggtatcagctcctctttgtacctctggtagaattcggctgtgaatccatctggtcctggacattttttggttggtaggctattcattattgcctcaatttcagagcctgttattggtctgttcagggattcaacttcttcctggtttagtcttgggagggtatatgtatccaggaatttatccatttcttctagattttctaatctatttgcatagagatgtttatagtattctctgacggtagtgtgtatttctgtgggattggtggtgatatcccctttatcattttttattgcatctatttgattcttctctcttttgttctttattagtcttgctagtggtctgtcaattttgttgatcttttcaaaaaaccagctcctggattcattgattttttgaagggttttttgtgtctgtatctccttcagttctgctctgatcatagttatttcctgccttctgctaccttttgaatgtgtttgctcttgcttttctagttcttttaattgtgatgttagggtgtcaatattagatctttcctgctttctcttgtgggcatttagtgctataaattttcctctacacactgctttaaatgtgccccagagagtctggtatgttgtgtctttgttctcattagtttcaaagaacatctttatgtctaccttcatttcgttatgtacccagtagtcattcaggagcaggtggctcagttttcatgtagttgagcagttttgagtgaatttattaatcctgagttctagtttgattgcactgtggtctgagagacagtttgttataatttctgttcttttacatttgctgaggagtgttttccttccgtcaattttggaataagtgtgatgtggtgctgagaagaatgtatattctgttgatttggggtggagagttctgtagatgtctgttaggtctgcttggtgcagagccaagttcaattcctggatatccttgttaactttctgtctctttgatctgtctaatgttgacagtggggtgttaaagtctcccattattattgtgtgggagtctaagtctctttgtaggtctctaaggacttgctttatgaatctgggtgctcctgtattgggtgcatatatatttaggatagttagctcttcttgttgaattgatccctttaccattatgtaatggccttctttgtctcttttgatctttgttggtttaaagtctgttttatcagagaataggactgcaacccctgcttttttttgttttccatttgcttggtggatcttcctccatccctttattttgagcctatgtgtgtctctgcatgtgagatgggtctcctgaatacagcacactgatgggtcttgactctttatccaatttgccagtctgtgtcttttaattggagcatttacccatttacatttaaggttaatattgttatgtgtgaatctgatcctgtcattatgatgttagctggttattttgctcgttagttgatgcagtttcttcctagcctcaatgatctttacaatttggcatgtttttgcagtggctggtaccagttgttcctttccatgtttagtgcttccttcaggagctcttgtaaggcaggcctggtggtgacaaaatctctcagcatttgcttgtttgtaaaggattttatttctccttcacttatgaagcttagtttggctggatatgaaattctgggttgaaaattcttttctttaagaacgttgaatactggcccccactctcttctggcttgtagagtttctaccgagagatctgctgttagtctgatgcgcttccctttgtgagtaacccgacctttctctctggctgcccttaacattttttccctcatttcaactttggtgaacctgacaattatgtgtcttggagttgctcttcttgaggagtatctttgtgacgttctctgtatttcctgaatttgaatgttggcctgcgttgctaggttggggaagttctcctggatagttctcctgtagagtgttttccaacttggttccattctccccatcactttcaggtacaccaatcagatgtagatttggccttttcacatagttccatatttcttggaggctttgttcatttctttttactcttttttctttaaacttctcttgtcacttcatttcattcatttgatcttcaatcactgataccctttcttccactttatcgaattggctactgaagcttgtgtatgtgtcacgtagttctcg

SEQ ID NO: 10612 - DNA, 6152 bp, Homo sapiens
ttttggtgattttttttaattattattatactttaagttttagggtacatgtgcacaatgtgcaggtttgttacatatgtatacatgtgccatgttggtgtgctgcacccattaactcatcatttagcattaggtatatctcctaatgctatccctcccccctccccccaccccacaacagtccccacagtgtgatgttccccttcctgtgtccatgtgttctcattgttcaattcccacctatgagtgagaacatgtggtgtttggtttttttgtccttgcgatagtttgctgagaatgatggtttccagtttcatccatgtccctacaaaggacatgaactcatccttttttatggctgcatagtattccatggtgtatatgtgccacattttcttaatccagtctatcgttgttggacatttgggttggttccaagtctttgctattgtgaatagtgccacaataaacatacgtgtgtatgtgtctttatagcagcatgatttataatcctttgggtatatacccagtaatgggatggctgggtcaaatggtatttctagttctagatccctgaggaatcaccacactgacttccacaatggttgaacaagtttacagtcccaccaacagtgtaaaagtgttcctatttctctacatcctctccagcacctgttgtttcctgactttttaatgatcgccattctaactggtgtgagatggtatctcactgtggttttgatttgcatttctctgatggccagtgatgacgagcattttttcatgtgtttgttgactgcataaatgtcttcttttgagaagtgtctgttcatatccttcacccactttttgatggagttgttttttttcttgtaaatttgtttgagttgattgtagattctgcatattagccctttatcagatgagtaggttgcaaaaattttgtcccattttataggttacctgttcactctgatggtagtttcttttgccgtgcagaagctctttagtttaattagatcccatttgtcaattctggcttttgttgccattgcttttggtgttttagacatgaagtccttgcccaagcctatgtcctgaatggtattgcctaggttttcttctagggtttttatggttttaggtctaacatgcaagtctttaatccatcttgaattaatttttgtataaggtgtaaggaagggatccagtttcagctttctacttatggctagccagttttcccagcaccatttattaaatagggaatcctttccccattgcttgtttttgtcaggtttgtcaaagatcagatggttgcagatatgcggcattatttctgagggctctgttctgttccattgatctatatctctgttttggtgccagtaccatgctgttttggttactgtagccttgtagtatagtttgaagtcaggtagcatgatgcctccagctttgttcttttggcttagggttgacttggcaatgcagcctcttttttggttccatatgaactttaaagtagttttttccaattctgtgaagaaagtcattggtagcttgatggggatggccttgaatctataaattaccatgggcagtatggccattttcacgatattgattcttcctacccatgagcatggaatgttcttccatttgtttgtatcctcttttatttcattgagcagtggtttgtagttctccttgaagaggtgcttcacatcccttgtaagttggattcctaggtattttattctctttgaagcaactgtgaatgggagttcactcatgatttggctctctgtttgtctgttattggtgtataagaatgcttgtgatttttgtacattgattttgtatcctgagactttgctgaagttgcttatcagcttaaggagattttgggctgagacgatggggttttctagatatacaatcatgccatctgcaaacagggacaatttgacttcctcttttcctaattgaataccctttatttccttctcctgcctaattgccctggccagaacttccaacactatgttgaataggagtggtgagagagggcatccctgtcttgtgccagttttcaaagggaatgcttccagtttttgcccattcagtatgatattggctgtgggtttgtcatagatagctcttattattttgagatatgtcccatcaataccaaatttattgagagtttttagcatgaaggttgttgaattttgtcaaaggccttttctgcatctattgagataatcatgtggtttttgtctttggttctgtttatatgctggattacatttattgatttgtgtatgttgaaccagccttgcatcccagggatgaagcccacttgatcatggtggataagctttttgacgtgctgctggattcggtttgccagtattttattgaggatttttgcatcaatgttcatcaaggatattggtctaaaattctcttttttggttgtgtctctgccaggctttggtatcaagatgatgctggcctcataaaatgagttagggaggattccctctttttctattgattggaatagtttcagaaggaatggtaccagctcttccttgtacctctggtagaatttggctgtgaatccatctggtcctggactttttttggttggtaagctattgattattgccacaatttcagagtctgttattggtctattcagagattcaacttcttcctggtttagtcttgggagggtgtatgtgttgaggaatttatccatttcttccagattttctagtttatttgtgtagaggtgtttatagtattctctgatggtagtttgtatttctgtgggatcggtggtgatatcccctttatcattttttattgcgtctatttgattcttctcccttttcttctttattagtcttgctagcagtctatcgattttgttgatcctttcaaaaaaccagctcctggattcattaattttttgaagggttttttgtgtctctatttccttcagttctgctctgattttagttatttcttgccttctgctagcttttgaatgtgtttgctcttgcttttctagttcttttaattgtgacgttagggtgtcaattttggatctttcctgctttctcttgtgggcatttagtgctataaatttccctctacacactgctttgaatgtgtcccagagattctggtatgttgtgtctttgttctcgttggtttcaaagaacatctttatttctgccttcatttcgttatgtacccagtagtcattcaggagcaggtttttcaatttccatgtagttgagcagttttgagtgagtttcttagtcctgagttctagtttgattgcactgtggtctgagagacagtttgttataatttctgttcttttacatttgctgaggagagctttacttccaactatgtggtcaattttggaataggtgtggtgtggtgctgaaaaaaatgtatattctgttgatttggggtggagagttctgtagttgtctattaggtctgcttggtgcagagctgagttcaattcctggatatccttgttaactttctgtcttgttgatctgtctaatgttgacagtggggtgttaaagtctcccattattattgtgtgggggtctaagtctctttgtaggtcactaaggacttgctttatgaatctgggtgctcctgtattgggtgcgtatatatttaggatagttagctcttcttgttgaattgatccctttaccatgatgtcatggccttctttgtctcttttgatctttgttggtttaaagtctgttttatcagagactaggattgcaacccctgcctttttttgttttccatttgcttggtagatcttcctctacgaaggagcctatgtgtgtctttgcatgtgagatgggtttcctgaatacagcacactgatgggtcttgactctttatccaatttgccagtctgtgtcttttaattggagcatttagcccacttatgtttaaagttaatattgttatgtgtgtatttggtcctgtcattatgatgttagctggttattttgctcgttagttgatgcagtttcttcctagccttgacggtctttacattttggcatgtttttgcagtggctggtaccagttgttcctttccatgtttagtgcttccttcaggagctcttttagggcaggcctggtgttgacaaaatctctcagcatttgcttgtctgtaaagtattttatttctccttcacttatgaagcttagtttgactggatatgaaattctgggttgaaaattcttttctttaagaatgctgaatattggcccccactctcttctggcttgtagagtttctgctgagagatccactgttggtctgatgggcttcccgttgtgggtaacccgacctttctctctggctgtccttaacattttttccttcatttcaactttggtgaatctgacaattatgtgtcttggagttgctcttctcgaggagtatctttgtggcgttctctgtatttcctgaatttgaatgttggcctgccttgctacattggggaagttctcctggataatatcctgcagagtgttttccagcttggttccattctccatgtcactttcaggtacaccaatcagacatagatttggtcttttcacatagtcccatatttcttggaggctttgttcatttctttttattcttttttctctaaacttcccttctcgcttcacttcattcatttcatcttccatcactgataccctttcttccagttgatcgcatcagctcctgaggcttctgcattcttcacgtagttcttgagccttggctttcagctccaccagctcctttaaggacttctctgcattggttattctagttatccattcctctaatttttttcacagttttaaacttctttgccattggtttgaatttcctcctgtagctccgaatagtttgatcttctgaagccttcttatctcagctcatcaaagtcattctccgtccagctttgttccgttgttggtgaggagctgcattcctttggaggaggagaggcactctgctttttagagtttccagtttttctgctctgttttttccccatctttgtggttttatctacttttggtctttgacgatggtgacatacagaagggtttttggtgtggatgtcctttctgtttgttagttttccttctaacagataggaccctcagctgcaggtctgttggagtttgctagaggtccactccagaccctgtttgcctgggtatcagcagcggtggctgtagaacagcggatcttggtgaaccgcaaatgctgctgcgtgatcgttcatctggaagttttgtctcagaggagtacccggccgtgtgaggtgtcagtctgtccctactggggggtgcctcccagttaggctgctctggggtcaaggacccacttgaggaggcagtctgcccgttctcagatctccagctgcgtgctgggagaaccactactctcttcaaagctgtcagacagggacatttaagtctgcagaggttactgctatctttttgtttgtctgtgccctgcccccagaggtggagcctacagaggcaggcaggcctccttgagctgtggtgggctccacccagttcgagcttcccggctgctttgtttacctaatcaagcctgggcaatggcagatgcccctcccccagcctcactgccaccttgcaatttgatctcagactgctgtgctagcaatcagcgagactccgtgggcgtaggcccctccaagccaggtgcgggatataatctcctggtgtgccgttttttaagcctgttggaaaagcacagtattagggtgggagtgacccgattttccaggtgccatctgtcacccctttctttgactaggaaagggaactccctgaccccttgtgctcttgagtgagggaatgcctcgccctgctttggctcgtgcatggtgcgctgcacccactgtcctgcaaccactctctggcactccctagtgagatgaacccggtacctcagatggaaatgcagaaatcacccgtcttctgtgtcgctcacactgggagctgtagactggagctgttcctattcggccatcttggctccatcc

SEQ ID NO: 10613 - DNA, 5159 bp, Homo sapiens
attctctttttttattattatactttaagttttagggtacatgtgcacaatgtgcaggtttgttacatatgtatacatgtgccatgttggtatgctgcacccattaactcgtcacttagcattaggtatatctcctaatgctatccctcccctatccacgcaccccacaacaggctccggtgtgtgatattccccatcctgtgtccatgtgttctcattgttcaattcccacctatgagtgagaacatgcagtgtttggttttttgtccttgcaatagtttgctgagaatgatggtttccagcttcatccatgtccctacaaaggacatgaactcatccttttttatggctgcatagtactccatgatgtatatgtgccacattttcttaatccagtctatcattgttggacatttgggttggttccaagtctttgctattgtgaatagtgccgcaataaacatatgtgtgcatgtgtctttataggagcatgatttataatcctttgggtatatacccagtaatgggattgctgggtcaaatggtatttctagttctagatccctgaggaatcatcacactgacttccacaatggttgaactagtttacagtcccaccaacagtgtaaaagtgttcatatttctccacatcctctccagcacctgttgtttcctgacattttaatgatcgccattctaactggtgtgagatggtatctcactatggttttgatttgcatttctctgatggccagtgatgatgagcattttttcatgtgttttttggctgcataaatgtcttcttttgggaagtgtctgttcatatccttcatccacttgttgatggggttttttgtttttttcttgtaaatttgtttgagttcattgtagattctggatattagccctttgtcagaggagtagattgcaaaaattttctcccattctgtaggttgcctgttcactctgatggtagtttcttttgctgtgcacaagctctttactttaattagatcccaattgtcaatttttgcttttgttgccatggcttttggtgttttagacatgaagtccttgcccatgcctatgtcctgaatggtattgcctaggttttcttctagggtttttatggttttaggtctaacatttaaatctttaatccatcttgaattaattttagtataaagtgtaaggaagggatccagtttcagctttctacctatggttagccagttttcccagtagcatttattaaatagggaatcctttccccattgcttgtttttgtcagggttgtcaaagatcagatagttgtagatacgtggcattatttctgagggctctgttctgttccattggtctatatctctgttttggtaccagtaccatgctgttttggttactgtagccttgtagtatagtttgaagtcaggtagtgggatgcctccagctttgttcttttggcttaggattgacttggcaatgtgggctcttttgtggttccatatgaactttaaagtagttttttccaattctgtgacgaaagtctttggtagcttgatggggatggcattgaatctataaattaccttgggcagtatggccattttcacgatattgattcttcctacccatgagcatggaatgttcttccatttgtttgtatcctctcttatttcattgagcagtggtttgtagttctcattgaagaggtccttcacatcccttctaagttggattcctaggtattttattctctttgaagcaattgtgaatgggagatcattcatgatttggctctctgtctgttattagtgtataagaatgcttgtgatttttgtacattgattttgtattctgagactttgctgaagttgcttatcagcttaaggagattttgggctgagacaatggggttttctgatatacaatcatgtcatctgcaaacagggacaatttgacttcctcttttcctaattgaataccctttatttccttctcctgcctgattgccctggccagaacttccaacactatgttgaataggagtggtgagagagggcatccctgtcttgtgccagttttcaaagggaatgcttccagtttttgcccattcagtattatattggctgtgggtttgtcataaatagctcttattattttgagatatgtcccatcaatacttaatttattgagagtttttagcatgaagggctgttgaattttgtcaaaggccttttctgcatctattgagataatcatgtggtttttgtcgttggttctgttgagatgctggattacatttattgatttgcgtatattgaaccagccttgcatcccacggatgaagtccacttgatcatggtggataagctttttgatgtgctgctggattcggtttgccagtattttattgaggatttttgcatggatgttcattagggatattggtctaaaattctctttttttgttgtgtctctgcccggctttggtatcaggatgatgctggcctcataaaatgagttaaggaggattccttctttttctattgattggaatagtttcagaaggaatggtaccagctcctccttgtacctctggtagaattcggctgtgaatccatctggtcccagacttttttttggttggtaagctattaattattgcctcaatttcagagcctgttattggtccattcagagattcaacttcttcctggtttagtcttgggagggtgtatgtgtccaggaatttatccatttcttccagattttctagtttatttgtgtagaggtgtttatagtatgctccgatggtagtttgtatttctgtgggatttgtggtgatatcccctttatcattttttattgcatctatttgattcttctctcttttcttctttattagtcttgctagtggtctatcaattttgtttatcttttcgaagaaccagctcctggattcattgattttttgaagggtttttttgtgtctctatttccttcagttctgctctgatcttagttgtttcttgccttctgctagcttttgaatgtgtttgctcttgcttctctagttcttttaattctgttgttagggtgtcaattttatatctttcctgctttctcttgtgggcacttagtgctataaatttccctctacacactgctttgaatgtgtcccagagattctggtatgttgtctctttgttctcgttggtttcaaagaacatatttatttctgccttcatttcattatgtacccagtagtcattcaggagcaggctgttcagtttccatgtagttgagaggttttgagtgagtttcttaatcctgagttctagtttgattgcactgtggtctgagagacagtttgttataatttctgttcttttacatttgctgcggagtactttacttccaactgtgtggtcaattttggaataggtgtggtgtggtgctgaaaagaatgaatattctgttgatttggggtggagagatctgtagatgtctattaggtccgcttggtgcagagctgagttcaattcctggatatccttgttaactttctgtctcattgatctgtctaatgttgacagtggggtgttaaagtctcccattattattgtgtgggagtctaagtctgtttctaggtctctaagcacttagtttatgaatctgggtgctcctgtattgggtgcatatatatgtaagatagttagctcttcttgttgaattgatccctttaccattatgtaatggccttctttgtctcttttgatttttgttggtttaaagtctgttttatcagagactaggattgcaacccctgccttttttgttttccgtttgcttggtagatcttccccccctcctttattttgagcctatgtgtgcctttgcatgtgagatgggtttcttgaatacagcacactgatgggtcttgactcttcatccaatttgccagtctgtgtcttttaattggagcatttagcccatttacatttaaggttaatattcttttttttttttttttttttttgagacggagtctcgctctgtcgcccaggctggagtgcagtggcgggatctcggctcactgcaagctccgcctcccgggttcacgccattctcctgcctcagcctcccaagtagctgggactacaggcgcccgccactacgcccggctaattttttgtatttttagtagagacggggtttcaccgttttagccgggatggtctcgatctcctgacctcgtgatccgcccgcctcggcctcccaaagtgctgggattacaggcatgagccactgcgcccggccaggttaatattcttatgtgtgaatttgatcctgtcatcatgatgttagctggttattttgctcattagttgatgcagtttcttcctagcctagatggcctttacaatgcggcatgtttttgcagtggctggtaccggttgttcctttccatgtttagtgctttcttcaggagctcttgtagggcaggcctggtggtgacaaaatctctcagcatttgcttgtctgtaaaggattttatttctccttcacttatgaagcttagtttggctggatatgaaattctgggttgaaaattcttttaagaatgctgaatattggcccccactctcttctggcttgtagagtttctgccaagagatcagctgttagtctgatgggcttccctttgtgggtaacccgatctttctctctggctgcccttaacattttttccttcatttcaaccttggtgaatctgacaattatgtatcttggagttgctcttctcgaggagtatctttgtggcgttctctgtatttcctgaatttgaatgttggcctgccttgctatattggggaagttctcctggataatatcctgcagagtgttttccaacttggttccattctccctgtcactttcaggtacaccaatcagacacagatttggtcttttcacatagtcccatatttcttggaggctttgttcgtttctttttttttttctctaaacttttcttcttgcttcatttcattcatttgatcttccatcactgatacgctttcttccagttgattgaatcagctactgaggcttgtgcattcatcatgtagttctcgtgctgtggttttcagctc

SEQ ID NO: 10614 - DNA, 36631 bp, Homo sapiens
aagcctcagtagccgatgggatcaagtggaagaaagggtatcagtgatggaagatcaaatgaatgaaacgaagtgagaagtttagacgaaaaagaataaaaagaaattaacaaagcctccaagaaatatgggactatgtgaaaagaccaaatctatgtctgattggtgtacctgaaagtgacagggagaatggaaccaagttggaaaacactctgcaggatattatccaggagaacttccccaatctagcaaggcaggccaacattcaaactcaggaaatacagagaatgccacaaagatactcctcaagaagagcaactccaagacacataattgtcagattcaccaaagttgaaatgaaggaaaaaatgttaagggcagccagagagaaaggtggggttacccacaaagggaagcccatcagactaacagctgatctctcagcagaaactctacaagccagaagagagtgggggccaatattcaacattcttaaagaaaagaattttcaaaccagaatttcatatgtagccaaactaagcttcataagtgaaggagaaataaaatagtttacagacaagcaaatgctgagagattttgtcatcaccaggcctgccctacaagagctcccgaaggaagcactaaacatgaaaaggaacaagtggtaccagccactgcaaaaacatgccaaattgtaaagactgtcgaggctaggaagaaactgcatcaactaatgagcaaaataaccacctaacatcataatgacaggatcaaattcacacataacaatattaactttaaatgtaaatgggctaaatgctccaattaaaagacacatactggcaaattggatagagtcaagacccatcagtgtgctgtattcaggaaacccatagcaagtgcagagacacacataggctcaaaataaagggatggaggaagacctaataagcaaatggaaaacaaaaaaaggcagtggttgcaaacctagtctctgataaaacagactttaaaccaacaaagatcaaaagagacaaagaaagccattacataatggtaaagggatcaattcagcaagaagagctaactatcctaaatatttatccacccaatacaggagcacccagattcataaagcaagtgattagaggcctagaaagagacttagactcccacacaataataatgggagattttaacaccccactgtcaacattagacaggtcaacgagacagaaagttaacaaggatatccaggaactgaactcagctctgcaccaagtggacctaatagacatctacagaactctccaccccaaatcaacagaatagacattcttctcagcaccacaccgcacttattccaaaattgaccacatagttggaagtaaaggtctccttagcaaatgtaaaagaacagaaattataacaaactgtctctcagaccacagtgcaatgaaactaggattcagcataaagaaattcactcaaagccgctcaactacatggaaaccgagcaacctgctcctgaatgactactgggtacataatgaaatgaaggcagaaataaagatgttctttgaaaccaacgagaacaaagacacaacataccagaatctctgggacacattcaaggcagtgtgtagagggaaatttatagcactaaatgcccactagagaaagcaggaaagatctaaaattgacaccataacatcacaattaaaagaactagagaagcaagagcaaacacattcaaaagctagcagaaggcaagaaataactaagatcagagctgaactgaaggaaataagagacacaaaaacccttcaaaaaatcaatgaatccaggagctgcttttttgaaaagatcaacaaaattgacagactgctagcaagactaatacagaagaaaagagagcagaatcaaatagacgcaataaaagatgataaaggggatatcaccactgatcccacagaaatacagactaccatcagagaataatactataaatacctctacgcaaataaactagaaagtctagaagaaatggataaattcctcgacacgtacacccccccaagactaaatcaggaagaatttgaatccctgaatagaccaataacaggctctgaaattgaggcaataattaatagcttaccaatcaaaaaaagtccaggacccaatggattcactgccaaattctaccagaagtacaaggaggagctggtaccattccttctgaaattattccaatcaatagaaaaagagggaatcctacctaactcattttatgaggccagcattatcctgataccaaaacctggcagagacataacaaaaaaagacaattttagaccaatatccctgacgaacatcgatgcagaaattctcaataaaatactggcaaaccgaattcagcagcatatcaaaaaccttatccaccctgataaagtgggcttcatcttgaaaagtcctttgacaaaattcaacaacccttcatgctaaaaactctcaataaattaggtattgatgggatgtatctcaaaataataagagctatttatgacaaacccacaggcaatatcatactgaatgggcaaaacctggaagcattcccttggaaaactggcacaagacagggatgccctctctcaccactcctattcaacatagtgttggaagttctggccagggcaattaggcaggagaaggaaataaagggtattgaattaggaaaagaggaagtcaaattgtccctgtttgcagatgacatgattgtatatctagaaaaccccatcgtctcagccccaaatctccttaagctgataggcaacttcagcaaagtctcaggatacaaagtcaatgtgcaaaaatcacaagcattcttacacaccagtaacagacagagagccaaaccatgagtgaactcccattcacaattgcttcaaaaagaataaaatacctaggaatccaacttacaagggatgtgaaggacctcttcaaggagaactacaaaccactgctcagtgaaataaaagaagatacaaacaaatggaagaacattccatgctcatgggtaggaagaatcaatatcatgaaaatggccatactgcccaaggtaatttgtagattcaatgccatctccatcaagttaccaatgactttcttcacagaattggaaaaaactactttaaagttcatatggaaccaaaaagagcccgcattgccaagtcaatcctaagccaaaagaataaagctggaggcatcacactacctgacttcaaactatactacaaggctacagtaaccaaaacagcatggtactggtaccaaaacagagatatagaacaatggaacagaacagagccctcagaaataacgccacatatctataaccatctgatctttgacaaagctgacaaaaaccagcaatggggaaaggattccctatttaataaatggtgctgggaaaactggttagccatatgtagaaagctgaaactggatcccttccttacaccttatacaaaaatcaattcaagatggattaaagacttacatgttagacctgaaaccgtaaaaaccctagaagaaaacctaggcaataccattcaggacataggcatgggcaaggacttcatgtctaaaacaccaaaagcaatggcaacaaaagccaaaattgacaaatgggatctaattaaactaaagagcttctgcacagcaaaagaaactaccatcagagtgaacaggcaacctacagaatgggagaaaacttttgcaacctactcatctgacaaagggctaatatccagaatctactatgaactcaaacaaatttacaagaaaaaaacaaacaaccccatcaaaaagtgggcaaaggatatgaacagacacttctcaaaagaagacctttatgcagccaaaggacacatgaaaaaacggtcatcatcactggccatcagagaaatgcaaatcaaaaccacaatgagataccatctcacagcctttagaatggcgatcattaaaaggtcaggaaacaagaggtgtggagaggatgtggagaaataggaacacttttacactgttggtgggactgtaaactagttcagccattgtggaggtcagtgtggcgattcctcagggatctagaactagaaataccatttgacccagccatcccattactggttatatacccaaaggattataaatcatgctgctataaagacacatgcacacatatgtttattgaggcactattcacaatagcaaagacttggaaccaacccaaatgtctaacaatgatagactggattaagaaaatgtggcacatatacaccatggaatactatgcagccataaaaaatgatgagttcatgtcctttgtagggacatggatgaaactggaaaccacctttctcagcaaactattgcaaggacaaaaaacaaaacactgcatgttctcactcaccggtgggaattgaacaatgagaacacatggacacaggaaggggaacatcacacaccggggactgttgtggggtggggggaagggggagggatagcattaggagatatacctaatattaaataacgagtcaatggctgcagcacaacaacatggcacatgtatacatatgtaactaacctgcacattgtgcacatataccctaaaacttaacgtataataataaaaaaaaaagagtctgaacacccaaagcaatcttaagcaaaaagaacaaagctggaagcaccacactatctgacttcaaactatagtacaaggctacagtaaccaaaacagcatggtactagtagaaaaacaaacacatagataaatgaacaggttagagaacccagaaataaatctgcacaccttacaaccatctgatctttgacaatgtcaacagtaagaagcaatggggtgaagacttcctattcaataaatggtgttgtgctaactggctagccatatgcagaatattgaaaatttacatcttcctttcaccacatacaaaagttaattcaagatggattaaagacttaaatgtaaaacctaaaactacagaaatcttggaagaaaacctgtgaaattccattctggacataggccctggcaaggatttcatgatgaagacttcaaaagaaactgcaatgtaaacaaaaattaaatggaacttaattaaactaaagagtttctgcacagcaaacaaaattgtcaacagaataaacagacaacttacagaatggaagaaaatacttgcaaactatgtgtatgacaaagatctaatacccagcatctataaggaacttaaattaacaagcaaaaaaccacaacctccttaaaaaataggcaaagaatatcaacagacacttctcaaaagaagacatatacatagccaacaagcatatttaaaaattctcaacatcactaatcatcagagaaatgcaaatcaaaaccacaatgagataccatctcacaccagtcagaatggctattattaaaatgtcaaaaaagtaacagattctagcaaggttgcagagaaaagagaatacttacactctgctggtgggaatgtaaattagttcagccactgtgaagggcagtttggtgatttctcaaagaacttaaaacagaacttaaaaactacctatgggtactatgctcattacctgtgtgacgaaacattctgtacaccaagcccccacaacatgcaatttacccatgtaacaaaccttcaaatgtagctgccgaacctaaaataagaggtggaaaaaaataatttttaaaaatctatctggtctttaatgggtatgtagtatatttttagtttgagactttttaaataaaatctatttttgtttgttttgtttttaatgtgttttttgtttgtttgcttttgtttagttacctgcttagactaattcaaactggggtgaagtgatatctcattgtggttttgatttgcatttccctactgattagtcatgttgagcatattatatttacctattggtcattcgtatgtcttcttttcagagttgtctaatcaggtcttttgccctttaaaatttaaataacttacttttttgccattgagctctttgagttccttatatattctggatcttaatccctttggatacgtagtttgcagatattttctaccattctgtagcttatttcctttgctgtgcagagcttgttagttagataaaatttcatttgtctattttgttttgtattaccagtgcttttgaggtcttatcgaaaatcttttcccagaccaacatgaagcattcccctatattttcttcttgtagtttcacaattttgggtcttacatttaagtctttaacccatcttcatttgattttgtatatggtgagatatagggctctagttttgttcttctgcatatggatattcagttttcccagcactatttattgaagagactgttctgtccccaatgtgtgtcttggcacttttgttaaaaataggttggctgtaaaggcatggatttatttctgggttatatattctgttccgctgatctatgtatctgtttttataccagtaccatgctgttttggttactatagttttgtagtatattttgaaatcaggtagtgtgatttctacagatttgccctttttgctcaagattactttggcttttggggtctttgatggttcaatattaatttagaatcatcttttctatttctatgaagtatgtcattggtattttgatagagattacattgaatctgtagattgctttgggtagtatgggcattttaacaatgccaattatttcaatctgtgaacataaaatacgatatgatttggccctgtgtccccacccaaatctcatcttgtagccaccataattcccatatgttgtgggagggacctagtgggagataattgaatcatggggacaagtctttcctgtgctgttctcatgttagtgaatgagtctcatgagatatgatagttttaaaaacagtagtttccatgcacaaactctcttctctcttgctgctgctgtgaaagaagtgccttttaccttctgccatgactgtgaggccaccccagctacgtggaactgtgagtccaaataaacctctttcttttgtaaattatctagtctcagatatgtctttattagcaggacgaaaatgaactagtacaaaatacctttccaataatttttgtccttttcaatttctttcatcagtgttttatagatttttttgtagagtttttacctcctttgttacatttattcttaagtatcttatattttgtagctattgtacatggaattgttttcttgatttatttttcagatattttgatgttggtgaaggaaatattactgctttttgtatatgcatttaatatcctgaaattttactgaatttattagtgctcatggctttttgatgaagtaattagtattttctgtatataaagttgtgatctccacaaacagggataatttgacttccttctttttaattgtatgccccgtatttctttctcttgcctaattaccctggctaggagttccagtacaatgttgactagaagtagtgaaagtggacatctttgcttagttccagattttagagaaatttctttcatcttttccccattttgttttatattagctgtgggtttctcatatgtggcttttattgtgtttaggtacgttccttatatacctaatttattgataacttttatcatagtgggatgttgaattctatcaaatgctttctctgtttctattgaaatgattacgtgcttttgtcctttattctattaatgtgatgcagtacatttattaatctgaatactttgaatcatccttgcatccctggaatgaatgccacttgattttaaaggctggtcttttaagtattctgttaaatttagtttgctagcattttcttgaggatttttgcatgcgtttcattagggatattggcctgtagtttttcctattttattttatttttttgagaaagtgtctcactctgtcacccaagctggagtgcagtggcacaatcacatctcaccacagcctcaacctcctgggcttgggtgatcctccaacctcagcctcctgagtagctaggactacaggcgcccaccaccatttttggctaatatttgtactttttttagagacaaggtttcatcatgttgacaggctggtcttgaactcctgggctcaagtgatccaccctccttggcttcccaaagtgctaggattacaggcatgagcaaccacttctgtcctgtaattttcttttttgtttttgttgtgtcatctagtttttatatcgggctaatgaatgctagtctcaaataataagtctggacaaatttactctcattcagtttttttgggggcagtttgagaagaacaggcattagttatttttaaaatatttggtagaattcagcagtgaggtcatcagctcctgtgctttctttaatgggagactttaaactattgtttcaatcttgttactcattattggcctgtttgaattttctgtttcttcatgattcaatcttgtggttgtatgagtccaggcatttacctatttcttctaagttttacaatttgttttcatatagttgttcataatggtctcttatggtcctttgtatttatattatattatttgtaaagtctccttttatatctatgattttatttttttgactcctctttttttcttaatttgtctagttaaaagtttgtcaggttttgtttttgatttttgagacagagtctagctccattgcccaggctggagtgcagtggcacgatctctgctcactgcaacctctgcctcccaggttcaagtgattctcctgattcagcctccctagtggctggaattacaggggcctgccaccacaatcagctaatttttgtatttttagtagagatggggtttcaccatgttgctcaggctggtgttgaactcttaacaagtgatccaccctcctcggcctcccaaagtgctgggattaagtggtgagccaccgtgcctggccaagtgttttatattttgaaaaaacgaagtcttctttgttattcttttgtgttgttttttaaggctctatttaatttatttctgtttttacatttatcgttgcttctcttctactagttttggcttgatgttgttcttgtttttctagttccttgagcaacatgaggttatctgaaatctttctactttttaaatgtaagcctttattgctgtagacttccctcttagaaatgcttttgctgtattccataggttttgttttgttttttttatttttttatttttttattattatactttaagttttagggtaatgtgcacattgtgcatgttagttacgtatgtatacatgtgccatgctggtgcgcggcacccactaactcgtcatctagcattaggtatatctcccaatgctatccctaccccctccccccaccccacaacagtccccagagtgtgatgttccccttcctgtgtccatgtgatctctttgttcaattcccacctatgagtgagaatatgcggtgtttggttttttgttcttgcgatagtttactgagaatgatgatttccaatttcatccatgtccctacaaaggacatgaactcatcattttttatggctgcatagtattccatggtgtatatatgccacattttcttaatccagtctatcattgttggacatttgggttggttccaagtctttgctattgtgaataatgccgcaataaacacacgtgtgcatgtgtctttatagcagcatgatttataatcctttgggtatatactcagtaatgggatggctgggtcaaatggtatttctagttctagatccctgaggaatcgccacactgacttccacaatggctgaactagtttacagtcccatcaacagtgtaaaagtgttcctatttctccacatcctccccagcacctgttgtttcctgactttttaatgattgccattctaactggtgtgagatggtatctcattgtggttttgatttgcatttctctgatggccagtgatgatgagcattttttaatgtgttttttggctgcataaaggtcttcttttgagaagtgtctgttcatgtcctttgcccactttttgatggggttgtttgtttttttcttgtaaatttgtttgagttcattgtagattctcgatattagccctttgtcagatgagtaggttgcaaaaattttctcccattttgtaggttgcctgttcactctgatggtagtttcttttgctgtgcagaagctctttagtttaattagatcccatttgtcaattttggcttttgttgccattgcttttggtgttttagacatgaagtccttgcccatgcctatgtcctgaatggtattgcctaggttttcttgtagggtttttatggttttagctctaacgtttaagtctttaatccatcttgaattaatttttgtatgaggtgtaaggaagggatccagtttcagctttctacatatggctagccaattatcccagcaccatttattaaatggggaatcctttccccattgctggtttttctcaggtttgtcaaagatcagatagttgtagatatgtggcattaattttgagggctctgttctgttccattgatctatatctctgttttggttccagtaccatgctgttttggttactgtagccttgtagtatagtttgaagtcaggtagtgtgatgcctccagctttgttcttttggcttacgattgacttggcaatgcgggctcttttttggttccatatgaactaaaaatagttttttccaattctgtgaagaaaggcattggtagcttgatggggatggcattgaatctgtaaattaccttgggcagtatggccattttcatgatattgattcttcctacccatgagcatggaatgttcttccatttgtttttatcctcttttatttcattgagcagtggtttgtagttctccttgaagaggtccttcacatcccttgtaagttggattcctaggtattttattctctttaaagcaattgtgaatgggatttcactcatgatttggctctctgtttgtctgttgttggtgtataagaatgcttgtgatttttgtacattgattttgtatcctgagattttgctgaagttgcttatctgcttaaggagattttgggctgagacaatggggttttctagatatacaatcatgtcgtctgcaaacagggacaatttgacttcctcttttcctaattgaataccctttatttccttctcctgcctaattgccctggccagaacttccaacactatgttgaataggagtggtgagagagggcatccttgtcttgtgccagttttcaaagtgaatacttccagtttttgcccattcagtatgatattggctgtgggtttgtcatagatagctcttattattttgaaatacgtcccatcaatacctaatttattgagagttttgagcatgaagggttgttgaattttgtcaaaggtcttttctgcatctattgagataatcatgtggtttttgtctttggctctgtttatatgctggattacatttattgatttgcgtatattgaaccagccttgcatcccagggatgaagcccacttgatcatggtggataagctttttgatgtgctgctggatttggtttggcagtattttattgaggatttttgcatcaatgttcatcaaggatattgattggtctaaaattctcttttttggttgtgtctctgcccggctttggtatcagaatgatgctggcctcataaaatgagttagggaggattccctctttttctattgattggaatagtttcagaaggaatggtaccagttcctccttgtacctctggtagaattcggctgtgaatccatctggtcctggactcttttttgttggtaaggtattgattattgccacaatttcatatcctgttattggtctattcagagattcaacttcttcctggtttagtcttgggagagtgtatgtgtcgaggaatttatccatttcttcttgattttctagtttatttgcgtagaggtgtttgtagtattctctgatggtagtttgtatttccgtgggatcggtggtgatatcccctttatcatttttttattgtgtctatttgattcttctctctttttttctttattagtcttgctagtggtctatctattttgttgatcctttcaaaaaaccagctcctggattcattaattttttgaagggtttttgtgtctctatttccttcagttctgctctgattttagttatctcttgccttctgctagcttttgaatgtgtttgctcttgcttttctagttcttttaactgtgatgttaggatgtcaattttggatgtttcctgctttctcttgtgggcatttagtgctataaatttccctctacacactgctttgaatgcgtcccagagattctggtatgttgtgtgtttgttcttgttcatttcaaagaacatctttatttctgccttcatttcattatgtacccagtagtcattcagaagcaggttgttcagtttccatgtagttgtgcggttttgagtgagattcttaattctgagttctaatttgattgcactgtggtctgagagatagtttgttataatttctgttcctttacatttgctgaggagagctttactgccaactatgtgatcaattttggaataggtgtggtgtggtgctgaaaaaaatgtatattctgttgatttggggtggagagttctgtagatgtctattaggtccgcttggggcagagctgagttcaattcctgggtatccttgttgactttctgtcttgttgatctgtctaatcttgacagtggggtgttaaagtctcccattattaatgtgtgggagtctaagtctctttgtaggtcactcaggacttgctttatggatctgggtgctcctgtattgggtgcatatatatttaggatagttaactcttcttgttgaattgatccctttaccattctgtaatggtcttctttgtctcttttgatctttattagtttaaagtcggttttatcagagactaggattgcaatccctgcctttttttgttttccatttgcttggtagatcttcctccatccttttatttttagcctgtgtgtgtctctgcacgtgagatgggtttcctgaatacagcacactgatgggtcttgactctttatccaatttgccagtctgtgtcttctaattggagcatttagtccatttacatttaaagttaatattgttatgtgtgaatttgatcctgtcattatgatgttaggtggttattttgttcattagttgatgcagtttcttcctagtcttgatggtctttacattttggcatgattttgcagcagcttgtaccggttgttcctttccatgtttagcgcttccttcaggagctcttttagggcaggcctgttggtgacaaaatctttcagcatttgcttgtctgtaaggtattttatttctccttcacttatgaagcttagtttggctggatatttaattctgggttgaaaattcttttctttaagaatgttgaatattggcccccactctcttctggcttgtagggtttctgccaagagatccgctgttagtctgatgggcttccctttgagggtaacccgacctttctctctggctgcccttaacattttttccttcatttcaactttggtgaatctgacaattatgtgtcttggagttgctcttctcgaggagtatctttgtggtgttctctgtatttcctgaatctgaacgttggcctgccttgctagattggggaagttctcctggataatatcctgcagagtgttttccaacttggttccattctccccgtcactttcaggtacaccaatcagacgtagatttggtcttttcacatagtcccatatttcttggaggctttgttgatttctttttattcttttttctctaaacttcccttctcacttcatttcattcatttcatcttccatcaatgataccctttcttccagttgatcgcatcagctcctgaggcttctgcattcttcacgtagttcttgagccttggttgtcagctccatcactcctttaagcacttctctgtgttggttattctagttatacattcttctaaatttttttccaagttttcaacttctttgcctttggtttgaatgtcctcctgtagctcagagtaatttgatcgtctgaagccttcttctctcagctcgtcaaagtcgttctctgtccagctttgttccattgctggtgaggaactgcgttcctttggaggaggagaggcgctctgctttttagagtttccagtttttctgttctgttttttccccatctttgtggttttatctattttggtctttgatgatggtgatgtacagatgagtttttgatgtggatgtcctttctgtttgttagttttccttctaacagacaggaccctcagctgcaggtctgttggagtaccctgccgtgtgaggtgtcagtgtgcccctgctggggggtgcctcccagttaggctgctcgggagtcaggggtcagggacccgcttgaggaggcagtctgcccgttctcagatctccagctgcgtactgggagaaccactgctctcttcaaagctgtcagacagggacatttaagtctgcagaggttacagctttttgtttgtctgtgccctgcccccagaggtggagcctacagaggcaggcaggcctccttgagctgtggtgggctccacccagttcgagcttcctggctgctttgtttacctaagcaagcctgggcaatggtgggcgcccctgcctcagcctcactgccgccttgcagtttgatctcagactgcggtgctagcaatcagctagactctgtgggcgtaggaccctccgaagcaggtgtgggatataatctcatggtgtgccgttttttaagtccgttggaaaagcgcagtattcgggtgggagtgacccgattttccaggtgccgtccgtcacccctttctttgactaggaaagggaactccctgaccccttgcacttcccgagtgaggcaatgcctcaccccgcttcagctggcacacggtgtgcgcacccactgacctgcacccactgtctggcactccctagtgagacgaacccggtacctcagatggaaatgcagaaatcacccatcttctgcgtcactcaggctgggagctgtagaccggagctcttcctatttggccatcttggctcctccccctccataggtttttgtgtgttgtgttcccatttccattttttcaagaaatattgaaattttctttttgatttttttcactgaaccactggttgttcagctgtatgttgtctaatttccatgtatttgtagtttccaaagttcctcctcttattgatttctagttctataccattattgttgaaaaaaacattttttgatttttaattttttaatatgttaagacttttattgcagcttaacataagatatatcctggagaatgttccatgtactgtggagaagaatgtatattctgcaactactggatagaatgttctttaagcatctgttaggttcatttggtcaggagttcagtttaactctcattttttgttgatattctgtctggattatctgtttatcactgaagataagatgttcaagtgttatactattgttgtattgtacgctatatctccctgtaggcctattagcatttgctttatatatttgtatgttcaattgttgggtacatgcatatttataattgttatattctctttctgtatttacccctgtatcagtttttaattagcatatttgtctttttttacagtttttttggcttaaagtctattatgtctgatataagtatagctacttctgctccattttgctctccatttgcatggaatatctttttctatcccttcactttcagtctatttgtgttcttctgcgtaaagtgaggctcttataggcagcatatagttgagtctttaaaaaaatcaatttagctactttatgttgtttaataggaaaatttaatccatttacattcaaggtaactaccaataggtaaggaggtactactgacattttgttacttctttcctagttattttgtagatccttccttcttttctaccactcttgctatatccttttgtggttaagtgatattctccaacattatgctttgattcactgctgtttatctttagtgtatctattataggtttttactttgtggttatcatgaggctttgaaatacatattttgtttacatcaagttgttttattttattttaaatttcctacttttattttaagtccaggggtacatgtgcaggatgtataggcttattacataggaaaacgtgtgccatggtggtttactgcacagatcatcccattacccaggtattaaccccagcatccattagctattcttcctgatcttctccctcctctcatccaccacactcaggccccagtgtgtgttgctccccaccatgtgtccatgtataacaagttattttaagctaataggaacttaattttaatcagaaaagaaaggaaacaaaaatattgtacactctaactcctttcttctcaagtattttgaattttcatgtcccaatttacatcttttgtatggtttatcttttaataaagtattttagttatcatttttaagagctttgtatttttgtattcatactaaagttataagtggtttacataccataattacaatgttagatatcccaaatttatctgtattcctacatttattcatttatttaaaggcagggtcttactctatcacccaggctggagtgctgtgactcaatcttggctcactgcaacctctgcctcctaggctcaaggaattatcctatttcagcctcttgaatagctgggactacagacacaagccaccatggctggctatttattttttttctgtttttttttttttgtgtgtgtgtgttttctcgtaagatgcggttttgccatgttgcccaggctgaactcaaatccttgggttttttagtcaatccacttgcctcagctttctaaagtggtggggttacagccatgagctaccatgcctggcctgtatacttacctttaccagtgagttttataccttttgatattttcttgttacacattagcattttttttctttcaagttgaagaacttcctttgttatttcttgtaagacagatctggtggtgttgcatttacttggcttttgtttgtctggaagagcctttatctctccttcatttctgaaggacatatttgccagttactttattcttggttggcattctttttctttcagcattctgaatatattgccctacactttttggcctgcaaggtttctgctgaaaagtctgctgccaggcatatcaacattcccttacatgttatttgcttcttttctattactgcttttagaatgctctgtttttatttcgagagtcaaagggtatgtcttgaggtagttccatttgtgttgaatatgattgatggcctttgaccttcctttacttgagcatttacatctttttccaggattgtaaaattttcttttatgatttctgtgaataagccgtctatttccttgtctttttctgtaccctcttgaactccaatgacccaagtatttgctctttcaatagtatcccatagactccatgaacttcacttgtttctttttttttattctttttcccactttggccatatttcaaatagtctatcttagatttcactgatttttttttcttctgcttgattaattctgctgttaatgctcgtattgcatttcttatttcattaattgtatcttttagctctaggatttctgttagatttttcattactttagtccctgttaaacttctctgataaatttctgaactgcttttctctgtgttttactgaaattcactaagcttccttaacaagctattctgaattccttgagagataatacttctgcatcactttagggtttgtcactggcatcgtgttttgtctgtttggtgaggtcaaaattccctggttgttcttgatgcttgtgtatgtacattgatgtatttgctctgaaaaaaggtatttatttcagtcttcacagtctggctttgtttgtgcctgtttttcttcactgggcctctccagaatttaagcaaacctaatgttagatcgcatgactgctgcagccatttcagcactagaggaaactctaagcctaggttcactgtgagtctcatgagggctgtcaggttggcatggagcccttatgtagaaggacgtggtgaagacccaaggagggtgcccaagctgtgtgaggaagctggccagggacctaagtccaggagcctgtctcattggctcagatgtgggaggagctggagctgagactgggtcccctcaggatctgctttgggacaaaggctggtggtcccaccaaggagtttcagaaaaatgggtgattgcctggctatgagataagggtaagtctttctctaggtatccttgtgtgagcagtaataaactcagatcacagctgagtgggtctggagccaaattacagggtaagtttcagattcactgccaacatttaacggacagaagagattttctgccaagttattagtgtgcatgattcctcctagacacattggtagatgtttttggttcaagactcaagacaaaattggagtgtagccaagccttttgttaacaaggatgtctccaagtttgaaacctgcagtatcattggtgggtctgctatccaggtgctggtctgcaatcccaaagctgcctacctagggccttgattccactgaattttcacagattactccctgattcctgaggcttctacagagagacttttgtctgtggatgagtagataattcttggagttgggggatatgagtgggttacctcctattccaccatctttctgacatagtgtttgtatttctattctgactataacatatatagtgggattagatgaatacataattacattgattcatcggaaaccaagattttccgtgtgggagaaaagagaagtagaagtgagactgatgagttaaacacatagttttgaatttgaagtgaaagtgtaaatatgagcttgtgatgatatttatcctcaaaaaaatttccacaggctaatttttttttaggttttcccccttagaaggcctagaaactaggattaacccagtaatttccgtatcacattttttccaactaacaaggaccagagatccttgctaatttctagtgtagggcaagaagtttcggcaagaaccttgagcaactttgccacatcaggaagtaatacagtcttgatgacagaggtgtattgatggagctcaggaagaattgacttgaaaagaatctcattgtcacagataggacaatttgagcttcaataaaacaactactatgatagatacaagcatttcaaataagctgaaattcatgagtatacaattatgcaaaaaaatattgatcacttgtggagaatgccatataaagcattcattctcttgagaacgggcaaataaatagaaagaataactatcttattaccttgattccatcaaggtaataagatagttactgaagataatgtctctttaggaatattctaagtaataagtgaagaatgtttaatatatttttctttcacccctaggccattcattcataagatatgacccagggcactttgaggtccctgactccttttctgagggtccatagttcccaataaatcctaacaatactaccaggttaaatttttaattctattcttctcatgattttatgttgttctccagagactacatggaatatgatattgcatcagattggatgccaaagcagatatgaaaatgtagctgttttcttattaagccagacattaaagagaattgccaaaatactaaataaataaataaatagatgcagctgtaaagccacgcttctcactacatttttgaaaaacatttaaaaataaagatgtaatttttgttgatatgtaatccatgtttaattgtagagaagtttataaatattttaattattagtttattagtttttacttctaagatatatctagctatctgtctggacatacattttatacacacacacacacacacacacacgcacacacacaatttccatcacacagagaaaagcttttctggtgatctcaatctttttttattgtggtaaaatacacatatataagatttaccattttgccatttttaagtgtacaattctgtgttattaagtacattcacactgttgtgccaccttcaatataacttgtacatatgtaaaatgtgtaagagttgagacctattaatctagtaatgaatgaagaccattaagcattatatgcctcttgtgagatatacatagtataataaaacctgaatctgagcacatcacaaatctatttatttattttttattttttcttgagacggagtcttgctctgttgcccaagctggagtgcagtggcgcgatctcggctcactgcaagctccgcctcccgggttcatgccattctcctgcctcagcctccctgagtagctgggactacaggtgcccaccatcatgcccggctaattttttttgtagttttagtagagatggggtttcaccgtgttagccaggatggtctcaatcaactgacctcgtgatccgcccgcctcggcctcccaaagtgctgggattacaggcgtgagccaccatgcccggcccacaaatctatttatatatagtaaataaagagaacaaaggggcatgttaaatgacattatagctatgtaatcagcaaaatccaaactgtggatgattttacaagaagaatgatgaaatttcttaaaaaacaaattctaggataaaaatgagagaagaatcctacagattaaaaacggtttatgaaacatcaactaattttaatgcatgaatcttatttttattccaatttaatgaataaactgtaaaaacaattcatgagacaattggaaaaaatttgaatgctgaacaactatatatttaatgatattaagaaatcttttatttggggatgtcataatgtaatttcggctatatgttaaaaaagtctatatgttacagaaagacatgttgaaatagttaaggatgaaatgatacaatatctaaaatttattttaatcatgagttgataattttttcaaaactgtctaatgagcaaaggatagtttttatactgctttatgtttgcacatataaaattattattattattattattatttttggagacagggtcttgctctgtcacccaggctggagtgcagtggcacaatcttggctcactgcaacctccacttgctgggttcaagtgattctcctgcctcagccttccaagtagctgggactacagccatgcaccaccatgcccggctaatttttgtatttttagtagagacagatttttgccatgttggtcagcctggtctcaaactcctgacctcaggtgatccacctgcctcggcctcccaaagtgctgggattacaggcgtgagccaccacgcttggcccctataaaattattaattaatggaccagcgctggctggtccattttacagagtgcagattggtctattttacagagcactgattggtgcattttacaaacctcttgctagctacagagcactgattggtgtgtttttacagagcattgattggtgcattttacaaaactcttgctagctacagaaaagttataggagtccccactcaacccagggagtgcagctggcttcacctctcactatgaccctttaaaagctagactatagctgtagtaagccaagggtggttttctccaaaggagtttggaacagaaataaagaaaacataatattttttggctaagtggaaactattttagcaagatgaggagaatctacaatatcaactaaaaagaaaaaaaaatggaagaaagtagatgactctgaaagaaaacacttaacttggcagttacagcaactcagatagtttttactgagaaaatgaatttgcagctaagagatcttgccagagatctacaaatagggaacactgtcctcaaggaacttacaaagagaaggggaggaaaaacaaaaataactccaatgctgtgagtaaagtgtaaagtggatctctgcatagttccttttattatagcactaggaaagtcttcctgaggaagaaacatctcagctgagccttcagggctagaaattcatccaggcagagacagagaagaaattacatccaaaaggctctgcatctctgcaaatacagtgattctggcataattatatttggttttctttgacaaatgatatttaaccagaagcagaaaaagaaaagttttaaattaggaagccaaagggagtcaccattaagtcatatgtattatatttcatttattttgagacacattttttctaacattttaatgtgtgtaaaatcagggtgaatcacactgttagtacagtctcataataaatttacagttttaagtacttttttgctgatgtttaaataataatttattttaaaatacatgaaaactctgatttcatcaaatttgaaaatcatttgaaatatgataagattgacttttgggctgatatcttgggcttcttggtacttattgcgaatgggagaggagacatgatgatggctcatgggatattctgatatgacctgttaaaaacagaagaacaaaagagctccacataaaagatgtttgtacacccatgctcatagtaatattattcatgatagttaaaagtgaaagcaacccaagtgtccatagatagacgaatggatgaacaaaatgtgttatacgcatatggtggaatattgttcagtttcaaaaaaggaaggaagccctttcatatgctacaatgaggatattacgctaaatgaaataagtcacaaaaagacaaatatttacaattccacttatataaggtacctagaatagtagaattcatagagacagaatgtagagctgtcctaaccagggcctggagaagaggggaaatgggaacttgcagcgtaataggaatagagtttcagtcttgcaagacagaagagttttgaagattgcttgcacaacaatgtgaacacacttaacaccactgaactgtacacttaaaaatggtaaagatggtaaaccttatgttatgtgtattttaacagaattttttttaagtccacataaaacgaatgggagtttggggaaaggatatggtgaaaggattgaggataaacaatttttaaatagataaaatggtaaaaaacagtggaagggtgaacagaaaagacatattaaaaaaaaaaacaacaccacccacaactcaccggcgcctcatataccataatgcaaggcatagcaaaaggagcaaggaaggcactattattgccaaaacaattgagccaatggaggtggggtttcctggcaattgagagaggacaaaaggatgtcacttcagatactatacacagaattccttggccttcctttgcccacctacttccaatgtatggtcatttccaacttcctctctcatattcctggccaccatatatccatcctttgatcccctctacccagtttacaggtccttaattcctacatttttgataacttggattatctatttttactcctgttgggattggggtcagggaaatcaatcaatcaatctctccctctttcatctctcaagctctatccttccccagtgcctccctctatgcctgaagatcacttcctggcatttccagcctgggtccctgctatttcttactccagtagaggatgatgtcctggccctctaaactgctgtgcttcacccgacaggacaggccagccgcctccccatctgccacatccagggttgctcggagataccatgtccagttagcattgggcaggatgtcccctagctgagtgccctgctgctcctgctcaccccgcatccacatcacccacacgggctttgggtagaatcctgagacatggcacacaagctgcagacggccaggtccaggactggggccactggacagccaggcctcaggcttcactaaggcaggaaggagaaaaaaaagtgtcatgttataactcgagttcagaggttatgaactcagaaacctacaagcttggacagcgaccccattcactcctttgggaaccaaataacttgttatttaagctcctatcctttgatatcttcctactcttgatcttagaggaggtggtgggaagtgaaataacagcaggactaaccttgtctttgcagatctgcttttcctgcattgaggacgcccaagagatatcgggggcaggtttcatagaggagaattctcacagtttccatgataccttgatattgtatgattagtgcacagaatttctgtgccctgctgccaccttctggggaaggcacacatgaagcattcttgacactcaggaaatccaatcctcctagagctcccctcaggaagcttactatggcacctccagaatgtagctcacagcctgctatgccctggatctcaaaggggtctatgtagagggaaaagagagcaagttattaaacacaaataagaaaaaaaggcatgagaaaagaacctaggattttagattttggtggggataaagttatttggtgtaaaatgatgatgagctaaaaactaatgataacatttagacattttcagaaacaagagcattgagaaaaatgtgcatgccatgaagacaaaggtatgtgataaaggagtacagtgagtatgaaaggagaggtgaggcagagcgtggtgcagtcaggagtgcagcattccagagtgagtggaggttcccagcaagaggagggtgcggggaggagatgattgaaaagatggattaggggagaaagccacacgttagatcactcaggcacagggtaggagaagtaagggcccttgaggagaagtttcacataagacaaaccagcagctggttacaaagtggaagacagtctgagagtaagagaagagtgcagaggcagcaagaatctgaaatatgaggtgtgatggtgtgaagctggagtgagagactactcaagaaaagcatgtgcgtgcatttgggtaaaatagaaaggaagggagaagcatcagagagagcaacactttgcaaaaaagagagaaaagagagtccttgagactcttcccagttcggtggactagactcacatttcatctggaaatcaccggcaaagtcttgtacttctcgagcgaatccaaagatgtagactcggaatatctcctctaactcagcaacctccttatcactaaagttacctttagaccaaggcttcaggaatatggcagtgcctgagtcgctatcccagccatgaatctgcaaatcatccaaccagcctgagccttgagtttgtgcccaggtactattggtaaaggacgaggtctggataacatgaaaggaggtcggcccctggaaggctgtgaagagtggaaaagcaagatggtgaagataaagagagaagcaggagacaattaggaagaatgggaatgaaaatgatttagaaaacaagaacctagagtctaaagaacacaggaagtctgacacatttgactgccttaaggcttcaggttctagtcccaaccaccagaatggttgaagagggcgggagacagaaagacccagacccttagtgtccaattgcacctaggaaagccctgcttgctttttaaaatccaaacccctgcaccagtgctgggagctgccagagtgactcttaccatgttcactgttaccaccaggaaagagaacagctaacagttgaaatggcagcagcagcatttcactgggagatgcaacttcttactggcagagctggtatttgatctccaatttcagcaaagcttttcctcagtaccctgtagtgacttcttctctcttccaactgccaaatctcttcctcatccaaactgcttttcagagaaaaatgtgcctcccacagccctgagcctcttacctcaccttttatttccctcaagccctgatttttagagtttctcttaccccctgacttccagccgctctccctgtcctcaccttccttcatacctccttggaaaagcccccatatgattctgcattttcatttctccttccttagcctttattcccacatctataggataagatggtgatattaagcaattgctaagcttttagtctgctttaacccagaaggatgcttttagtttatccacctcacttagtttctccccctcccagctgccttatcttctctggcactctgttactgcctcttcccaatgttttcaatgtcttctctttcttatattgccctctttgtctggtgttccttaccccacattctaaactggctgtgagtgtgtgtgtgtgtgtgtctgtgtctgtgtgtgtatgtgtatgtgtgtgtaccgatattcacttacataaaggcaaagcatttaaaacatttcctgtactatagcactacaaaccaaaatgccagaatcaaatataataaagactgaagtttataattcaaacaaaattatactatagcaatatttgagggaaaaaatgacaattgctgctagcatgtgaccttctcttcaggagctcttggcctatggagttttgagtaacaaatattcatgacataaacagaactctaggagctatgctatgtgcacctccagcctaagtcaaagataactttttgggtaagttgccataagcggcagagcttttttcttctcttgtaatatctcataactgctgtctacatttgggcattcatatcaccacatgtggtattaataatagagcaaagaggttgcttttttttatacaaaaagttcagagatacttgttttaagatgtcacctcctatcttcttgtatgcccatgaaaaattttaagaagaatttttggattttctccatttaggaaaaaaatcacatatttgcagagatctatgtatcatgcagaaatgtggcagcaatcgattccgagtaaagagggttatcactaactaattctattatgtggataagaaaatgcaaagtgagtagtgtagtgttctctattcctggggacactactggttcacaacattaataagactggttcacaacattaataagactagccttcatccaagattattactgcctaattgataaatacagagcagctctccaaatttcaatgtatgtatctcttaacaacattcccagactccaatacatgacagaattgaatctactttttggataacagccatagacaacagcagagacttaacattggctgtcacagacatgaacattactatttttgtgtttatacgttttttattttgggtagaacacccaaaacagagctcaggaaaagctggtagacaacctgggctattttccattaaaataagtgagttcttgcaagactcccaaagttgaattgctacaaactaaatctgaaatgttcctcattttaaaaaataatccaaaagagttggcagggcacaggagactatcacaacactagccccacactcatcaaacttttttttttcttgagacagagtcttgctctgttgcccaggctggagtgcagtggcatgatctcggctcactgcagcctctgcctcttgggttcaagtgattctcctgcctcagcctcctaagtagctggaactgtaggcatgtgccactatgcccagctaatgtttgtatttttagtagagactgtgtttcaccatgttggccaggatggtcttgatctcctgaccttgtgatctgcccacctcagcctcccaaagtgccaggattacaggcatgatccaccacgcccggccactcatcaaatttttaaacaagttaggcctaaaacatgagaacagtaatccagtcaaaattatgttaccagaaaggaatattagtattgccaaagactgagttagaaattgagttgtgcctgagagatggaagatagaggaagaggtcttggtttcagtttcaacagcgtgtaagtttttgccaaatatgtgcagaatgtctacctaaataacaaacagaaaaagaggctctctaaaagaaaaagatatttatttgagaatagagcattgcaatgggaatatatatgcaatagtaaacgatgtgcatactcagggaggtaaaggaaggcaaattttttaaagaaaaaaaattaagagaattacatatttgttttgaaataattatccttgcctacaaatatcaataacaacggtgacaccagtcagaggttaaacagacagttgctggcagggcagatgtctttgaggcatttttcatgtaaggttgtgatggccttttcaaggttgtggtttttgcagagtctttcgtggtagttgttcttattaggtatacaagtgtgagaaccctctctgcatagtcttccctagctctgccagttttttttttttttccttagtgactccgttttgtttctggcaacatttgcaagaagatgactgtaaatttaaatttagttaggaaaatcgccagacaaaatgaaaattttgtaattcttcaaatgtcatatttgagggaaaaatttactttatacactgtcttttccctgaaaagtggagcaattgagatagtttgaaaggtctagaaattaaccaggttttcaagttacattctttctcacatatcatatccagtatttcatatttcctttctgtttcaaaagtacagaaatggacatggcagtgtccacagtgtccacatagcaatgtcacacatttccatactacactgtgactatgcttgtccagctctatggcatggtttgtatttccactctgcattagtaccattgttgcttgacatatgaaacctgtcttctagggaaagattatccctagtcccaatatttgtttcaaattaaaaaatcaacatgtgcacacttctaaatcgaagctttaattgatgcttctaactcatactctcctatgggcctaaagaccatgtacacttctgataagctcatcaagacacaggttttctcagatattgattgcataatctcacttatatgtggaatcttaaaagagttgagtacacagaaatagagaataaaacagtgattaccaggggcaggaagcaggtggtggtgggaggaaatgaggagatgtaggtcaaagaatacaaagtagccgatgagtagtcccttctgaattgcagaggatacattccaagacttctggtggatgcccaaaaccacaaatagtgctgaacctgattgctgccaattggagcccctttctgttcatgtcctccacccacaaatttgatggctttttaagatcttaactaagcacttaccacacactctgatcataacctttgcaatttgaggtgtgatggtaaaatttgtacaattcccttttccccatcacaattttatggaaagaagattcctttttactgtagaacatagcaacatcagcatattttgtttctttccttattaagtcaaaaacttaacaccttttcatttaaaggaagcacttaatggcttctctttggcatatttgaattacaagcatcactacttctgtgctttggggctgttattaagtaaaataagggttacttgaacacaagcactggagaccaggacagctgatctgataactgagccagctactaagtgactaagggttgggtagcatatacagtggagatatgataattaaggggtgatttgcatccttgtccagatgaagtaggctggcctgaaatttcatcatactacttagaatggtgcacaattgaaaacttatagattatttatttctggaattgcccatttaatattttcagactgccattgaccatgggtaactaaaactgtggaaaacaaaaccatgaattaaggaggggtctactgtatattataaataaaaaaatattttgaccttgctaccagtatccatgttaaattaacttattacatttaatattttatctatagatccttttggattttctaatgatatctctaaatatgaaagtttcattagatttttttcaattgttataccttttattatattttttgcccattttccctggcctatgacctccagtaaaatgataaatagaattattgatagctactttttttttttaaacagagtcttgctctgtcactcaggctggagtgcaatggtgcgatgtcagctcactgcgacctccacctcctgggttcaagcaagtctcctgcctcagcctcccaagtagctgacattacaggcatctgctaccatgtgtggctattttttttgtatttttagtagagacggggtttcactatgttggataagctggtctcaaactcctgacctcaggtgatccacctgtgttggcctcccaaagtgctgggattacaggcgtgagccaccgcacctggcccagataagattttttaagaggttaggtggttccaagatggctgaagaggaacagctccagtctatagctcccagcgtgagtgacgcagaagagggtgatttctgcgtttccaactgtggtacccggttcatctcactggggcttgtcagacagtgggtgcaggacagtgggtgtagcccaccaagcatgagacgaaacagggtgaggcatcacctcaccagggaagtgcaaggggtcagggaattcccttttcaagccaagggaagctgtgacagatggcacctggaaaatcgggtcactcccgccctaatactgagcttttccaatacttagcaaacggcacaccaggagattacatcctgcgcctggctcagagggtcccatgcccatggagcctcactcattgctagcacagcagtctgagatcgaactgcaaggctgaagcaaggatgggggagaggcacctgccattgctgaggcttgggtaggtaaacaaagtggccaggaagctcgaactgggtgtggcccaccgcagctcaaggaggcctgcctgcctctagagactccacctctgggggcggggcatagctgaacaaaaggcagcagaaacctctgcagacttaaatgtccctgtctgacagctttgaagagagtagtggttctcccagcacggagtttgagatctgagaatggtcagactgcctcctcaagtgggtctctgacccccgagtagcctaactgggaggcaccccccagcaggggcagactgacacctcacacggctgggtattcctctgagatgaagcttccagaggaacgatcaggcagcaacatttgctgttcagcaatatctgctgttctccagcctctgctgctgatatccaggcaaacagggtctggagtggacctccagcaaactccaatcaacctgcagctgagggtcctgactgttagaatgaaaactaacaaaagaaaggacatccacataaaagccccatctgtacatcaccatcatcaaagatcaaaggtagataaaaccacaaagatggggaaaaaacagagcagaaaaactggaaactctaaaattcagagcacctctctccctccaaaggaacacagctcctcaacagcaatggaacaaagctggacagagaatgactttgacaagttgagagaagaaggcttcagatgatcaaacttctcagagctaaaggaggaagttggaacccatcacaaagaagctaaaatccttgaaaaaagattagatgaatggctaactagaataaccagtttagagaagcccttaaatgacctgatggagctgaaaaccatggcacgagaactacatgacgaatgcacaagcttcagtagctgatttgatcaactggaagaaaggatatcagtgatggaagatccaatgaatgaaacaaagcaagaagagaaatttagagaaaaaagaataaaaagaaatgaatgaagcctccaagaaatatgggatgatgtgaaaagaccaaatctatgtctaactggtgtacctgaaagtgatggggacagtggaaccaagttggaaaacaatctgcaagatattatccaggagaacttccccaacctagcaaggcaggccaacattcacattcaggaaatacagataatgccacaaagatactccttgagaagagcaaccccaagacacataattttcagattcaccaaagttgaaatgaaggaaaaaatgttaagggcagccagagagaaaggtcaggttacccacaaagggaagcccatcagactaacagctgatctgttggcagaaactctgcaagccagaagagagtgggggccaatattcaacattcttaaagaaaataattttcaacccagaatttcatatccagccaaactaaggttcataagtgaaggagaaataaaatcctttatagacaagcaaatgctgagagattttgtcaccaccaggcctgccctacatgagctcctgaaggaagcactaaacatggaaaggaacaactggtaccagccacgcaaaaacatgccaaattgtaaagaccatcgatgctaggaagaaactgcatcaactaacgagtaaaataaccagctaacatcataatgacaggatcaaattcacacataacaatattaaccttaaatgtaaatgggctaaatgctccaattaaaagacacagactggaaattggataaagagtcaagacccatcagtgtgctgtattcaggagacccatctcacatacagagacacacatgggctcaaaataaagggatgggggaagatctaccaagcaaatggaaaacaaaaaaaaggcaggggttgcaatcctagtctcggataaaacagactttaagccaagaaagatcaaaagagacaaagaaggccattacataatggtaaaggggtcaatttaacaagaacagctaattatcctaaatatatatgcacccaatacaggagcacccagattcataaagcaagtccttagagacctacaaagagacttagactcccacacaataataatgggagactttaacaccccactgtagacattagacagattaacaagagagaaagttaacaaagatatccaggaattgaactcagctctgcaccaagtggacctaatcggcatctacagaactatctgccccaaaccaacagaatatacattcttctcagcaccacatcacacttattccaaaattgaccacatagttggaagtaaaggtctcctcagcaaatgtaaaagaacagaaattgttacaaactgtctctcagatcacagtgcaatcaaactagaactcagtgttaagaaactcactcaaaaccactcaactacatggaaattgaacaactggctcctgagtgactactgggtacctaatgaaatgaaggcagaaataaagatgttctttgaaaccaatgagaacaaacacacaacataccagaatctctgggaaacatttaaagcagcctgtagagggaaatttatagcactaaatgcccacaagagaaagcaagaaagatctaaaattgacatcctaatttcacaattaaaagaactagagaagcaagagcaaacacattcaaaagctagcagaaggcaagaaataactaagatcggagcagaactgaaggagatggagacacaaaaaaaccttcaaaaaatcaatgaatccaggagcttgtttttggaaaagatcaacaaaattgatagaacgctagcaagactaataaagaggaaaatagagaagaatcaaatagatgcaataaaaaatgaaaaaggggatatcaccaccaatcccacagaaatataaactgccatcagagaatactataaacacctctacgcaaataaactagaaaatctagaagaaatggataaattcctggacacatacaacctcccaagactaaatcaggaagaagttgaatctctgaacctaccaataacaggctctgaaattgaggcaataattaatagcttactgaccaaagaaagtccaggacctgacggattcacagccgagttgtaccagaggtacaaagcggagctgctaccattccttctgaaactattccaatcaatagaaaaagagggaatcctctctaactcattttatgaggccagcatcatccagataccaaaacctggcagagacacaaccaaaaaagagaattttagaccaatacctttgatgaacatcgatgcaaaaatcctcaataaaatactggcaaaccaaatccagcagcacaccaaaaagtttatccaccacgatcaagtgggcttcttccccggggtgcaaggctggttcaacatatgcaaattaataattgtaatccagcatataaacagaactaaagaaaaaaaccacatgattatctcaatagatgcagaaaaggcctttgacaaaattcaacagcccttcatgctaaaaactctcaataaactaggtatttatgggatgtatctcaaaataataaaagctatttatgacaaacccacagccaacatcatattgaatgggcaaaaattggaagcattccctttgaaaactgtcacaagacagggatgccctctttcaccactcctattcaacatagtattggaagttctggccagggcaatcaggcaggagaaagaaacaaagggtattccattaggaaaagaggaagtcaaattgttcctgtttgcagatgacatgatcgtatatttagaaaaccccatcttctcagcccaaaatatccttaagctgataaggacattcagcaaagtctcaggatacaaaatcaatgtgcaaaaatcacaagcattcctatacaccaataacagacaaacagagagtcaattcatgagtgaactcccattcacaattgcttcaaagagaataaaatacctaggaattcaacttacaaaggatgtgaaggacctcttcaagaagaacttcaaaacactgctcaatgaaataaaagaggacacaaacaaatggaagaacatttcatgctcatgggtaggaagaatcaatatcatgaaaatggccatactgcccaaggtaatttatagattcaatgccatcctcatcaaactacgagtgactttcttcacagaattggaaagaactactttaaagttcatatggaactaaagaagagcccgcattgccaagacaatcctaagccaatagaaaaaagctggaggcatcatgctaccttacttcaaagtatgctacaaggctacaataaccaaaacagcatggtactggcaccaaaacaaagacatagaccaatggaacagaacagagccctcagaaataataccacacatctacaaccatctgacctttgacaaagctgacaaaaacaagaaatggggaaaggattctctatttaataaatggctctgggaaaactgtctagccatatgtagaaagctgaaactggatcccttccttacaccttatacaaaaatcaattcaagatggactaaagacttacatgttagacctaaaaccataaaaaccctagaagaaaacctaggcaataccattcaggacataggcatgggcaaggacttcatgtctaaaacaccaaaagcaatggcaacaaaagccaaaattgacaaatgggatctaattaaactaaagagcttctgcacagcaaaagaaactaccatcagagtgaacaggcaacctacagaatgggagaaaatttttgcaatctactcatctgacaaagggctaatatccagaatcgacaatgaactcaaacaaatttacaagaaaaaaacaaacaaccccatcaaaaagtgggcgaaggatatgaacagacacttctcaaaagaagatctttatgtagccaacagacacatgaaaaaatgctcatcatcattggccatcagagaaatgcaaatcaaaaccacaaagagataccatctcacaccagttagaatggcaatcatcaaaatgtcaagaaagtacaggtgctgcagaggatgtggagaaataggaatacttttacatggttggtgggaccataaactagttcaaccattgtggaagtcagtgtggcgattcctcaaggatctagaactagaaataccatttcaccaagccatcccattacttgctatatacccaaaggattataaatcgtgctgctataaagacacatgcacacatatgtttattgtggcactattcacaatagcaaagacttggaaccaacccaaatgtccatcagtgatagactggattaagaaaacgtggcacatatacaccatggaatactatgcagccataaaaaatgatgagttcatgtcctttgtag

SEQ ID NO: 10615 - DNA, 6181 bp, Homo sapiens
ttctttttttattatttattattattattattatcatactttaagttttagggtacatgtgcacaatgtgcaggttagttacatatgtatacatgtgccatgatggtgtgctacacccattaaatcgtcatttagcattaggtatatttcctaatgctatccctccccactccccccaccccacaacagtccccagagtgtgatgttccccttcctgtgtccatgtgttctcattgttcaattcccatctatgagtgagaacatgcggtgtttggtgttttgttcttgcgatagtttactgagaatgatgatttccaatttcatccatgtccctacaaaggacatgaactcatcattttttatggctgcatagtattccatggtatatatgtgccacattttcttaatccagtctatcactgttggacatttgggttggttccaagtctttgctattgtgaatagtgcagcaataaacatacgtgtgcatgtgtctttatagcagcatgatttatagtcctttgggtatatacccagtaataggatggctgggtcaaatggtatttctagttctagatccctgaggaatcaccacactgacttccacaatggttgaactagtttatagtcccaccaatagtgtaaaagtgttcctatttctccacatcctctccagcacctgttgtttcctgactttttaatgattgacattctaactggtgtgagatggtatctcattgtggttttgatttgcatttctctgatggccagtgatgatgagcattttttcatgagtcttttggctgcataaatgtcttcttttgagaagtgtctgttcatatcgtttgcccactttttcatggggttgtttgtttttttcttgtaaatttgtttgagttcattgtagattctggatattagccctttgtcagatgagtaggttgtgaaaattttctcctattttgtaggttgcctgttcactctgatggtagtttctcttgctgtgcagaagctctgtagtttaattagatcccatttgtcaattttggcttttgttgccaatgcttttggtgttttagacatgaagtccttgcccatgcctatgtgctgaatggtaatgcctaggttttcttctagggtttttatggttttatgtctaacatgtaagtctttaatccatcatgaattaatttttgtataaggtgtaaggaagggatcgagtttcagctttctacatatggccagccagttttcccagcaccatttattaaataggaaatcctttccccattgcttgtttttctcaggtttgtcaaagatcagatagttgtagatatgcggcattatttctgagggctctgatctgttccattgatctatatctctgttttggtatcagtaccatgctgttttggttactgtaaccttgtagtatagtttgaagtcaggtagcgtgatgcctccagatttgttcttttggcttaggattgacttggcgatgcgggctcttttttggttccatatgaactttaaagtagttttttccaattctgtgaagaaagtcattggtagcttgatggggatggcattgaatctataaattaccttgggcagtatggccattttcacgatattgattcttcctacccatgagcatagaatgttcttccatttgtttgtatcctcttttatttcattgagcggtggtttgtagttctccttgaagaggtccttcacgtcccttgtaagttggattcctaagtattttattctctttgaagcaattgtgaatgggagttcactcatgatttggctctctgtttgtctgttattggtgtataagaatgcttgtgatttttgtacgttgattttgtatcctgagactttgctgaagttgcttatcaacttaaggagattttgggctgagacagtggggttttctagatgtacaatcatgtcatctgcaaacagggacaatttgacttcctcttttcctaattgaataccctttatttccttctcctgcctaattgccctggccagaacttccaacattatgttgaataggagtggtgagagagggcatccctgtcttgtgccagttttcaaagggaatgcttccagtttttgcccattcagtatgatattggctgtggttttgtcatagatagctcttattattttgagatacgtcccatgaatacctaatttattgagagtttttagcatgaagtgttgttgaattttggcaaaggccttttctgcatctattgagataatcatgtggtttttgtctttggttctgtttatattctggattacatttattgatttgcgtatattgaaccagccttgcatcccagggatgaagctcacttgatcatggtggataaggtttttgatgtgctgctggattcagtttgccagtattttattgaggatttttgcatcaatgttcatcaaggatattggtctaaaattctcttttttggttgtgtctctgcaaggctttggtatcaggatgatgctggcctcataaaatgagttagggaggattccctctttttctattgatcggaatagtttcagaaggaatgttaccagttcctccttgtacctctggtagaattcggctgtgaatccatctggtcctggactctttttggttggtaagctattgattattgccacaatttcagatcctgttattggtctattcagagattcaacttcttcctgatttagtcttgggagagtgtatgtttcgaggaatttatccatttcttctagattttctagtttatttgcgtagaggtgtttgtagtattctctgatggtagtttgtatttctgtgggatcggtggtgatatcccctttatcattttttattgcatctgtttgattcttctttttttctttattagtcttgctagcggtctatcaattttgttgatcctttcaaaaaaccggctcctgaattcattaattttttgaagggttttttgtgtctctatttccttcagttctgctctgattttagttatttcttgcctcctgctagcttttgaatgtgtttgctcttgcttttctagttcttttaattgtgatgttagggtgtcaattttggatcttttctgctttctcttgtgggcatttagtgctataaatttccctctacacactgctttgaatgtgtcccagagattgtgttatgttgtgtctttgttcttgttggtttcaaagagcatctttatttctgccttcatttcgttatgtacccagtagtcattcaggagcaggttgttcagtttccatgtagttgagtggttttgagtgagtttcttaatcctgagttctagttggattgcactgtggtctgagagacagtttgttataatttctgttcttttacatttgctgaggagagctttacttccaagtatgtggtcaattttggaataggtgtggtgtggtgctgaaaaaaaagtatattctgctgatttggggtggagagttctgtagatgtctattaggtccgcttggtgcagagcttagttcaattcctgggtattcttgttaacttcctgtctcgttgatctgtctaatgttgacagtggggtgttaaagtctcccattattattgtgtgggagtctaagtctctttgtaggtcactcaggacttgctttatgaatctgggtgctcctgtattgggtgcatatatatttaggatagttagctcttcttgttgaattgatccctttaccattatgtaatggccttctttgtctcttttgatctttgttgatttaaagtctgttttatcagagactaggattgcaacccctgcctttttttcttttccatttgcttggtagatcttcctccatccttttattttgagcctatgtgtgtctctgcacgtgagatgggtttcctgaatacagcacactgatgggtcttgactctttatccaatttgccagtctgtgtcttttaattggagcatttagtccatttacatttaaagttaatattgttgtgtgtgaatttgatcctgtcattatgatgttagctggttattttgcttgttagttgatgcagtttcttcctagtctcgatggtctttacattttggcatgattttgcagtggctggtaccggttgtgcctttccatgtttagtgcttccttcaggatctcttttagggcaggcctggtggtgacaaaatctctcagcatttgcttgtctgtaaagtattttatttctccttcacttgtgaagcttagtttggctggatatgaaattctgggttgaaaattcttttctttaagaatgttgaatattggcccccactctcttctggcttgtagagtttctgctgagagatccgctgttagtctgatgggcttccctttgtgggtaacccgacctttctttctggctgcccttaacattttttccttcatttcagctttggtaaatctgacaattatgtgtcttggagttgctcttctcgaggagtatctttgtggcattctctgtatttcctgaatctgactgttggcctcccttgctagattggggaagttctcctggataatatcctgcagagtgttttccaacttggttccattctccccgtcactttcaggtacaccaatcagacgtagatttggtcttttcacatagtcccatatttcttggaggctttgttcatttctttctattcttttttctctaaacttcccttctcgcttcatttcattcatttcatcttccatcgctgataccctttcttccagctgatcacattggctcctgaggcttctgcattcttcacgtagttctcgagccttggctttcagctccatcagctcctttaagcacttctctgtattggttattctagttatacattcgtctaaatttttttcaaagtttttaacttctttgcctgtggtttgaatttcatcctgtagctcggagtagtttgatcgtctgaagccttcttctctcaactcgtcaaagtcattctccgtccagctttgttccgttgctggtgaggaactgcgttcctttggaggaggagaggcactctgctttttagagtttccagtttttctgctctgttttttccccatctttgtggttttatctcctgttggtctttgatgatggtgatgtacagatgggtttttggtgtggatgtcctttctgtttgttagttttccttctaacagacaggaccctcagctgcaggtctgttggagtttgctagaggtccactccagaccgtttgcctgggtatcagcagcagtggctgcagaacagcagattttcgtgaaccacgaatgctgctgtctgatcgttcctctggaagttttgtctcagaggagtacccggccgtgtgaggtgtcagtctgcccctactgggggatgcctccccgttaggctgctcaggggtcaggggtcagggacccacttgaggaggcagtctgcccattctcagatctccagctgtgtgctgggggaaccactgctctcctcaaagctgtcagacagggacatttaagtctgcagaggttactgctgtctttttgtttgtctgtgccctgcccccagaggtggagcctacagaggcaggcaggcctccttgagctgtggtgggctccacccagttcgagcttcccggctgctttgtttacctaagcgagcctgggcaatggcgggcacccctcccgcagccttgctgccgccttgcagtttgatctcagactgctgtgctagcaatcagggagactccgtgggcgtaggaccctccgagccaggtgcaggatataatctcctggtgcgccgtttcctaagcctgtcggaaaagcgcagtattcgggtgggagtggcccgatgttccaggtgccgcctgtcacccctttccttgaccaggaaaggggactccctgaccccttgcgcttcccgagtgaggcaatgcctcgccctgcttcatctggcgcatggtgcgctgcacccactgtcctgcgcccactgtctggcactccctagtgagatgaacccggtacctcagatggaaatgcagaaatcacccgtcttctgcgtcactcatgctgggagctgtagaccggagctgttcctattcggccatcttggctcctcctcctccaaa

SEQ ID NO: 10616 - DNA, 6067 bp, Homo sapiens
tttttttttttttttaattaatgtatttgtttatttatttattgttattatactttaagttttaggatacatgtgcacaatgtgcaggttagttacatatgtatacatgtgccatgctggtgcgctgcacccactaactcgtcatctagcattagttatatctcccagtgctatccctcccccctccccccaccccacaacagtccccagagtgtgatgttccccttcctgtgtccatgtgttctcattgttcaattcccacctatgagtgagaatatgtggtgtttggttttttgttcttgcgatagtttactgagaatgatgatttccagtttcatccatgtccctacaaaggacatgaactcatcgttttttatgactgcatagtattccatggtgtatatgtgccaattttcttaatccagtctatcattgttggacatttgggttggttccaagtctttgctattgtgaataatgccccaataaacatacatgtgcatgtgtctttatagcagcatgatttatagtcctttgggtatatacccagtaatgggatggctgggtcaaatggtatttctagttctagatccctgaggaatcaccacactgacttccacaatggttgaactagtttacagtcccaccaacagtgtaaaagtgttcctatttctccacatcctctccagcacctgttgtttcctgactttttaatgattgccattctaactggtgtgagatggtaactcattgtggttttgatttgcatttctctgatggccagtgatggtgagcattttttcatgtgttttttggctgcataaatgtcttcttttgagaagtgtctgttcatgtccttcgcccactttttgatggggttgtttgtttttttcttgtaaatttgtttgagttcattgtagattctggatattagccctttgtcagatgagtagattgcaaaaattttctcccattctgtaggttgcctgttcactatgatggtagtttcttttgctgtgcagaagctctttagtttaattcaatcccattggtcaattttggcttttgttgccattgcttttggtgttttagacatgaagtccttgcccatgcctatgtcctgaatggtaatgcctaggttttcttctagggttttcatggttttaggtctaacgtttaagtctttaatccatcttgaattgatttttgtataatttgttaaggaagggatccagtttcagctttctacttatggctagccagttttcccagcaccatttattaaatagagaatcctttccccgttgcttgtttttctcaggtttgtcaaagatcagatagttgtagatatgcggcgttatttctgagggctctgttctgttccattgatctatatctctgttttggtaccagtaccatgctgttttggttactgtagccttgtagtatagtttgaagtcaggtagtgtgatgcctccagctttgttcttttggcttaggattgacttggcaatgcgggctcttttttggttccatatgaactttaaagtagttttttccaattctgtgaagaaagtcattggtagcttgatggggatggcattgaatctgtaaattaccctgggcagtatggccatttccacgatattgattcttcctacccatgagcatggaatgttcttccatttgtttgtgtcctcttttatttccttgaagagtggtttgtagttctccttgaagaggtccttcacgtcccttgtaagttggattcctaggtattttattctctttgaagcaattgtgaatgggagttcactcatgatttggctctctgtttgtctgttgttggtgtataagaatgcttgtgatttttgtacattgattttgtatcctgagactttgctgaagttgcttatccacttaaagagattttgggctgagacaatggggtcttctagatatacaatcatgtcatctgcaaacagggacaatttgacttcctcttttcctaattgaataccctttatttccttctcctgcctgattgccctggccagaacttccaacactatgttgaataggagtggtgagagagggcatccctgtcttgtgccagttttcaaagggaatgcttccagtttttgcccattcagtatgatattggctgtgggtttgtcatagatagctcttattatgttgaaatacatcccatcaatacctaatttattgagagtttttagcatgaaggttgttgaattttgtcaacagtctcttctgcatctattgagataatcatgtggtttttgtctttggctctgtttatatgctggattacatttattgatttgcgtatattgaaccagccttgcatcccagggatgaagcccacttgatcatggcggataagctttttgatgtgctgctggattcggtttgccagtattttattgaggatttttgcatcaatgttcatcaaggatattggtctaaaattctcttttttcattgtgtctctgcccggctttggtatcaggatgatgctggcctcataaaatgagttagggaggattccctctttttctattgattggaatagtttcagaaggaatggtaccagttcctccttgtacctctggtagaattcggctgtgaatccatctggtcctggactctttttggttggtaagctattgattattgccacaatttcagatcctgttattggtctattcagagattcaacttcttcctggtttagtcttgggagagtgtatgtgtcgaggaatttatccatttcttctagattttctagtttatttgcgtagaggtgtttgtagtattctctgatggtagtttgtatttctgtgggattggtggtgatatcccctttatgattttttattgcgtctattagattcttctctctttttttctttattagtcttgctagtggtctatctattttgttgatcctttcaaaaaaccagctcctggattcattaattttttgaagggttttttgtgtctctatttccttcagttttgctctgattttagttatttcttgccttctgctagcttttgaatgtgtttgctcttgcttttctagttcttttaattgtgatgttaggatgtcaattttggatctttcctgctttctcttgtgggcatttagtgctataaatttccctctacacactgctttgaatgcgtcccagagattctggtatgttgtgtctttgttctcgttggtttcaaagaacatctttatttctgccttcattttgttatgtacccagtagtcattcaggagcaggttgttcagtttccatgtagttgagcggttttgagtgagattcttaatcctgagttctagtttgattgtactgtggtctgagagatagtttgttataatttctgttcttttacatttgctgaggagagctttacttccaagtatgtggtcaattttggaataggtgtggtgtggtgctgaaaaaaatgtatattgtgttgatttggggtggagagttctgtagatgtctattaggtctgcttggtgcagagctgagttcaattcctgggtatccttgttgactttctgtctcgttgatctgtctaatgttgacagtggggtgttaaagtctcccattattaatgtgtgggagtctaagtctctttgtaggtcactcaggacttgctttataaatctgggtgcttctgtattgggtgcatatatatttaggatagttagctcttcttgttgaattgattcctttaccattatgtaatggccttctttgtctcttttgatctttgttggtttaaagtctgttttatcagagactagtattgcaacctcttcctttttgtgttttccatttgcttggtagatcttcctccatccttttattttgagcctatgtgtgtctctgcacatgagatgggtttcctgaatacagcacactgatgggtcttgactctttatccaatttgccagtctgtgtcttttaattggagcatttagtccatttaaatttaaagttaatattgttatgtgtgaatttgatcctgtcattatgatgttagttggttattttgctcgttagttgatgtagtttcttcctagtctcaatggtctttacattttgtcatgattttgcagcagctggtaccggttgttcctttccatgtttagcgcttccttcaggagctcttttagggcaggcctggtggtgacaaaatctctcaacaattgcttgtctgtaaagtattttatttctccttcacttatgaagcttagtttggctggatatgaaattctgggttgaaaattcttttctttaagaatgttgaatattggcccccactcttttctggcttgtagagtttctgccgagagatccactgttagtctgatgggcttccctttgaaggtaacccgacctttgtctctggctgcccttaaccttttttccttcatttcaactttggtgaatctgacaattatgtgtcttggagttgctcttctcgaggagtatgtttgtggcgttctctgtatttcctgaatctgaatgttggcctgccttgctagattggggaagttctcctggatgatatcctgcagagtgttttccaacttggttccattctccccgtcactttcaggtacaccaatcagacgtagatttggtcttttcacatagtcccatatttcttggaggctttgctcgtttctttttattcttttttctctaaacttcccttctcgcttcatttcattcatttcatcttccatcactgaaaccctttcttccagttgatcgcatcggctcctgaggcttctgcattcttcacgtagttctcgagccttggttttcagctccatcagctcctttaagcacttctctgtattggttattctagttagacattcttctaaatttttttcaaagttttcaacttctttgcctttggtttgaatgtcctcccgtagctcagagtaatttgattgtctgaagccttcttctctcagctcgtcaaagtcattctccgtccagctttgttctgttgctggtgaggaactgcattcctttggaggaggagaggcgctctgctttttagagtttccagtttttctgctctgttttttccccatctttgtggttttatctacttttggtctttgatgatggcgatgtacagatgggtttttggtgtggatgtcctttctgtttgttagttttccttctaacagacaggaccctcagctgcagatctgttggaatacccagccgtgtgaggtgtcagtctgcccctgctgggggatgcctcccagttaggctgctcaggggtcaggggtcagggacccacttgaggaggcagtctgcccgttctcagatctccagctgcgtgctgggagaaccactgctctcttcaaagctgtcagacagggacatttaagtctgcagaggttactgctgtctttttgtttgtctgtgccctgcctgcagaggtggagcctacagaggcaggcaggcctccttgagctgtggtgggctccacccagttcgagcttccgggctgctttgtttacctaagcaagcctgggcaatggcgggcgcccctcccccagcctcgctgccgccttgcagtttgatctcagactgctgtgctagcaatcagcaagactccgtgggcgtaggaccctccgagccaggtgcgggatataaactcccggtgcaccgttttttaagcccgtcggaaaagcgcagtattcgggtgggagtgacccgattttccaggtgccgtctgtcacccctttctttgactaagaaagggaactccctgaccccttgcacttcccgagtgaggcaatgcctcgccctgcttcggctggcgcacagtgcgcgcacccactgacctgcgcccgctgtctggcactccctagtgagatgaaccgggtacctcagacggaaatgcagaaatcacccttcttctgcgtcgctcacgctgggagctgtagaccggagctgttcctattcagccatcttggctcctccctccc

SEQ ID NO: 10617 - DNA, 6041 bp, Homo sapiens
tgccattttttttctattattatactttaagttttagggtacatgtgcacattgtgcaggttagttacatatgtatacatgtgccatgctggtgcgctgcacccactaactcgtcatctagcattaggtatatctcccagtgctatccctccccgctccgcgcaccccacaacagtccccagagtgtgatgttccccttcctgtgtccatgtgatctcattgttcaattcccacctatgagtgagaatatgcggtgtttggttttttgttcttgcgatagtttactgagaatgatgatttccaatttcatccatgtccctacaaaggacatgaactcatcattttttatggctgcatagtattccatggtgtatatgtgccacattttcttaatccagtctatcattgttggacatttgggttggttccaagtctttgctattgtgaataatgccgcaataaacatacgtgtgcatgtgtctttatagcagcatgatttacagtcctttgggtataaacccagtaatgggatggctgggtcaaatggtatttctagttctagatccctgaggaatcgccacactgacttccacaatggttgaactagtcttacagtcccaccaacagtgtaaaagtgtctccttatttctccacatcctctccagcacctgttgtttcctgactttttaatgattgccattctaactgatgtgagatggtatctcattgtggttttgatttgcatttctctgatggccagtgatgatgagcattttttcacgtgttttttggctgcataaatgtcttcttttgagaagtgtctgttcatgtccttcgcccactttttgatggggttgtttgtttttttcttgtaaatttgtttgagttcattgtagattctggatattagccctttgtcagatgagtaggttgcgaaaattttctcccattttttaggttgcctattcactctgatggtagtttcttttgctgtgcagaagctctttagtttaattagatcccatttgtcaattttggcttttgttgccattgcttttggtgttttagacatgaagtccttgcccatgcctatgtcctgaatggtaatgcctaggttttcttctagggtttttatggttttaggtctaacgtttaagtctttaatccatcttgaattgatttttgtataaggtgtaaggaagggatccagtttcagctttctacatatggccagccagttttcccagcaccatttattaaatagggaatcctttccccattgcttgtttttctcaggtttgtcaaagatcagatagttgtagatatgtggcattatttctgagggctctgttctgttccattgatctatatctctgttttggtaccagtaacatgctgttttgattactgtagccttgtagtatagtttgaagtcaggtagtgtgatgcctccagctttgttcttttggcttaggattgacttggcaatgcgggctcttttttggttccatatgaactgtaaagtagttttttccaattctttgaagaaagtcattggtagcttgatggggatggcattgaatctataaattaccttgggcagtatggccattttcacaatattgattcttcctacccatgagcatggaatgttcttccatttgtttgtatcctcttttatttccttgagcagtggattgtagttctccttgaagaggtccttcacatcccttgtaagttggattcctaggtattttattctctttgaagcaattgtgaatgggagttcactcatgatttggctctctgtttgtctgttattggtgtataagaatgcttgtgatttttgtacattgattttgtatcctgagactttgctgaagttgcttatcagcttaaggagatttggggctgagacaatggggttttctagatatacaatcatgtcgtctgcaaatagggacaatttgacttcctcttttcctaattgaataccctttatttccttctcctgcctgattgccctggccagaacttccaacactatgttgaataggagtggagagagagggcatccctgtcttgtgccagttttcaaagggaatgcttccagtttttgcccattcagtatgatattggctgtgggtttgtcatagatagctcttattattttgaaatacatcccatcaatacctaatttattgagagtttttagcatgaagcgttgttgaattttgtcaaaggccttttctgcatctattgagataatcatgtggtttttgtctttgtttctgtttatatgctggattacatttattgattttcgtatattgaaccagccttgcatcccagggatgaagcccacttgatcatggtggataagctttttgatgtgctactggattcgttttgccagtattttattgaggatttttgcatccatgttcatcgaggatattggtctaaaattctcttttttggttgtgtctctgcccggctttggtatcagaatgatgctggcctcataaaatgagttagggaggattccctctttttctattgattggaatagtttcagaaggaatggtaccagttcctccttgtatctctggtagaattcggctgtgaatccatctggtcctggactctttataaaaaggtaagctattgattattgccacaatttcacatcctgttattggtctattcagagattcaacttcttcctggtttagtcttgggagggtgtatgtgtccaggaatttatccatttcttctagattttctagtttccttgcgtagaggtgtttgtagtattctctgatggtagtttgtatttctgtgggattggtggtgatatctcctttatcattttttattgcgtctatttgattcttctctctttttttattagtcttgctagcagtctatcaattttgttgatcctttcaaaaaaccagctcctggattcattaattttttgaagggttttttgtgtctctatttcctttagttctgctctgattttagttatttcttgccttctgctagcttttgaatgtgtttgctcttgcttttctagttcttttaattgtgatgttagggtgtcaattttgaatctttcctgctttctcttgtgggcatttagtgctataaatttccttctacacactgctttgaatgtgtcccagagattctggtatgttgtgtctttgttctcgttggtttcaaagaacatctttatttctgccttcatttcgtgatgtacccagtagtcattcaggagcaggtttttcagtttccatgtagttgagcagttttgagtgagattcttaatcctgagttctagttggattgaactgtggtctgagagatagtttgttataatttctattcttttacatttgccgaggagagctttacttccaactatgtggtcaattttggaataggtgtggtgtggtgctgaaaaaaatgtacattctgttgatttggggtggagagttctgtagatgtctattaggtctgcttggtgcagagctgagttcaattcctgggtgtccttgttgactttctgtctctttgatctgtctaatgttgacagtggggtgttaaagtctcccattattaatgtgtgggagtctcagtctctttgtgggtcactgaggacttgctttatgactctgggtgctcctgtattgggtgcatatatatttaggatagttagctcttcttgttgaattgatccctttaccattatgtaatggccttctttgtctcttttgatctttgttggtttaaagtctgttttatcagagactaggattgcaacccctgcatttttttttttccatttgcttggtagatcttcctccacccttttattttgagcctatgtgtgtctctgcacgtgagatgggtttcctgaatacagcacactgatgggtcttgactctttatccaatttgccagtctgtgtcttttaattggagcatttagtccatttacatttaaagttaatattgttatgtgtgaatttgatcctgtcattatgatgttagctggttattttgctcgttagttgatgcagtttcttcctagtctcgatggtctttacattttggcatgattttgcagcggctggtaccggttgttcctttccatgtttagcacttccttcaggagctcttttagggcaggcctggtggtgacaaaatctctcagcatttgcttgcctgtaaaggatgttatttctccttcacttatgaagcttagtttggctggatatgaaattctgggttgaaaattcttttctttaagaatgttgaatattggcccccactctcttctggcttgtagggtttctgccgagagatccgctgttagtctgatgggcttccctttgagggtaacccgacctttctctctggctgcccttaacattttttccttcatttcaactttggtgaatctgacaattatgtgtcttggagttgctcttctcgaggagtatctttgtggcgttctctgtatttcctgaatctgaacgttggcctgccttgctagattggggaagttctcctggataatatcctgcagagtgttttccaacttggttccattctccccatcactttcaggtacaccaatcagacgtagatttggtcttttcacatagtcccatatttcttggaggctttgctcgtttctttttattcttttttctctaaacttcccttctcgcttcatttcattcatttcatcttccattgctgataccctttcttccagtggatcgcatcggctcctgaggcttctgcattcttcacgtagttctcgagccttggttttcagctccatcagctcctttaagcacttctctgtattggttattttagttatacattcctctaaatttttttcaaagttttcaatttctttgcctttggtttgaatgtcctctcatagctcagagtaatttgattgcctgaagccttcttctctcagctcatcaaagtcattctctatccggctttgttccgttgctgatgaggaactgcgttcctttggaggaggagaggtgctctgctttttagagtttccagtttttctgttctgttttttccccatctttgtggttttatctacttttggtctttgatgatggtgatgtacagatgggtttttggtgtggatgtcctttctgtttgttagttttccttctaacagacaggaccctcagctgcaggtctgttggagtacctggccatgtgaggtgtcagtgtgcccctgctggggggtgcctcccagttaggctgctcaggggtcaggggtcagggacccacttgaggaggcagtctgcccgttctcagatctccagctgcgtgctgggagaaccactgctctcttcaaagctgtcagacagggacatttaagtctgcagaggttactgctgtctttttgtttgtctgtgccctgcccccagaggtggagcctacagaggcaggcaggccgccttgagctgtggtgggctccacccagttggagcttctcggctgctttgtttacctaagcaagcctgggcaatggcgggcgcccctcccccagcctcgctgccgccttgcatttgatctcagactgctgtgctagcaatcagcgagactccgtgggcgtaggaccctcccagccaggtgcgggatataatctcgtggtgcgccgttttttaagcccgtcggaaaagcgcagtattccggtgggagtgacccgattttccaggtgccgtctgtcacccctttctttgactaggaaagggaactccctgacccctcgcacttcccgagtgaggcaatgcctcgccctgctttggctcgcacacggtgtgctgcacccactgacctgcgcccactgtctggcactccctagtgagatgagcccggtacctcagatggaaacgcagaaatcacccgtcttctgcattgctcacgctgggagctgtagaccggagctgttcctattcggccatcttggctccagccacctcc

SEQ ID NO: 10618 - DNA, 4911 bp, Homo sapiens
ttttttttaaattatactttaagttctagggtacatgtgcataatatgtaggtttgttacatatgtatacatgtgccatgttggtgtgctgcacccattaacttgtcatttacattaggtatatctcctgatgctatccctcccccgtgctgccaccccatgacaggccccggtgtgtgatattccccaccctgtgtccaagtgttctcattgttcaattcccacctatgagtgagaacatgcggtgtttggttttctgtccttgcaatagtttgctgagaatgatggtttccagcttcatccatgtcccagaaaggacatgaactcatccttttttatggctgcatagtattccgtggtgtatatgtgccacattttcttaatccagtctatcattgttggacatttgggttggttccaagtctttgctattgtgaataatgccacaataaacatacgtgtgcgtgtgtctttatagcagcatgatttttaatcctttcggtatatacccagtaatgggatggctgggtcaaatggtatttattgttctagatccttgaggaatcaccacactgtcttccacaatggttgaactagtttacagtcccaccaacagtgtaaaagtgttcctgtttctccacatcctctccagcacctgttgtttcctgactttttaatgattgccattctaactggtgtgagatggtatctcattgtggttttgattttcatttctctgatggccagtgataatgagcattttttcatgtgtctgttggctgcataaatgtcttcttttgagaagtgtctgttcatatccttcgcccactttttgatggggttgtttgatttttttcttgtaaatttgtttaagttctttgtagattctggatattagtcctttgtcagatgggtagattgaaaagttttctcccattatgtaggttgcctgttcactctgatggtagtttcatttgctgtgcagaagctctttagtttaattagatcccatttgtcaattttggctttgttgccattgcttttggtgttttagtcatgaagtccttgcacatgcctatgtcctgaatggtatggcttaggttttcttctagggtttttatggttttaggtctaacatttaagtctttaatccatcttgaattaatttttgtataaagtgtaaggaagggatccagtttgagctttctacatgtagctagtcagttttcccagcaccatttattaaatagggaatcctttccccagttcttgtttttctcaggtttgtcaaagatcagatggttgtagatgtgtgacattatttctgagggctctgttctgttccattggtctgtatctctgttttggtaccagtaccatgctgttttggttactgtagccttgtagtatagtttgaagtcaggtagcatgatgcctccatctttgttcttttggcttagggttgtcttggcaatgccggctcttttttggttccatatgaactttaaagtagttttttccaattctgtgaagaaagtcattggtagcttgatggggatggcattgaatctataaattaccttgggcagtatggccattttcacgatattcattcttcctatccatgagcatggaatgttcttccatttgtttgtgccctcttttatttcactgagcagtggtttctagttctccttgaagaggtccttcacatcctttgtaagttggattcctaggtattttattctctttgaagcaattgtgaatgggagttcactcatgatttggctctctgtttgtctgttattggcgtataggaatgcttgtgatttttgcacattgattttgtatcctgagattttgctgaagttgcttatgagcttaaggagattttgggctgagacgatgggattttctaaatatacaatcatgtcatctgcaaacagggacaacttgacttcctcttttcctaattgaatacactttctttctttctcctgcctgattgccctggccagaacttccaacactatgttgaataggagtggtgagagagggcatccctgtcttgtgccagttttcaaagggaatgcttccagtttttgcccatttagtatgatattagctgtgggtttgtcataaatagctcttataattttgagatacgtcctatcaatacctagtttatttagtgtttttaacatgaagtgctgttgaattttgtcgaaggccttttctgcatcttttgagataatcatgtggtttttgtctttggttctgtttatatgatggattacatttattgatttgcatatgttgaaccatccttgcatcccagggatgaagcccacttgatcatggtggataagctttttgatgtgctgctggatttggtttgccagtattttattgaggatttttgcatcaatgttcatcagggatattggtctaaaattctctttttttgttgtgtctctgccaggctttggtatcaggatgatactggtctcataaaatgagttaggagagattccctctttttctatttattggaagtttcagaaggaacggtaccagctcctctttgtacctccggtagaatttggctgtgaatccatctggtcctggactttttttggttggtaggctctgaattattgcctcaatttcagagcctgttattagtctattcagggattcaacttcttcctggtttagtcttgggatggtgtacgtgtccaggaattcatccatttcttctagattttctggtttatttgtgtagaggtgtttatagtattctctgatggtagtttgtatttctgtggcatcagtagtgatatcccctttatcattttttattgcgtctatttgattcttctctcttttcttctttattggtcttgctagcagtctatcaattttgttgatcttttcaaaaaaccagctcctggatttactgattttttgaagggttttttgcgtctctatctccttcagttctgctctgatgtttgttatttcttgccttctgctagcttttgaatgtgtttgctcttgcttctctagttcttttaattgtgatgttagggtgtcaattttagatctttcctgctttctcttgtgggcattcagtgctataaatttccctctacacactgctttgaatgtgtcccagagattctggtatgttgtgtctttgttctcatcggtttcatagaacatctttatttctgccttcatttcgttatgtacccagtagtcattcaggagcaggttgttccagtttccatgtagttgagcggttttgagtgagtttcttaatcctgagttctagtttgattgcactgtggtctgagagacagtttgttataatttctgttcttttgtatttgctgagtagtgctttacttcccactatgtggtcagttttggaataagtgcaattggtgctgagaagaatgtatattctgttgatttgggatggagagttctgtagatgtctgttaggttcacttggtgtagagctgtgttcaggtcctggatatccttgttaattttctgtcttgttgatctgtctaatgttgacagtggggtgttgaagtctcccattattattggatgggagtctcagtctctttgtaggcctctaaggacttgttttatgaatctgggtgctcctgtattgggtgcatatatatttaggatagttagctcttcttgttgaattgatccctttaccattatgtaatggccttctttgactcttttgatcgttattggtttaaagtctgttttatcagagactaggattgcaacccctgcttttttttgttttccatttgcttggtagatcttcctccatccgtttattttgagcctatgtgtatgtctgaaagtgagatgggtctcctgaatacagcacactgatgagtcttgactctttatccaatttgccagtctgtgtcttttaattggagcatttagcccatttacatttaaggttaatattgttatgtgtgaatttgatcctgtcattatgatgttagctggttattttgcttgttagttgatgcagtttcttcctagcatcgatgatctttacaatttggcatgttgttgcagtggctggtaccagttgttcctttccatgcttagtgcttccttcaggagctcttgtaaggcaggcctggtggtgacaaaatctctcagcatttgtttgtctgtaaagtattttatttctccttcacttatgaagcttagtttggctggatatgaaattctgggttgaacattcttttctttaaggatgttgaatattggcccccactctcttctggcttgtagagtttgtgctgagagatcagctgttagtctgatgggcttccctttgtgggtaacctgacctttctctctggctgcccttaacattttttccttcatttcaactttggtgaatctgataattatgtgtcttggagttgctcttctcgaggagtatctttatggcattctctgtatttcctgaatttgaatgttggcctgccttgctagattggggaagttctcctggataatatcctgcagagtgttttccaacttggttccattctccccgtcactttcaggtacaccaatcagacgtagatttggtcttttcacatagtcccatatttcttgaaggctttgtttgtttctttttattcttttttctctaaacttctcttgtctctgtatttcattcatttgatcttcaatcagtgataccctttcttccacttgatcaaatcggctactgaagcttgtgcattcgtcacatagttcttgtgtcatggttttcagctccatcaggtcatttaaggtcttctctaggctgtttattctagttagtcattcgtctaatctttttta

SEQ ID NO: 10619 - DNA, 5558 bp, Homo sapiens
gatttagttattttttttttattattatactttaagttttagggtacatgtgcacaacgtgcaggttagttacatatgtatacctgtgccatgctggtgtgctgcacccatcaacccgtcatctaacattagatatatctcccagtgctatccctcctgcctcccccgaccccacaacagtccccagagtgtgatgttccccttcctgtgtccatgtgttctcattgttcaattcccacctatgagtgagaacatgcgacatttggttttttgtccttgtgatagtttgctgagaatgatggtttccagcttcatccatgtccctacaaaggacatgaactcatcatttcttatggctgcatagtattccatggtgtatatgtgccacattttcttaatccagtctatcattgttggacatttgggttggttccaagtctttgctattgtgaataatgccacaataaacatacatgtgcatgtgtctttatagcagcatgatttataatcctttgggtatatacccagtaaagggattgctgggtcaaatggtagttctagttctagatccctgaagaatcgccacactgacttccacagtggttgaactagtttacagttccaacagcagtgtaaaagcgttcctgtttctccacatcctctccagcacctgttgtttcctgactttttaatgattgccattctaactggtgtcagatggtatctcactgtggttttgatttgcatttctctgatggccagtgatgatgagcattttttcatgggtctgttggctgcataaatgtcttcttttgagaagtgtctgttcatgtccttcgcccactttttgatggggttgtttttttcctgtaaatttgtttgagttcattgtagatgctggatattagccctttgtcagatgagtagattgcaaaaatgttctcccattctgtaggttgcctgttcactctgatggtagtttcttttgctgtgcagaagctctttagtttaattagatcccatttgccatttttgtcttttgttgccattgcttttggtgttttagacatgaagtccttgcccatgtctctgtcctgaatggtattgcctaggttttcttctagggtttttatggttttaggtctaacatgtaagtctttaatccatctcgaattaatttttgtgtaaggtgtaaggaagggatccagtttcagctttctacatatggctagccagttttcccagcaccatttattaaatagggaatcctttccccatttcctgtttttgtcaggtttgtcaaagatcagatagttgtagatatgtggcattatttctgagggctctgttctgttccattggtctatatctctgttttggtaccagtaccatgctgttttggttactgtagccttgtagtatagtttgaagtcaggtagcgtgatgcctctagctttgttcttttggcttaggattgacttggcaatgcgtgctcttttctcgttccatatgaactttaaagtagttttttccaattctgtgaagaaagtcactggtagcttgatagggatggcattgaatctataaattaccttgggcagtatggccattttgacgatattgattcttcctacccatgagcatggaatgttcttccatttgtttgcatcctgttttatttcattgagcagtggtttgtagttctccttgaagaggtccttcacatcccttgtaagttggattcctaggtattttattctctttgaagcaattgtgaatgggcgttcactcatggtttggctctctgtttgtctgttattggtgtataagaatgcttgtgatttttgcacattgattttctatcctgagactttgctgaagttgcttatcagcttaaggagattttgggctgagacgatggggttttctagatatacaatcatgtcatctgcaaacagggacaatttgacttcctcttttcctaattgaataccctctatttccttctcctgcctcattgcactggtcagaacttccaacactatgttgaataggagtggtgagagagggcatccctgtcttgtgccagttttcaaagggaatgcttccagtttttgcccatttagtatgatattggctgtgggtttgtcatagatagctcttattattttgagatacgtcccaacagtaccgaatttattgagagttgttagcatgaagcgttgttgaattttgtcaaaggccttttctgcatctattgatataatcatgcggtttttgtctttgtttctgtttatatgctggattacgtttattgatttgtgtatgttgaaccagccttgcatcccagggatgaagcccacttgatcatggtggataagctttttcatgtgctactgtatttggtttgccagtattttattgaggatttttgcatcgatgtttatcagggatattggtctaaaattctctttttttgttatgtctctgcccggctttggtatcaggatgatgctggcctcataaaatgagttagggaggtttccctctttttctgttgattggaatagtttcagaaggaatggtaccagctcctccttgtacctctggtagaattcggctgtgaatccatctggtcttagactttttttggttggtaagctattaattattatctcaatttcagagcttgctattggtctcttcagagattcaacttcttcctggcttagtcttgggagggtgtatgtgtcgaggaatttatctatttcctctagattttctagtttatttgtgtagaggtgtttatagtattctctgacggtagtttgtatttctgtgcgattggtggtgatatcccatttatcattttttattgtgtctatttgattcttctctcttttcttctttattagccttgctagcggtctatcaattttgttgatcgtttcaaaaaaccagctcctggattcattgattttttgaagggttttttgtgtctctatttccttcagttctgctctgattttagttatttcttgccttctgctagcttttgaatgtgtttgctcttgcttctctagttcttttaattgtgatgttagggtgtcatttttagatctttcctgctttctcttgtgtgcatttagtgctataaatttccctctacacactgctttgaatgtgtctcccagagattctggtgtgttgtgtctttgttctcgttggtttcaaagaacatctttatttctgccttcatttcattatgtacccagtagtcattcaggagcaggttgttcagttttgatgtagttgagtggttttgaagtgagtttcttaatcctgagttctagtttgattgcactgtggtctgagagacagtttgttctaatttctgttcttttacatttgctgaggagagctttacttccaagtatgtggtcaattttggaatacgtgtggtgtggtgctgaaaagaatgtatattctgttgatttggggtggagaggtctgtagatgtctattaggtccacttggtgcagagctgagtttatttcctggatatccttgttaactttctgtcttgttgatctgtctaatgttgacagtggggtgttaaagtctcccattattattgtgtgggagtctaagtctctttgtaggtctctaaggacttgccttacgaatctgggtgctcctgtattgggtgcatatatatttaggatagttagctcttcttgttgaattgatccctttaccattatgtaatggccttctttgtctcttttgatctttgttggtttaaagtctgttttatcagagactaggattgcagcccctgcctttttttgttttccatttgcttggtagaccttcctccatccctttattttgagcctatgtgtgtctctgcacgtgagatgggtttcctgaatacagcacactgatgggtcttgactctttatccagtttgccattctgtgtcttttaattgcagcatttagcccatttacatttaaggttaatattgttatgtgtggatttgatcctgtcattatgatgttagctggttagtttgctcgttagttgatgcagtttcttcctagcctcgatggtctttacaatttggcatgtttttgcagtggctggtaccggttgttcctttccatgtttagtgcttcttcaggagctcttttagggcaggcctggtggtgacaaaatctctcagcatttgcttgtctgtaaagtattttatttctccttcatttatgaaacttagtttggctggatatgaaattctgggttgaaaattcttttctttaagaatgttgaatattggcccccactctcttctggcttgtagagtttctgccgagagatcagctgttagtctgatgggcttccctttgtgggtaacccgacctttctctctggctgcccttaaccttttttccttcatttcaactttggtgagtctgacaattatgtgtcttggagttgctgttctcgaggagtatctttgtggcgttctctgtattgcctgaatctgaacgttggcctgccttgctagattggggaagttctcctggataatatcctgcagagtgttttccatcttggttccattctccccgtcactttcatgtaccgcaatcggatgtagatttggtcgtttcagatagtcccatatttcttggaggctttgttcgtttctttttattcttttttctctaaagttctcttctcgcttcatttcattcttttcgtcttccatcgctgataccctttcttccagttgatcgaatcagctactgaggcttgtgtattcgtcacgtggttctcgtgccgtggttttcagctccatcaggtcctttaaggacttctctgcattggttattctagttagccattcgtctaatcttttttcaaggtatttaacttctttgtcatgggtttgaacttcctcctttagctcggagtagtttgattgtctgaagccttcttctctcaacctgtcaaagtcattctctgtgcagctttgttccgttgctggtgaggaactgcgttcctttggaggaggagaggcactctgatttttagaattttcagtttttctgctctgtttttttccccatctttgtgcttttacctacctttggtcttagatgatggtaacatacagatggggttttggtgtggatgtcctttctgtttgttagttttccttctaacagtcaggaccctcagctgcaggtctgttggagtttgctggaggtccactccagaccctgtttgcctggatatcagcagcggaggctgcacaacagcggatattggtgaacagcaaatgttgctgcctgatcattcctctggaagttttgtctcagaggagtacccggccgtgtgaggtatcagtctgcccctactggggggtgcctcccagttaggctactcggggtcagggacgcacttgaggaggcagtctgtccgttctcagatctccagctatgttctgggagaaccactactctcttcaaatctgtcagacagggacattt

SEQ ID NO: 10620 - DNA, 6038 bp, Homo sapiens
ccttagtagaattcctttttttttttaattatacttaggttttagggtacatgtgcacattgtgcaggttagttacatatgtatacatgtgccatgctggtgcgctgcacccactaaatcgtcatctagcattaggtatatctcccaatgctatccctcccccctccccccaccccaccacagtccccagagtgtaatattctccttcctgtgtccatgtgatctcattcttcaattcccacctatgagtgagaatatacggtgtttggttttttgttcttgtgatagtttactgagaatgatgatttccaatttcatccatgtccctacaaaggacaagaactcatcatcttttatggctgcatagtattccatggtgtatatgtgccacattttcttaatccagtctatcattgttggacattggggttggttccaagtttttgctattgtgaataatgccgcaataaacatacgtgtgcatgtgtctttatagcagcatgatttatagtcctttgggtatatacccagtaatgggatggctgggtcaaatggtatttctagttctagatccctgaggaatcgccacactgacttccacaatggttgaactagtttacagtcccaccaacagtgtaaaagtgttcctatttctccacatcctctccagcacctgttgtttcctgactttttaatgattgccattctaactggtgtgagatggtatctcattgtggttttgatttgcatttctctgatggccagtgacgatgagcattttttcatgtgttttttggctgcataaatgtcttcttttgagaagtgtctgttcatgaccttcacccactttttgatggggttgtttgtttttttcttgtaaatttgtttgagttcattgtagattctggatattagccctttgtcagatgagtaggttgcgaaaattttctcccattttgtaggttgcctgttcactctgatggtagtttcttttgtgtgcagaagctctttagtttaattagatcccatttgtcaattttggcttttgttgccattgcttttggtgttttggacatgaagtccttgcccatgcttatgtcctgaatggtaatgcctaggttttcttctagggtttttatggttttaggtctaacgtttaagtctttaatccatcttgaattgatttttgtataaggtgtaaggaagggatccagtttcagctttctacatatggctagccagttttcccagcaccatttattaaacagggaatcctttccccattgcttgtttttctcaggtttgtcaaagatcagatagttgtagatatgcggtgttatttcttagggctctgttctgttccattgatctatatctctgttttggtaccagtaccatgctgttttcgttactgtagccttgtagtacagtttgaagtcaggtagtgtgatgcctccagctttgttcttttggcttaggattgccttggcgatgcaggctcttttttggttccatatgaactttaaagtagttttttccaattctgtgaagaaagtcattggtagctttatggggatggcattgaatctgtaaattaccttgggcagtatggccattttcacgatattgattcttcctacccatgagcatggaatgttcttccatttgtttgtatcctcttttatttccttgagcagtggtttgtagttctccttgaagaggtccttcacatcccttgtaagttggattcctaggtattttattctcttggaagcaattgtgaatgggagttcactcatgatttggctctctgtttgtctgtttttggtgtataagaatgcttgtgatttttgtacattgattttgtatcctgagactttgctgaagttgcttatcagcttaaggagattttgggctgagacaatggggttttctagatatacaatcatgtcgtctgcaaacagggacaatttgacttcctcttttcctaattgaataccctttatttccttctcctgcctaattgccctggccagaacttccaacactattgaataggagtggtgagagagggcatccctgtcttgtgccagttttcaaagggaatgcttccagtttttgcccattcagtatgatattggctgtggggttgtcatagatagctcttattattttgaaatacgtcccatcaatacctaatttattgagagtttttagcgtgaagcgttgttgaattttgtcaaaggctttttctgcatctattgagataatcatgtggtttttgtctttggctctgtttatatgctggattacatttactgatttgcgtatattgaaccagccttgcatcccagggatgaagcccacttgatcatggtggataagctttttgatgtgctgctggattcgttttgccagtattttattgaggatttttgcatcaatgttcatcaaggatattggtctaaaattctcttttttggttgtgtctctgcctggctttgatatcagaatgatgctggcctcataaaatgagttagggaggattccctctttttctattgattggaatagtttcagaaggaatggtaccagttcctccttgtacctctggtagaattcggctgtgaatccatctggtcctggactctttttggttggtaaactattgattattgccacaatttcagctcctgttattggtctattcagagattcaacttcttcctggtttagtcttgggagagtgtatgtgtcaaggaatgtatccatttcttctagattttctagtttatttgcatagaggtgtttgtagtattctctgatggtagtttgtatttctgtgggatcggtggtgatatcccctttatcattttttattgtgtctatttgattcttctctctttttttctttattagtcttgctagcggtctatcaattttgttgatcctttcaaaaaccagctcctggattcattaatttgttgaagggttttttgtgtctctatttccttcagttctgctctgattttagttatttcttgccttctgctagcttttgaatgtgtttgctcttgcttttctagttcttttaattgtgatgttagggtgtcaattttggatctttcctgctttctcttgtgggcatttagtgctataaatttccctctacacactgctttgaatgcgtcccagagattctggtatgttgtgtctttgttctcgttggtttcaaagaacatctttatttctgccttcatttcgttatgtacccagtagtcattcaggagcaggttgttcagtttccatgtagttgagcggctttgagtgagattcttaatcctgagttctagtttgattgcactgtggtctgagagatagtttgttataatgtctgttcttttacatttgctgaggagagctttacttccaagtatgtggtcaattttggaataggtgtggtgtggtgctgaaaaaaatgtatattctgttgatttgggagggagttctgtagatatctattaggtccgcttggtgcagagctgagttcaattcctgggtatccttgttgactttctgtctcgttgatctgtctaatgttgacagtggggtgttaaagtctcccattattaatgtgtgggagtctaagtctctttgtaggtcactcaggacttgctttatgaatctgggtgctcctgtattgggtgcatatatatttaggatagttagctcttcttattgaattgatccctttaccattatgtaatggccttctttgtctcttttgatctttgttggtttaaagtctgttttatcagagactaggattgcaacccctgcctttttttgttttccatttgcttggtagatcttcctccatccttttatattgagcctatgtgtgtctctgcacgtgagatgggattcctgaatacagcacactgatgggtcttgactctttatccaatttgccagtctgtgtcttttaattggagcatttagcccatttacatttaaagttaatattgttatgtgtgaatttgatcctgtcattatgatgttagctggtgattttgctcgttagttgacgcagtttcttcctagtcttgatggtctttacattttggcttgattttgcagcagctggtaccggttgttcctttccatgtttagcgcttccttcaggagctcttttagggcaggcctggtggtgacaaaatctctcagcatttgcttgtctgtaaagtattttatttctccttcacttatgaagcttagtttggctggatatgaaattctgggttgaaaagtcttttttttaagaatgttgttgaatattggcccccactctcttctggcttgtagggtttctgccgagagatccgctgttagtctgatgggcttccctttgagggtaacccgacctttctctctggctgcccttaacattttttccttcatttcaactttggtgaatctgacaattatgtgtattggagttgctcttctcgaggagtatctttgtggcgttctctgtatttcctgaatctgaacgttggcctgccttgctagattgggaagttctcctggataatatcctgcagagggttttccaacttggttccattctccccatcactttcaggtacaccaatcagacgtagatttggtcttttcacatagtcccatatttcttggaggctttgctcatttctttttattcttttttctctaaacttcccttctcgcttcatttcattcatttcatcttccatcgctgataccctttcttctagttgatcgcatcggctcctgaggcttctgcattcttcacgtagttctcaagccttggttttcagctccatcagctcctttaagcacttctctgtattggttattctagttatacattcttctaaatttttttcaaagttttcaacttctttgcctttggtttgaatgtcctcccgcagctcagagtaatttgatcgtctgaagccttctcccctcagctcgtcaaagtcattctccgtccagctttgttccgttgctggtgaggagctgcgttcctttggaggaggagaggcgctctgatttttagagtttccagtttttctgttctgtttgttccccatctttgtggttttatctacttttggtctttgatgatggtgatgtacagatgggtttttggtgtggatgtcctttctgtttgttagttttccttctaacagagaggaccctcagctgcaggtctgttggaataccctgctgtgtgaggtgtcagtgtgcccctgctggggagtgcctcccatttaggctgctcgggggtcaggggtcagggacccacttgaggcagtctgcccgttctcagatctccagctgcgtgctgggagaaccactgctctcttcaaagctgtcagacagggacatttaagtctgcagaggttattgctgtctttttgtttgtctgtgccctgcccccagaggtggagcctacagaggcaggcaggcctccttgagctgtggtgggctccacctagttcgagcttcccagctgctttgtttacctaagcaagcctgggcaatggcgggcgccactcccccagcctcgctgccgccttgcagtttgatctcagactgctgtgctagcaatcagtgagactccgtgggcgtaggaccctccgagccaggtgcgggatgtaatcttgtggtgcgccgttttttaagccggtccgaaaagcacaatattcggatgggagtgacccgattttccaggtgcgtccgtcacccctttctttgactcggaaagggaactccctgacgccttgcgcttcccaagtgaggcaatgcctcgccctgtttcggctcgcacacggtgcgcgcacccactgacctgcgcccactgtctggcactccctagtgagatgaacccggtacctcagatggaaatgcagaaatcacccgtcttctgcatcactcatgctgggagctgtagaccggagctgttcctatccggccatcttttttccgaattc

SEQ ID NO: 10621 - DNA, 6461 bp, Homo sapiens
tttatttttttatttatttttttattattattattactattattattattattttttaattatactttaagttttagggtacatgtgcacattgtgcaggttagttacatatgtatacatgtgccatgctggtgtgctgcacccactaactcgtcatctagcattaggtatatctcccaatgctatccctcccccctcccccctccccaccacagtccccagagtgtgatattccccttcctgtgtccatgtgatcacattgttcaattcccacctatgagtgagaatatgcggtgtttggttttttgttcttgcgatagtttactgagaatgatggtttccaatttcatccatgtccctacaaaggacatgaactcatcattttttatggctgcatagtattccatggtgtatatgtgccacattttcttaatccagtctatcattgttggacatttgggttggttccaagtctttgctattgtgaatactgccgcaataaacgtacatgtgcatgtgtctttatagcagcatgatttatagtcatttgggtatatacccagtaatgggatggctgggtcaaatggtatttctagttctagatccctgaggaatcgtcacactgacttccacaatggttgaattagtttacagtcccaccaacagtgtaaaagtgttcctatttctccacatcctctcccgcacccgttgtttcctgactttttaatgattgccattctaactggtgtgagatgatatctcatagtggttttgatttgcagttctctgatggccagtgatgatgagcattttttcatgtgttttttggctgcataaatgtcttcttttgagaagtgtctgttcatgtccctcacccactttttgatggggttgtttgtttttttcttgtaaatttgtttgagttcattgtagattctggatattagccctttgtcagatgagtaggttgcaaaaattttctcccatgttgtaggttgcctgttcactgtgatggtagtttcttttgctgtgcagaagctctttagtttaattagatcccatttgtcaattttgtctttggttgccattgcttttgatgttttggacatgaagtccttgcccacgcctatgtcctgaatggtaatgcctaggttttcttctagggttgttatggttttaggtctaacgtttaaatctttaatccatcttgaattgattttcgtataaggtgtaaggaagggatccagtttcagctttctacatatggctagccagttttcccagcaccatttattaaatagggaatcctttccccattgcttatttttctcaggtttgtcaaagatcagatagttgtaggtatgcggcattatttctgagggctctgttctgttccattgatctacatctctgttttggtaccagtactatgctgttttggttactgtagccttgtagtatagtttgaagtcaggtagtgtgatgccttcagctttgttcttttggcttaggattgacttggcaatgcgggctcttttttggttccatatgaactttaaagtagttttttttccagttctgtgaagaaagtcattggtagcttgatggggatggcattgaatctgtaaattaccttgggcagtatggccattttcacaatattgattcttcctacccatgagcatggaatgttcttccatttgtttgtatcctcttttatttccttgagcagtggtttgtagttctccttgaagaggtccttcacatcccttgtaagttggattcctaggtattttattctctttgaagcaattgtgaatgggagttcactcatgatttggctctctgtttgtctgttgttggtgtataggaatgcttgtgatttttgtacattgattttgtatcctgagactttgctgaagttgcttatcagcttaaggagatttggggctgagacaatggggttttctagataaacaatcatgtcgtctgcaaacagggacaatttgacttcctcttttcctaattgaataccctttatttccttctcctgcctgattgccctggccagaacttccaacactatgttgaataggagcggtgagagagggcatccctgtcttgtgccagttttcaaagggaatgcttccagtttttgcccattcagtatgatattggctgtgggtttgtcatagatagctcttattattttgagatatgtcccatcaatacctaatttattgagagtttttagcatgaagggttgttgaattttgtcaaaggctttttctgcatctattgagataatcatgtggtttttgtctttggctctgtttatatgctggattacatttattgatttgcgtatattgaaccagccttgcatcccagggatgaagcccacttgatcatggtggataagccttttgatgtgctgctggattcggtttgccagtattttattgagcatttttgcatcaatgttcatcaaggatattggtctaaaattctcttttttggttgtgtctctgcccggctttggtatcagaatgatgctggcctcataaaatgagttagggaggattccctctttttctattgattggaatagtttcagaaggaatggtaccagttcctccttgtacctctggtagaattcggctgtgaatccatctggtcctggactctttttggttggtaaactattgattattgccacaatttcagctcctgttattggtctattcagagattcaactccttcctggtttagtcttgggagagtgtatgtgtcaaggaatttatccatttcttctagattttctagtttattttcgtagaggtgtttgtagtattctctgatggtagtttgtatttctgtgggatcggtggtgatatcccctttatcattttttattgtgtctatttgattcttctctctttttttctttattagtcttgctagcggtctatcaattttgttgatcctttcaaaaaaccagctcctggattcattggttttttgaagggttttttgtgtctatttccttcagttctgctctgattttagttatttcttgccttctgctagcttttgaatgtgtttgctcttgcttttctagttcttttaattgtgatgttagggtgtcaattttggatctttcctgctttctcttgtaggcatttagtgctataaatttccctctacacactgctttgaatgcgtcccagagattctggtatgttgtgtctttgttctcgttggtttcaaagaacatctttatttctgccttcatttcgttatgtacccagtagtcattcaggagcaggttgttcagtttccatgtagttgagtggctttgagtgagattcttaatcctgagttctagtttgattgcactgtggtctgagagacagtttgttataatttctgttcttttacatttgctgaggagagctttacttccaactatgtggtcaattttggaataggtgtggtgtggtgctgaaaaaaatgtatattctgttgatttggggtggagagttctgtagatgtctattaggtctgcttggtgcagagctgagttcaattcctgggtatccttattgactttctgtctcgttgatctgtctaatgttgacagtggggtgttaaattctcccattattaatgtgtgggagtctaaatctctttgtaggtcactcaggacttgctttatgaatctgggtgctcctgtattgggtgcatatatatttaggatagttagctcctcttgttgaattgatccctttaccattatgtaatggccttctttgtctcttttgatctttgttggtttaaagtctgttttatcagagactaggattgcaacccctgcctttttttgttttccatttgcttggtagatcttcctccatccttttattttgagcctatgtgtgtctctgcacgtgagatgggtttcctgaatacagcacactgatgggtcttgactctttctccaacttgccagtctgtgtcttttaattggagaatttagtccatttacatttaaagttaatattgttatgtgtgaatttgatcctgtcattatgatgttagctggtgattttgctcgttagttgatgcagtttcttcctagtcttgatggtctttacattttggcatgattttgcagcggctggtaccggttgttcctttccatgtttagcgtttccttcaggagctcttttagggcaggcctggtggtgacaaaatctctcagcatttgcttgtctgtaaagtattttatttctccttcacttatgaagcttagtttggctggatatgaaattctgggttgaaaattcttttctttaagaatgttgaatattggcccccactctcttctggcttgtagggtttctgccgagagatccgctgttagtctgatgggcttccctttgagggtaacccgacctttttctctggctgcccttaacattttttccttcatttcaactttggtgaatctgacaattatgtgtcttggagttgctcttctcgaggagtatctttgtggcgttctctgtatttcctgaatctgaacgttggcctgctttgctagattggggaagttctcctggataatatcctgcagagtgttttccaacttggttccattctccgcatcactttcaggtacaccaatcagacgtagatttggtcttttcacatagtcccatatttcttggaggctttgctcatttctttttattcttttttctctaaacttcccttctcgcttcatttcattcatttcatcttccattgctgacaccctttcttccagttgatcgcatcggctcctgaggcttctgcattcttcacgtagttctcgagccttggttttcagctccatcagctcctttaagcacttctctgtattggttattctagttatacattcttctaaatttttttcaaagttttcaacttctttgcctttggtttgaatgtcctcccgtagctcagagtaatttgatcgtctgaagccttcctctctcagctcgtcaaaaacattctccatccagctttgttccattgctggtgaggaactgcgttcctttggaggaggagaggcgctctgcgttttagagtttccagtttttctgttctgttttttccccatctttgtggttttatctacttttggtctttgatgatggtgatgtacagatgggttttcggtgtggatgtcctttctgtttgttagttttccttctaacagacaggaccctcagctgcaggtctgttggaataccctgccgtgtgaggtgtcagtgtgcccctgctggggggtgcctcccagttaggctgctcgggggtcaggggtcagggacccacttgaggaggcagtctgcccgttctcagatctccagctgcatgctgggagaaccactgctctcttcaaagctgtcagacagggacatttaagtctgcagaggttactgctgtctttttgtttgtctgtgccctgctcccagaggtggagcctacagaggcaggcaggcctccttgagctgtggtgggctccaccaagtttgagcttcccggctgctttgtttacctaagcaagcctgggcaatggcgggcgcccctcccccagcctcgctgccgccttgcagtttgatctcagactgctgtgctagcaatcagcgagattccgtgggcgtaggaccctccgagccaggtgtgggatatagtctcgtggtgcgccgttttttaagccggtctgaaaagcgcaatattcgggtgggagtgacccgattttccaggtgcgtccgtcacccctttctttgacttggaaagggaactccctgaccccttgcgcttcccaggtgaggcaatgcctcggcctgcttcggctcgcgcatggtgagcgcacccactggcctgcgcccactgtctggcactccctagtgagatgaacccggtatctcagatggaaatgcagaaatcacccgtcttctgcgtcgctcacgctgggagctgtagaccggaagctgttcctattcggccatcttggctcctgaaaatcaggtttattttttaataatggctgtgctttacaacataagctcttgcaagccaatatgaacagactacagtatttcactgtggcaggctgaaagaatggccctccaaaaaaatattcacttcctagtccccagaatctatgaatactaccttaaatgcaaaagactgaatagtattttatttggtgaaagtgatatctaaaaatcctgagagtaaactcttaccctggattatgcgggtgggccctaaatctaataacaagtgaagtgtccttgtacgagcaaggcaatgggagattcgacacagacacacatggagtggagaaggcaatgtgaaaacagaggtagggattggagcaatgcagccacaaaccaaaaaaaca

SEQ ID NO: 10622 - DNA, 6069 bp, Homo sapiens
accattttgttttttttttttttctttttttttttttattatactttaagttttagggtacatgtgcacattgtgcaggttagttacatatgtatacatgtgccatgctggtgcgctgcacccactaacttgtcatctagcattaggtatatctcccaatgctatccctcccccctccccccaccccacaacagtccccagagtgtgatattccccttcctgtgtccatgtgatctcattgttcaattcccacctatgagtgagaatatgcggtgtttggttttttgttcttgcgatagtttactgagaatgatgatttccaatttcatccatgtccctacaaaggacatgaactcatcattttttatggctgcatagtattccatggtgtatatgtgccacattttcttaatccagtctatcattgttggacattcgggttggttccaagtctttgctattgtgaataatgccgcaataaacatacgtgtgcatatgtctttatagcagcatgatttatagtcatttgggtatatacccagtaatgggatggctgggtcaaatggtatttctagttctagatccctgaggaatcgccacactgacttccacaatggatgaactagtttacagtcccaccaacagtgtaaaagtgttcctatttctccacatcctctccagcacctgttgtttcctgactttttaatgattgccattctaactggtgtgagatggtatctcattgtggttttgatttgcatttctctgatggccagtgatgatgagcattttttcatgtgtttcttggctgcataaatgtcttcttttgagaagtgtctgttcatgtccttcgccaactttttgatggggttgtttgtttttttcttgtaaatttgtttgagttcattgtagattctggatattagccctttgtcagatgagtaggttgtgaaaattttctcccattttgtaggttgcctgttcactctgatggtagtttcttttgctgtgcagaagctctttagtttaattagatcccatttgtcaattttggcttttgttgccattgcttttggtgttttggacatgaagtccttgcccatgcctatgtcctgaatggtcatgcctaggttttcttctagggtttttatggttttaggtctaacgtttaaatctttaatccatcttgaattgatttttgtataaggtgtaaggaagggatccagtttcagcttcctacatatggctagccagttttcccagcaccatttattaaatagggaatcctttccccattgcttgtttttctcaggtttgtcaaagatcagatagttgtaggtatgcggcattatttctgagggctctgttctgttccattgatctatatctctgttttggtaccagtaccatgctgttttggttactgtagccttgtagtatagtttgaagtcaggtagcgtgatgcctccagctttgttcttttggcttaggattgacttggtgatgcgggctcttttttggttccatatgaacttgaaagtagttttttccaattctgtgaagaaagtcattggtagcttgatggggatggcattgaatctgtaaattaccttgggcagtatggccattttcatgatattgattcttcctacccatgagcatggaatgttcttccatttgtttgtatcctcttttatttccttgagcagtggtttgtagttctccttgaagaggtccttcacatcccttgtaagttggattcctaggtattttattctctttgaagcaattgtgaatgggagttgactcatgatttggctctctgtttgtctgttgttggtgtataagaatgcttgtgatttttgtacattgattttgtatcctgagactttgctgaagttgcttatcagcttaaggagattttgggctgagacaatggggttttctagatatagaatcatgtcatctgcaaacagggacaatttgacttcctcttttcctaattggataccctttatttccttctcttgcctaatttccctggccagaacttccaacactatgttgaataggagtggtgagagagggcatccctgtcttgtgccagttttcaaagggaatgcttccagtttttgcccattcagtatgatattggctgtgggtttgtcatagatagctcttattattttgaaatacgtcccatcaatacctaatttattgagagtttttagcatgaagggttgttgaattttgtcaaaggctttttctgcatctattgagataatcatgtggtttttgtctttgcctctgtttatatgctggattacatttattgatttgcgtatattgaaccagccttgcatcccagggatgaagcccacttgatcatggtggataagctttttgatgtgctgctggattcggtttgccagtattttattgaggatttttgcatcaatgttcatcaaggatattggtctaaaattctcttttttggttgtgtctctgcccagctttggtatgagaatgatgctggcctcataaaatgagttagggaggattccctctttttctattgattggaatagtttcagaaggaatggtaccagttcctccttgtacctctggtagaattcagctgtgaatccatctggtcctggactctttttggttggtaaactatcgattattgccacaatttcagctcctgttattggtctattaagagattcaacttcttcctggtttagtcttgggagagtgtatgtgtggaggaatttatccatttcgtctagattttctagtttatttgcgtagaggtgtttgtagtattctctgatggtagtttgtatttctgtgggatcagtggtgatatcccctttatcattttttattgtgtctatttgattcttctctctttttttctttattagtcttgctagtggtctatcaattttgttgatcctttcaaaaaaccagctcctggattcattgattttttgaagggttttttgtgtctctatttccttcagttctgctctgattttagttatttcttgccttctgctagcttttgaatgtgtttgctcttgcttttctagttcttttaattgtgatgttagggtgtcaattttggatctttcctgctttctcttgtgggcatttagtgctataaatttccctctacacactgctttgaatgcgtcccagagattctggtatgttgtgtctttgttctcgttggtttcaaagaacatctttatttctgccttcatttcgttatgtacccagtagtcattcaggagcaggttgttcagtttccatgtagttgagcggctttgagtgagattcttaatcctgagttctagtttgattgcactgtggtctgagagatagtttgttataatttctgttcttttacatttgctgaggagagctttacttccaactatgtggtcaattttggaataggtgtggtgtggtgctgaaaaaaatgtatattctgttgatttgggttggagagttctgtagatgtctattaggtctgcttggtgcagagctgagttcaattcctgggtatccttgttgactttctgtctcgttgatctgtctaatgttgacagtggggtgttaaagtctcccattattaatgcgtgggagtctaagtctcttcgtaggtcactcaggacttgctttatgaatctgggtgctcctgtattgggtgcatatatatttaggatagttagctcttcttgttgaattgatccctttaccattatgtaatggccttctttgtctcttttgatctttgttggtttaaagtctgttttatcagagactaggattgcaacctctgcctttttttgttttccatttgcttggtagatcttcctccatccttttattttgagcctatgtgtgtctctgcacatgagatgggtttcctgaatacagcacactgatgggtcttgactctttatccaatttgccagtctgtgtcttttcattggagcatttagtccatttacatttaaagttaatattgttatgtgtgcatttgatcctgtcattatgatgttagctggtgatattgctcgttagttgatgcagtttcttcctagtctcgatggtctttacattttggcatgattttgcagcggctggtactggttgttcctttccatgtttagtgcttccttcaggagctcttttagggcaggcctggtggtgacaaaatctctcagcatttgcttgtctgtaaagtattttatttctccttcacttatgaagcttagtttggctggatatgaaattctgggttgaaaattcttttctttaagaatgttgaatattggcccccactctcttctggcttgtagggtttctgatgagagatccgctgttagtctgatgggcttccctttgagggtaacccgacctttctctctggctgcccttaacattttttccttcatttcaactttggtgaatctgacaattatgtgtcttggagttgctcttctcgaggagtatctttgtggcgttctctgtattttctgaatctgaacgttggcctgccttgctagattggggaagttctcctggataatatcctgcagagtgttttccaacttggttccattctccccatcactttcaggtacaccaatcagacgtagatttggtcttttcacatagtcccatatttcttggaggctttgctgatttctttttattcgtttttctctaaacttcccttctcgcttcatttcattcatttcatcttccatcgctgataccctttcttccagttgattgcatcggctcctgaggcttctgcattcttcacgtagttctcgagccttggttttcagctccatcagctcctttaagcacttctctgtattggttattctagttatacattcttctaaatttttttcaaagttttcaacttctttgcctttggtttgaatgtcctcccgtagctcagagtaatttgatcgtctgaagccttcttctctcagctcgtcaaagtcattctccatccagctttgttccattgctggtgaggaactgtgttcctttggaggaggagagacgctctgcgttttagagtttccagtttttctgttctgttttttccccatcgttgtggttttatctacttttggtctttgatgatggtgatgtacagatgggttttcggtgtggatgtcctttctgtttgttagttttccttctaacagacaggaccctcagctgcaggtctgttggaataccctgccgtgtgaggtgtcagtctgcccctgctggggggtgcctcccagttaggctgctcgggggtcaggggtcaggaacccacttgaggaggcagtctgccggttctcagatctccagctgcgtgctgggagagccactgctctcttcaaagctgtcagacagggacatttaagtctgcagaggttactgctgtctttttgtgtgtctgtgccctgcccccagaggtggagcctacagaggcaggcaggcctccttgagctgtggtgggctccacccagttggagctgcccgctgctttgtttacctaatcaagcctgggcaatggcgggcgcccctcccccagcctcgctgccgccttgcagtttgatctcagactgctgtgctagcaatcagcgagattccgtgggcataggaccctccaagccaggtgtgggatataatctcgtggtgcgccgttttttaagtcagtcagaaaagcgcagtattcgggtgggagtgacccgattttccaggtgcgtccgtcacccctttctttgactcggaaagggaactccctgaccccttgcgcttcccaggtgaggcaatgcctcgccctgcttcggctcgcgcacggtgcgtgcacccactggcctgcgcccactgtctggcactccctagtgagatgaacccggtacctcagatggaaatgcagaaatcacccgtcttctgcgttgctcatgctgggagctgtagaccggagctgttcctattcggccatcttggctcctccctccccacaccattttg

SEQ ID NO: 10623 - DNA, 5273 bp, Homo sapiens
ccacttttctttttttttttttattatactttaagttttagggtacatgtgcacattgtgcaggttagttacatatgtatacatgtgccatgctggtgcgctgcacccactaactcgtcatctagcattaggtatatctcccaatgctatccctcccccctccccccaccccaccacagtccccagagtgtgatattccccttcctgtgtccatgtgatctcattgttcaattcccacctatgagtgagaatatgcggtgtttggttttttgttcttgcaatagtttactgagaatgatgatttccaatttcatccatgtccctacaaaggacatgaactcatccttttttatggctgcatagtattccatggtgtatatgtgccacattttcttaatccagtttatcattgttggacatttgggttggttccaagtctttgctattgtgaataatgccgcaataaacatacgtgtgcatgtgtctttatagcagcatgatttatagtcctttgggtatatacccagtaatgggatggctgggtcaaatggtatttctagttctagatccctgaggaatcgccacactgacttccacaatggttgaactagtttacagtcccaccaacagtgtaaaagtgttcctatttctccacatcctctccagcacctgttgtttcctgactttttaatgattgccattctaactggtgtgagatggtatctcattgtggttttgatttgcatttctctgatggccagtgatgatgagcattttttcatgtgttttttggctgcgtaaatgtcttcatttgagaagtgtctgttcatgtccttcgcccactttttgatggggttgtttgtttttttcttgtaaatttgtttgagttcattgtagattctggatattagccctttgtcagatgagtaggttgcgaaaattttctcccattttgtaggttgcctgttcactctgatggtagtttcttttgctgtgcagaagctctttagtctaattagatcccatttgtcaattttgtcttttgttgccattgcttttggtgttttggacatgaagtccttgcccatgcctatgtcctgaatggtactgcctaggttttcttctagggtttttatggttttaggtctaatgtttaagtctttaatccatcttgaattgatttttgtataaggtgtaaggaagggatccagtttcagctttctacatatggctagccagttttcccagcaccatttattaaatagggaatcctttccccattgcttgtttttctcaggttcgtcaaagatcagatagttgtagatatgcggcgttatttctgagggctctgttctgttccattgatctatatctctgttttggtaccagtaccatgctgttttggttactgtaggcttgtagtatagtttgaagtcaggtagtgtgatgcctccagctttgttcttttggcttaggattgccttggcgatgcgggctcttttttggttccatatgaactttaaagtagttttttccaattctgtgaagaaagtcattggtagcttgatggggatggcattgaatctgtaaattaccttgggcagtatggccattttcatgatattgattcttcctacccatgagcatggaatgttcttccatttgtttgtatcctcttttatttcctcgagcagtggtttgtagttctccttgaagaggtccttcacatcccttgtaaggtggattcctaggtattttattctctttgaagcaattgtgaatgggagttcactcgtgatttggctctctgtttgtctgttgttggtgtataagaatgcttgtgatttttgtacattgattttgtatcctgagactttgctgaaattgcttatcagcttaaggagattttgggctgagacaatggggttttctagatatacagtcatgtcgtctgcaaacagggacaatttgacttcctcttttcctaattgaataccctttatttccttctcctgcctaattgccctggccggaacttccaacactatgttgaataggagtggtgagagagggcatccctgtcttgtgccagttttcaaagggaatgcttccagtttttgcccattcagtatgatattggctgtgggtttgtcatagatagctcttattatgttgaaatacgtcccatcaatacctaatttattgagagtttttagcatgaagggttgttgaattttatcaaaggctttttctgcatctattgagataatcatgtggtttttgtctttggctctgtttatatgctggattacatttattgatttgcatatattgaaccagccttgcatcccagggatgaagcccacttgatcatggtggataagctttttgatgtgctgctggattcattttgccagtattttattgaggatttttgcatcaatgttcatcaaggatattggtctaaaattctcttttttggttgtgtctctgcccggctttggtatcagaatgatgctggcctcataaaatgagttagggaggattccctctttttctattgattggaatagtttcagaaggaatggtaccagttcctccttgtacctctgatagaattcggctgtgaatccatctggtcctggactctttttggttggtaaactattgattattgccacaattttcagctcctgttattggtctattcagagattcaacttcttcctggtttagtcttgggagagtgtatgtgtcgaggaatttatccatttcttctttatttttctagtttatttgtgtagaggtgtttgtagtatgctctgatggtagtttgtatttctgtgggatcagtggtaatatcccctttatcattttttattgcgtctatttgattcttctgtctttttttctttattagtcttgctagcggtctatcaattttgttgatcctttcagaaaaccagctcctggattcattaattttttgaagagttttttgtgtctctatttccttcagttctgctctgattttagttatttcttgccttctgctagcttttgaatgtgtttgctcttgcttttctagttcttttaattgtgatgttagggtgtcaattttggatctttcctgctttctcttgtgggcatttagtgctgtaaatttccctctacacactgctttgaatgcatcccaaagattctggtatgttgtgtctttgttctcgttggtttcaaagaacatctttatttctgccttcatttcgttatgtatccagtagtcattcaggagcaggttgttcagtttccatgtagttgagtggttttgagtgagattcttaatcctgagttctagtttgattgcactgtggtctgagagatagtttgttatcatctctgttcttttacatttgctgaggagagctttacttccaagtatgtggtcaattttggaataggtgtggtgtggtgctgaaaaaaatgtatattctcttgatttgggctggagagttctgtagatgtctattaggactgcttggtgcagagctgagttcaattcctgggtatccttgctgactttctgtctcattgatctgtctaatgttgacagtggggtgttaaagtctcccattattaatgtgtgggagtctaagtctctttgtaggtcactcaggacttgctttatgaatctgggtgctcctgtattgggtgcatatatatttaggatagttagctcttctcgttgaattgatccctttaccattatgtaagggccttctttgtctcttttgatctttgttggtttaaagtctgttttatcagagactaggattgcaacccctgcctttttttgttttccattttcttggtagatcttcctccatccttttattttgagcctatgtgggtctctgcacgtgagatgggtttcctgaatacagcacactgatgggtcttgactctttatccaatttgccagtctgtgtcttttaattggagcatttagtccatttacatgtaaagttaatattgttatgtgtgaatttgatcctgtcattatgatgttagctggttattttgcttgttagttgatgcagtttcttcctagtctcgatggtctttacattttggcatgattttgcagcggctggtaccggttgttcctttccatgtttagtgcttccttcaggagctcttttagggcaggcctggtggtgacaaaatctctcagcatttgcttgtctgtaaagaattttatttctccttcacttatgaagcttagtttggctggatatgaaattctgggttgaaaattcttttctttaagaatgttgaatattggcccccactctcttctggcttgtagggtttctgccaagagatccgctgttagtctgatgggcttccctttgagggtagcctgacctttctctctggctgcccttaacattttttccttcatttcaactttggtgaatctgacaattatgtgtcttggagtgctcttctcgaggagtatctttgtggcattctctgtatttcctgaatctgaacgttggcctgccttgctagattggggaagtctcctgggataatatcctgcagagtgtttccaacttggtccattctccccatcactttcagtacaccaatcagacgtagatttggtcttttcacatagtcccatatttcttggaggctttgctcatttctttttattcttttttctctaaacttcccttctcgcttcatttcattcatttcatcttccattgctgataccctttcttccagttgatcgcatcggctcctgaggcttctgcattctccacgtagttctcgagccttggttttcagctccatcagctcctttaagcacttctctgtattggttattctagttatacattcttctaaaatttttttcaaagttttcaacttctttgcctttggtttgaatgtcctcccgtagctcagagtaatttgatcgtctgaagccttcttctctcagctcgtcaaagtcattctccatccagctttgttccgttgctggtgaggaactgcattcctttggaagaggggaggcactctgcgttttagagtttccagtttttgtgttctgttttttccccatctttgtggttttatctacttttggtctttgatgatggtgatgtacagatgggtttttggtgtggatgtcctttctgtttgttagttttccttctaacagacaggaccctcagctgcaggtctgttggaataccctgccg

SEQ ID NO: 10624 - DNA, 6069 bp, Homo sapiens
tttgtctttcttttttttttttttttttttttttattatactctaagttttagggtacatgtgcacattgtgcaggttagttacatatgtatacatgtgccatgctggtgtgctgcacccactaatgtgtcatctagcattaggtatatctcccaatgctatcccttccccctcccccgaccccaccacagtccccagagtgtgatattccccttcctgtgtccatgtgatctcattgttcaattcccacctatgagtgagaatatgcggtgtttggttttttgttcttgtgatagtttactgagaatgatggtttccaatttcatccatgtccctacaaaggatatgaactcatcatattttatggctgcatagtattccatggtgtatatgtgccacattttcttaatccagtctatcattgttggacatttgggttggttccaagtctttgctattgtgaatagtgccgcaataaacatacgtgtgcatgtgtctttatagcagcatgatttatactcatttgggtatatacccagtaatgggatggctgggtcaaatggtatttctagttctagatccctgaggaatcgccacactgacttccacaatggttgaactagtttacagtcccaccaacagtgtaaaagtgttcctatttctccgcatcctctccagcacctgttgtttcctgactttttaatgattgccattctaactggtgtgagatgatatctcatagtggttttgatttgcatttctctgatggccagtgatgatgagcatttcttcatgtgttttttggctgcataaatgtcttcttttgagaagtgtctgttcatgtcctttgcccactttttgatggggttgtttgtttttttcttgtaaatttgtttgagttcattgtagattctggatattagccctttgtcagatgagtaggttgcgaaaattttctcccatgttgtaggttgcctgttcactctgatggtagtttcttttgctgtgcagaagctctttagtttaattagatcccatttgtcaattttgtcttttgttgccattgcttttggtgttttggacatgaagtccttgcccacgcctatgtcctgaatggtaatgcctaggttttcttctagggtttttatggttttaggtttaacgtttaaatctttaatccatcttgaattgatttttgtataaggtgtaaggaagggatccagtttcagctttctacatatggctagccagttttcccagcaccatttattaaatagggaatcctttccccattgcttgtttttctcaggtttgtcaaagatcagatagttgtagatatgtggcattatttctgagggctctgttctgttccattgatctatatctctgttttggtaccagtaccatgctgttttggttactgtagccttgtagtatagtttgaagtcaggtagtgtgatgcctccagctttgttcttttggcttaggattgacttggcaatgcgggctcttttttggttccatatgaactttaaagtagttttttccaattctgtgaagaaagtcattggtagcttgatggggatggcattgaatctgtaaattaccttgggcagtatggccattttcatgatattgattcttcctacccatgagatggaatgttcttccatttgtttgtgttctcttttatttccttgagcagtggtttgtagttctccttgaagaggtccttcacatcccttgtaagttggattcctaggtattttattctctttgaagcaattgtgaatgggagttcacccatgatttggctctctgtttgtctgttgttggtgtataagaatgcttgtgatttttgtacattgattttgtatcctgagactttgctgaagttgcttatcagcttaaggagattttgggctgagacgatggtgttttctagataaacaatcatgtcatctgcaaacagggacaatttgacttcctcttttcctaattgaataccctttatttccttcttctgcctgattgccctggccagaacttccaacactatgttgaataggagcggtgagagagggcatccctgtcttgtgccagttttcaaagggaatgcttccagtttttgcccattcagtatgatattggctgtgggtttgtcatagatagctcttattattttgaaatacgtcccatcaatacctaatttattgagagtttttagcatgaagggttgttgaattttgtcaaaggctttttctgcatctattgagataatcatgtggtttttgtctttggctctgtttatatgctggattacatttattgatttgcgtatattgaaccagccttgcatcccagggatgaagcccacttgatcatggtggataagctttttgatgtgctgctggattcggtttgccagtattttattgaggatttttgcatcaatgttcatcaaggatattggtctaaaattctcttttttgattgtgtctctgcccggctttggtatcagaatgatggtggcctcataaaatgagttagggaggattccctctttttctattgattggaatagtttcagaaggaatggtaccagttcctccttgtacctctggtagaattcggctgtgaatccatctggtcctggactctttttggttggtaaactattgattattgccacaatttcagagcctgttattggtctattcagagattcaacttcttcctggtttagtcttgggagagtgtatgtgtcgaggaatgtatccatttcttctagattttctagtttatttgcgtagaggtgtttgtagtattctctgatggtagtttgtatttctgtgggatcggtggtgatatcccctttatcattttttattgtgtctatttgattcttctctctttttttctttattagtcttgctagcagtctatcaattttgttgatcctttcaaaaaaccagctcctggattcattgattttttgaagggttttttgtgtctctatttccttcagttctgctctgattttagttatttcttgccttctgctagcttttgaatgtgtttgctcttgcttttctagttcttttaattgtgatgttagggtgtcaattttggatctttcctgctttctcttgtgggcattcagtgctataaattttcctctacacactgctttgaatgcgtcccagagattctggtatgttgtgtctttgttctcgttggtttcaaagaacatctttatttctgccttcatttcgttatgtacccagtagtcattcaggagcaggttgttcagtttccatgtagttgagcggctttgagtgagattcttaatcctgagttctagtttgattgcactgtggtctgagagatagtttgttataatttctgttcttttacatttgctgaggagagctttacttccaactatgtggtcaattttggaataggtgtggtgtggtgctgaaaaaaatgtatattctgttgatttggggtggagagttctgtagatgtctattaggtctgcttggtgcagagctgagttcaattcctgggtatccttgttgactttctgtctcgttgatctgtctaatgttgacagtggggtgttaaagtctcccattattaatgtgtgggagtctaagtctctttgtaggtcactgaggacttgctttatgaatctgggtgctcctgtattgggtgcataaatatttaggatagttagctcctcttgttgaattgatccctttaccattatgtaatggccttctttgtctcttttgatctttgttggtttaaagtctgttttatcagagactaggattgcaacccctgcctttttttgttttccattggcttggtagatcttcctccatccttttattttgagcctatgtgtgtctctgcacgtgagatgggtttcctgaatacagcacactgatgggtcttgactctttatccaacttgccagtctgtgtcttttaattgcagaatttagtccatttatatttaaagttaatattgttatgtgtgaatttgatcctgtcattatgatgttagctggtgattttgctcattagttgatgcagtttcttcctagtctcgatggtctttacattttggcatgattttgcagcggctggtaccggttgttcctttccatgtttagcgcttccttcaggagctcttttagggcaggcctggtggtgacaaaatctctcagcatttgcttgtctataaagtattttatttctccttcacttatgaagcttagtttggctggatatgaaattctgggttgaaaattcttttctttaagaatgttgaatattggcccccactctcttctggcttgtagggtttctgccgagagatccgctgttagtctgatgggctttcctttgagggtaacccgacctttctctctggctgcccttaacattttttccttcatttcaactttggtgaatctgacaattatgtgtcttggagttgctcttctcgaggagtatctttgtggcgttctctgtatttcctgaatctgaacgttggcctgccttgctagattggggaagttctcctggataatatcctgcagagtgttttccaacttggttccattctccacatcactttcaggtacaccaatcagacgtagatttggtcttttcacatagtcccatatttcttggaggctttgctcatttctttttattcttttttctctaaacttcccttctcccttcatttcattcatttcatcttccattgctgataccctttcttccagttgatcgcatcggctcctgaggcttctgcattcttcacgtagttctcgagccttggttttcagctccatcagctcctttaagcacttctctgtattggttattctagttatacattcttctaaatttttttcaaagttttcaacttctttgcctttggtttgaatgtcctcccgtagctcagagtaatttgatcgtctgaagccttcttctctcagctcgtcaaaatcattctccatccagctttgttctgttgctggtgaggaactgcgttcctttggaggaggagaggcgctctgatttttagagtttccagtttttctgtactgttttttccccatctttgtggttttatctacttttggtctttgatgatggtgatgtacagatgggttttcggtgtagatgtcctttctgtttgttagttttccttctaacagacaggaccctcagctgcaggtctgttggaataccctgccgtgtgaggtgtcagtgtgcccctgctggggggtgcctcccagttaggctgctcgggggtcaggggtcagggacccacttgaggaggcagtctgcccgttctcagatctccagctgcgtgctgggagaaccactgctctcttcaaagctgtcagacagggacacttaagtctgcagaggttactgctgtctttttgtttgtctgtgccctgcccccagaggtggagcctacagaggcaggcaggcctccttgagctgtggtgggctccacccagttcgagcttcccggctgctttgtttacctaagcaagcctgggcaatggcgggcgtccctcccccagcctcgttgccgccttgcagtttgatctcagactgctgtgctagcaatcagcgagattccgtgggcgtaggaccctctgagccaggtgtgggatatagtctcgtggtgcgccgtttcttaagccggtctgaaaagcgcaatattcggatgggagtgacccgattttccaggtgcgtccgtcacccctttctttgactcggaaagggaactccctgaccccttgcgcttcccaggtgaggcaatgcctcgccctgcttcggctcgcgcacggtgcgcacacacactggcctgcgcccactgtctggcactccctagtgagatgaacccggtacctcagatggaaatgcagaaatcacccgtcttctgcgtcgctcacgctggtagctgtagaccggagctgttcctattcggccatcttggctcctcctcccatttgtctttctttat

SEQ ID NO: 10625 - DNA, 10738 bp, Homo sapiens
tcccaaaatgctgggattacaggcgtgagccaccacgcccggcaaaagttattcttaacatgttaaaagttctaatgacaaacagataaaagctccatggtcttttttaaaaatataaaatggttttaaagactgggcttcaatttaaagatgtacatttgcttttcagattgaatttaataaacagcccacttctgcaacaagagggctacttttttgcctttatttttatttttaataattctatttatgaggtatgatatgatattttgatacatgtatataatgtgtgatgatcaaatcagggtaatagggttactttttcagtctggtcctcaggagacagaaaccacacagtaggttaaatagggaaaggtaatataaagaatttttaagcaatgatagaagagtaacaagcaagaacaaagttgggatgggagtttagaccttgttgaagaatatatagttgcagcccactggatggaggagaggtttgctggtttgcccaggctacagctgatccctattcactgggcaggcaggaataacctcctggggtactgacaaaacaggctgataagtaggcctggagagagtgtcagatgtgctactttaggcattcctggaaccaggagctcgagagaccacccttttcgggaatctagtgtacgtttgtatacgacttggaccaggatgtctaagagcagctatgtggaacaaaggcagggcagcaggccctgtaatgaccctggttggtgtgtactcaaaactggggaaagggtgtgggaaacagcaacctgggctggagaggcatttgctgggagtggagggggaaatagaggcaggatgttctgtcttgttctctatagctcaaaatactagaccacttgagggattccctcaagccatacaaaaacaggcagcaggctggatttagcctataggccacagttttccacactctgttctaggaacctggtgatggagagaccggagagaactagcgaggaaaaccccttcttcctgcagcatctctacaatgggctttactgacaagttttaacagcttgccagctaggaaatgtaaaatatttaaaaggcccagatctgttttcacgtatcaggcaacaaagggtgaatttgatgctgagagacaatacgttggaaactggcatagctggtgtggtagaaattatggtaggggaaggatggttgcttgagcaaagctttgattaatgagaagttgtgagaaaagagctgatatggcaacttttcttttctggatggaagatagaaaaggagtgtccttgttgggtttacctatgaggtatgagaatgatcattctgaacttttccctaggtgaggtgttcatgttctcttctgtaaaatgtgaataacactattcacctgccagtggtgttgaaagaagtagtgataatttaaacacaatgcctgatgaataggccttcagtaaatggtagctattcctttttttttttttttttttttttttttgagacggagtctcgctctgtcgcccaggctggagtgcagtggcgggatctcggctcactgcaagctccgcctcccgggttcacgccattctcctgcctcagcctcccaagtagctgggactacaggcgcccgccactacgcccggctaattttttgtatttttagtagagacggggtttcaccgttttagccgggatggtctcgatctcctgacctcgtgatccgcccgcctcggcctcccaaagtgttgggattacaggcgtgagccaccgcgcccggccagctattcttccctatatggatcaaaagctgagaaaaagccatagaagccggagctgggttaaaacagaaaatcagtgtgatttccctaggaaatggagaatttagtgtcttttgaatggaaatatttagaattggaattttgaaggaaaaatggaggaaattatgttattatgcagtgtaattatggaatgtattgtgaactgggaatgaaaataaggtttgctattggttatattctttagcatggacatgtattttcatggttacttaatttggtggagaacaaattttaattaatgaatttggattttgtgaactttcaggtttttagagattggatagaaataaggttctctgaggtggggatgtagtaccatacaacataaaattaggcatgtaggtctgagatgttttagttctcagactataacagcagttgcttatatatatggtaaatgattttctgtgtttctgctttggcttcatttgtgcagtattctgggattctgacaagggtggatgtctggggattactataacagaattgaatgatgcctagaatgtagtattattgtgaggctgcagcttgactgtgccttgggatgcctcaaacctcatattgaaagtatgaatcctcagagaaatgggttttcagtttgagattaactgatcatagtagaatggttcttagagacctcatattgtgggctcgtgcaaagacctaactattagtaatgcttggatgaggggcttaatttatgtagcacacttgtgtttgggtaagaaaaagaacttgggtaggaatttgataacactaaaagccaacacttctcccttgctgtcatttgggggttggggtacaggtatagattttatgtatgtttatgttatgtggggtatttagagatccttagtattcttcaatggaaagggccagggagaccagatcttcatattttcaggctacttgctgagagattttcctgctcctctagtgagatcccttgggtctaggctccccagactcacttccaaacaattgtgctgaggattaaaaggatgaatgcacaattgccaaactatccccatgcttttaagaaacattgttattttatttttgcattcctttttataagccacgttagtcttctccaaagctatgactgggactggtgggatcatttgttcaaatgactgttgttggggtcatttgtattaaagtagaagccacatagtagtgcagggggaagacagggtcttagaatataaaacaagatgagtcagaaaatgacttttggaaaaaaaagtagtagcaggttcaggtcaatgggggagtcttagtacactgctgaacaggtttctgtcattcatcttggggtgagataaattaaataaatgcaagataattgagtcagaaagatgcaggaccttggaatcccaggcctgtggatccagggagggacagtgagatagaatgaggttagatcagtatactgctgaattctgctgtgctctggcatggagttatccttggtgaaattaaatcagtataactccgtatgagtgagtgagattaatgaaacctctgtctgatgttcttgggatttagcatttaaaggttgctcactctttaaatcaaccaagttcctctagagacctccaagaacaaaaactatcttgctctggaattcaaagcagaaggatataggttagacatcattcccaagtgtccttcctccctacaaccctctcacccctgacccacaaaacttcatgaaattaagagctattgctctttctcacaaaaggttggtgctgtcctctttaagtgataacttctgatttataatcatagaccattaaaattcaaagagatacttcaggcttgtctttgtggagctggagttggtatctctggtttagtggtgtggtgctagtttttactgacttttttcctaaagaaatcacttttctgaagtatcttttccttttgggatgtcagaagaagagagctggcagtagatttcttccaaagaggaaggaaagaactcttaagggattggtgatttggaaaatatctgtcagctagctttcttgacctctgagccagctgagtggcaagtggggcatttgtttcctgctcttattaaaaaaaagtattcatctactacttacagcatatttatacagagatctataaaaaaatgaatggttatatagataaatgaaaatgtttgcttttttgctgttgatgtttttgattttttttctttttctttcttttattttatactttaagtttaggatacatgtgcacaatgtgcaggttagttacatatgtatacatgtgaaatgctggtgcgctgcacccactaactcgtcatctagcattaggtatatctcccaatgctatccctcccccctccccccaccccaccacagtccccagagcgtgatattccccttcctgtgtccatgtgatctcattgttcaattcccacctatgagtgagaatatgtggtgtttggttttttgttcttgtgatagtttactgagaatgatgatttccaatttcatccatgagactaaaattcctaagacagtaatcccagctacttgggaggctgaggcaggggaatcgtttgaagctgggaggcggaggttgcagtgaatcgagaccgtgccacagcactccagcctgggcgaccaaaagaggctgtcttaaaagaaaaaaaaaatcctaagagagtaaatgatctgacattgaccatgtgcccatttctggaccagtcactgtgccaggaagaatgagtgaataatgacaggggttgggggtggggaggtgagggtggagaggatttggggattccatgattaacagtgtctcttggaagcatattgaaccatggagttcagttattagaggaatggtagagataagctgagcagacaataacaattgtctccccccaccccacaacagtccccagagagtgatgttccccttcctgtgtccatgtgttctcattgttcaattcccacctatgagtgagaatatgtggtgtttggttttttgttcttgtgatagtttactgagaatgatgatttccaatttcatccatgtccctacaaaggacatgaactcatcattttttatggctgcatagtattccatggtgtatatgtgccacattttcttaatccagtctatcattgttggacatttgggttggttccaagtctttgctattgtgaatagtgccgcaataaacatacgtgtgcgtgtgtctttatagcagcatgatttatagtcctttgggtatatacccagtaatgggatggctgggtcaaatggtatttctagttctagatccctgaggaatcgccacactgtcttccacaatggatgaattagtttacagtcccaccaacagtgcaaaagtgttcctatttctccacatcctctccagcacctgttgtttcctgactttttaatgattgccattctaactggtgtgagatgatatctcattgtggttttgatttgcatttctctgatggccagtgatagtgagcattttttcatgtgttttttggctgcataaatgtcttcttttgagaagtgtctgttcatgtccttcacccactttttgatggggttgtttgtttttttcttgtaaatttgtttgagttcattgtagattctggatattagccctttgtcagatgagtaggttgcgaaaattttctcccattttgtgggttgcctgttcactctgatggtagtttcttttgctgtgcagaagctctttagtttaattagatcccatttgtcaattttggcttttgttgctattgcttttggtgttttagacatgaagtccttgcccatgcctatgtcctgaatggtaatgcctaggttttcttctagggtttttatggttttaggtctaatgtttaagtctttaatccatcttgaattgatttttgtataaggcataaggaagggatccagtttcagctttctacatatggctagccagttttcccagcaccatttattaaatagggaatcctttccccattgcttgtttttctcaggtttgtcaaagatcagatagttgtagataagaggcgttatttctgagggctctgttctgttccattgatctatatctctgttttggtaccagtaccatgctgttttggtgactgtagccttgtagtatagtttgaagtcaggtagtgtgatgcctccagctttgttcgtttggcttaggattgacttggcgatgcgggctcttttttggttccatatgaactttaaagtagttttttccaattctgtgaagaaagtcattggtagcttgatggggatggcattgaatctataaattaccttgggcagtatggccattttcacgatattgattcttcctagccatgagcatggaatattcttccatttgtttgtatcctcttttatttcatagagcagtggtttgtagttctccttgaagaggtccttcacgtcccttgtaagttggattcctaggtattttattctctttgaagcaattgtgaatgggagttcactcatgatttggctctctgtttgtctgttattggtgtataagaatgcttgtgatttttgtacattgattttgtatcctgagactttgctgaagttgcttaccagcttaaggagattttgggctgagacaatggggttttctagatatacaaacatgtcgtctgcaaagagggacaatttgacttcctcttttcctaattgaataccctttatttccttctcctgcctaattgccctggccagaacttccaacactatgttgaataggagtggtgagagagggcatccctgtcttgtgccagttttcaaagggaatgcttccagtctttgcccattcagtatgatattggctgtgggtttgtcatagatagctcttattattttgagatatgtcccatcaatacctaatttattcagagtttttagcatgaagggttggtgaattttgtcaaaggccttttctgcatctattgagataatcatgtggtttttgtctttggttctgtttatgtgctggattacatttattgatttgcgtatattgaactagccttgcatcccagggatgaagcccacttgatcatggtggataagctttttgatgtgctgctggattctgtttgccagtattttattgaggatttttgcatcaatgttcatcaaggatattggtctaaaattgtctttttcggttgtgtctctgcccggctttggtatcaggatgatgctggcctcataaaatgagttagggaggattccctctttttctgttgattggaatagtttcagaaggaatggtaccagttactccttatacctctggtagaattcggctgtgaatccatctggtcctggactctttttggttggtaagctattgataattgccaaatttcagctcctgttattggtctattcagagattcaacttcttcctggtttagtcttgggagggtgtatttgtcgaggaatttatccatttcttctagattttctagtttatttgcgtagaggtgtttgtagtattctctgatggtagtttgtgtttctgtgggatcagtggtgatatcccctttatcattttttattgcatctacttgattcttctctctttttttctttattagtcttgctagcggtctatcaattttgttgatcctttcaaaaaaccagctcttggattcattaattttttgaaggggttttgtgtctctatttccttcagttctgctctgattttagttatttcttgccttctgctagcttttgaatgtgtttgctcttgcttttctagttcttttaattgtgatgttagggtgtcaattttggatctttcctgctttctcttgtgggcatttagtgctataaatttccctctacacactgctttgaatgtgtcccagagattctggtatgttgtgtctttgttcttgttggtttcaaagaacatctttatttctgccttcatttcgttatgtacccagtagtcattcaggagcaggttgttcagtttccatgtagttgagcagtttttgagtgagtttcttaatcctgagttctactttgattgcactgtggtctgagagatagtttgttataatttctgttcttttacatttgctgaggagagctttacttccaactatgtggtcaattttggaataggtgtggtgtggtgctgaaaaaaatgtatattgtgttgatttggggtggagagttctgtagatgtctattaggtccgcttgatgcagagctgagttcaattcctgagtatccttgttaactttctgtgtcgttgatctgtctaatgttgacagtggggtgttaaagtgtcccattattaatgtgtgggagtctaagtctctttgtaggtcactcaggacttgctttatgaatctgggtgctcctgtattgggtgcatatatatttagaatagttagctcttctcgttgaattgatccctttaccattatgtaatggccttctttgtgtcttttgatttttgttggtttaaagtctgttttatcagagactaggattgcaacccctgcctttttttgttttccatttgcttggtagatcttcctccacccttttattttgaacctatgtgtgtctctgcatgtgagatgggtttcctgaatacaacacactgatgggtcttgactctttctccaatttgccagtctgtgtcttttaattggagcatttactccatttacatttaaagttaatattgttatgtgtgaatttgaacctgtcattatgatgttagctggttattttgctcgttagttgatgcagtttcttcctagtctcgatggtctttacattttggcatgattttgcagcggctggtactggttgttcctttccatgtttagtgcttccttcaggagctcttttagggcaggcctggtggtgacaaaatctctcaacatttgcttgtctgtaaagtattttatttctccttcacttatgaagcttagtttggctggatatgaaattctaggttgaaaatttttttctttaagaatgttgaatattggcccccactctcttctggcttgtagagtttctgctgagagatcagatgttagtctgatgggcttccctttgtgggtaacccgacctttctctctggctgcccttaacattttttccttcatttcaactttggtgaatctgacaattatgtgtcttggagttgctcttctcgaggagtatctttatggcgttctctgtatttcctgaatctgaatgttggcctgccttgctagattggggaagttctcctggataatatcctgcagagtgttttccaacttggttccattcccccatcactttcaggtacaccaatcagaagtagatttggtcttttcacatagtcccatatttcttggaggctttgttcgtttctttttattcttttttctctaaacttcccttctcgcttcatttcattcatttcatcttccatcgctgataccctttcttccaattgatcgcatcggctcctgagtcttctgcattcttcccgtagttctccagccttggccctcagctccatcagctcctttaggcacttctctctattgggtattctagttatacattcatctaaatttttttcaaagcttttaacttctttgcctttggtttgaatttcctcctgtagctcatagttcgatcgtctgcagccttctctcaactcgtcaaagtcattctccgtccagctttgttccattgctggtgaggaactgcgttcctttggaggaggagaggttctctgctttttagagtttccagtttttctgctctgttttttccccatctttgtggttttatctacttttggtctttgatgatggtgatgtacagatgcgtttttggtgtggatatcctttctgtttgttagttttccttctaacggacaggaccctcagctgcaggtctgttggagtttgctaaaggtccactccagaccctgtttgcctgggtatcagcagcggcgtctgcagaacagtggtttttcgtgaacggtgaatgctgctgtctgattgttcctctggaagttttgtctcagaggagtacccggccgtgtgaggtgtcagtttgcccctacttgggggtgcctcccagttaggctgctcaggggtcaggggtcagggaagcacttgaggaggctgtctgcccgttctcagatctccagctgcgtgctgggagaaccactgctctcttcaaagctgtcagacagggacatttaagtctgcagaggttactgctgtctttttgtttgtctgtgccctgcccccagaggtggagcctacagaggcagacaggcaggcctccttgagctgtggtgggctccacccagttcgagcttcccggctgcattgtttacctatgcaagcctgggcaatggggggtgcccctcccccagccttgctgccgccttgcagtttgatctcagactgctgtgctagcaatcggcgagactccgtggacgtaggaccctctgagccaggtgtaggatataatctcctggtgtgccggtttttaaccctgtcagaaaagcacagtattcgggtgggagtgacctgattttctaggtgccgtctgtctcccctttctttgactaggaaagggaactccctgaccccttgcgcttccggagtgaggcaatgcctcgccctgcttcggcttgcccacggtgcgctgcacccactgacctgtgcccactgtctggcactccctagtgagatgaacccggtacctcaggtggaaatgcagaaatcacccatcttctgcgtcgctcacgctgggagcttagactggagctg

SEQ ID NO: 10626 - DNA, 4827 bp, Homo sapiens
ttcttttttctttttattatactttaagttctagggtacatgtgcacaacgtgcaggtttgttacatatttatacatgtgccatgttggtatgctgcaccaattaactcgtcatttacattagatatatctcctaatgctatccctcccccctcccccaaccccacaacaggccccggtatgtgatgttccccatcctgtgtccaagggttctcattgttcaattcccacctatgagtgagaacatgtggtgtttggttttccgtccttgcgatagtttgctgagaatgatggtttccagcttcatccatgtccctacaaaggacatgaactcatctttttatggctgcagagtattccatggtgtatatgtgccacattttcttaatccagtcagtcattgatggacatttgggttggttccaagtttttgctattgtgaatagtgccgcaatgaacatacgtgtgcatgtgtctttatagcagcatgatttatattcctttgggtatatacccagtaaagggatggctgggtcaaatggtatttctagttctagatccctgaggaatcgccacactgacttccataatggttgaactagtttacagtcccaccaacagtgtaaaagtgttcctatttctccacatcctctccagcacctgttgtttcctgactttttaatgattgccattctaactggtgtgagacggtatctcattgtggttttgatttgcatttctctgatggccagtgatgatgagcattttttcatgtgtctgttggctgcataaatgtcttcttttgagaagtgtctgttcatatccttcgcccacttgttgatgtggttgtttttttttttcttgtaaatttgtttgagttctttgtagattctggatattagccctttgtcagaagagtagattgcaaaaattttctcccattctgtaggttgcctgttcactctgatggtagttacttttgctgtgcagaagctctttagtttaattagatcccatttgtcaattttggcttttgttgccattgcttttggtgttttagacatgaagtccttgcccatgcctatgttctgaatggtattgcctaggttttcttctagggtttttatggttttaggtctgacatttaagtctttaatccatcttgaattaatttttgtataaggtgtaaggaagggatccagtttcagctttctacatatgggtagccagttttcccagcaccatttattaaatagggaatccttttcccatttcttgtttttgtcaggtttgtcaaagatcagatggttgtagatgtgtggtattatttctgagggctctattctgttccattggtctatatctctgttttggtaccagtaccatgctgttttggttactgtagccttgtagtatagtttgaagtcaggtagcgtgatgcctccagctttattctttaggcttaggattgacttgtcaatgcgggctcttttttgcttccgtatgaactttaaagtagttttttccaattctgtgaagaaagtcactggtagcttgatggtgatggcattgtatctatacattaccttgggcagtatggccattttcacaatattgattcttcctgtccatgagcatggaatgttcttccatttgtttgtatcctcttttatttcattgagcagtggtttgtagttctccttgaagagttccttcacatcccttgtaagttggattcctaggtattttattctctttgaagcaattgtgaatgggggttcactcatgatttggctctctgtttgtctgtcattggtttataagaatgcttgtcattttttcgcattgattttgtatcctgagattttgctgaagttgcttatcagcctaaggagattttggactgagacgacggggttttctagatatataatcatgtcatctgcaaagagggacaatttgacttcctgttttcctgattgaataccctgtatttctttctcttgcctaattgccctggccagaacttccaacactatgttgaataggagtggtgagagagggcatccctgtcttgtgccagttttcaaagggaatgcttccagttttcacccattcagtatgatactggctgtgggtttgtcatagatagctcctattattttgagatacatcccatcaatacctaatttattgagagtttttagtgtgaagggctgtagaattttgttgaaggccttttctgcatctattgagataatcatgtgtttttttcctttggttctgtttatatgctggattatgtttattgatttgtgtagtctgaaccagccttgcatcccagggatgaagcccacttgatcatggtggataagctttttgatgtgttgctggattaggtgtgccagtattttattgaggatttttgcatcaatgttcatcagtgatattggtttaaaattctgtttttttgttgtgtctctgccaggccttggtatcaggatgatgctggcctcataaaatgagttagggaggattccctctttttctattgattggaatagtttcagaaggaatggtaccagctcctccttgtacctctggtagaattcggctgtgaatccatctggtcctggactctttttggttggtaagctattaattattgcctcaatttcagagcctgttattggtctattcagaaattcaacttcttcgtggtttagtcttgagaaggtgcatgtgtccaagaatttatctctttcttctagattttctagtttatttgtgtagaggtgtttatagtattctctgatggtagtttgtgtttctgtggcatcggtggtgatatccccttgatcattttttattgcatctatttgattcttctctcttttattctttattagttttgctagcagtctatcagttttgttcatcttttcaaaaaaccggctcctggattcattgatttttttgaagggttttttgtgtctctatctccttcagttctgctctgatcttagttatttcttgccttctgctagcttttgaatgtgtttgctcttgcttctctagttcttttaattgtgatgttagggtgtcaattttagatctttcttgctttgccttgtgggcatttagtgctataaatttccctctatacactgctttaaatgtgtctcagagattctggtatgttgtgtctttgttctccttggtttccaagaacatctttatttctgccttcatttctgtatgtacccagtagtcattcaggagcaggttgttcagtttccatgtagttgagcagttttgagtgggtttcttaatcctgagttctaatttgattgcactgtggtctgagagacagtttgttataatttctgttcttttacattactgaggagtgctttacttccaactatgtggtcagttttggaataagtgtgatgttgtgctgagaagaatgtatattctgttgatttggggtggagacttctgtaactatctattaggtccacttggtgcagagctgagttcaattcctggatatccttgttaactttctgtctcgttgatctgtctaatgttgacagtggggtgttaaagtctcccattattattgtgtgggagtctacgtctctttgtaggtctgtaaggacttgctttatgaatctgggtgctcctgtattgggtgcatatatagttaggatagttagctcttcttgttgaattgatccctttaccattatgtaatggccttctttgtctcttttgatctttgttagtttaaagtctgttttatcagagactaggattgaaacccctgcctacttttgttttccatttgcttagtatatcttcttccatccctttattttgagcctatatgtgtctctgcatgtgagatgggtctcctgaatacagcacactgatgggtcttgactctttatccaatttgccagtctgtgtcttttaattggagcatctaggtcatttaaatttaagtttaatattgttatgtgtgaatttgatcctgtcattatgatgttagctggttattttgctcgttagttgatgcagtttcttcctagcctcaatggtctttacaatttggcatgtttttgcagtggctggtaccagtcattccttcccatgtttagtgcttccttcaggagctcttttaggacaggcctggtggtgacaaaatctctcagcatttgcttgtctgtaaaggattttatttctccttcacttatgaagcttagtttggctggatatgaaattctgggttgaaaattcttttctttaagaatgttgaatattggcccccactctcttctggcttgtagagtttctgccgagagatccgctgttagtctgatgggcttccctttgtgggtaacctgacctttctctctgtctgcccttagcattttttccctcatttcaactttggtgaatcttacaattatgtgtcttggagttgttcttcccgaggagtatctttgtggtgttctctgtatttcctgaatttgaattttggcctgcctttctgggttggggaagttctcctggataatatcctgcagagtgtttttcaacttggttcctctccccgtcactttcaggtacaccaatcagacgtacatttggtcttttcacctagtcccatatttcttggaggctttgattgtttttactcttttttctctaaacttctcttctcacttcatttcattcatttgatcttcaatcactgataccctctattctagttgatgaaatcagctactgaagcttgtgcatttgccgcatagttctc

SEQ ID NO: 10627 - DNA, 5018 bp, Homo sapiens
ttttttttattatactttaagttctagggtacatgtgcacaatgtgcagctttgttacatatgtacacacgtgccatgttggtgtgctgcacccattaacttgtcatttacattaggtatatcccctaatgctatccctccacactccctccaccccacagcaggccccagtgtgtgatgttcctcaccctgtgtccaagtgatctcattgttcaattcccacctatgagtgagaacatgcggtgtttgcttttctgtccttgtgatagtttgctcaaaatgatggttttcagcttcatccatgtccctgcaaaggacatgaactcatccttttctatggctgcatggtattccatggtatatatgtgccatgtttttttactccagtctatcgttgatggacatttgggttggttccaaatctttgctgttgtgaatagtgccaaaataaacatacgtgtgcatgtgtctttatagtagcgtgatttataatcctttgggtgtatacccagtaataggatggctgggttaaatggtatttctagttgtagatccttgtggaatcaccacgccgtcttccacatggttgaactagattacggtcccaccaacagtgtaaaagtgttcctatttctccacatcctctccagcacctgttgtttcctgactttttaatgattgtcattctaactggtgtgacatggtatctcactgtagttttgatttgcatttctctgatggccagtgatgatgaccattttttcatgtgtctgttggctgcatagatgtcttctttgagaagtgtctgttcatatccttcgcccactttttgatggggttgtttgatttttttcttgtaactttgtttaagttctttgtatatactggacattagccctttgtcagatgggtaaattgtaaacattttctccccttctgtaggttgcctgttcactctgatggtactttcttttgctgtgcagaagctctttagtttaattaaatcccatttgtctattttggcttttgttgccattgcttttggtgttttagtcatgaagtctttgcccatgcctatgtcctgaatggtattgcctaggttttcttctagggtttttatggttttaggtctaacatttaagactttaatccatttcaattaatttttttataaggtgtaaggaagggatccagtttcagctttctacatagggctagccagttttcccagcaccatttatcaaatagggaatcctttccccatttcttgtttttgtcaggtttgtcaaagatcagatggttgtagatgtgtggtattatttccgagggctctgttttgttccattggtctatatctctgttttggtaccagtaccatgctgttttgcttactgtagccttgtagtatagtttgaaatcgggtagtgtgatgcctccagctttgttcttttggcttaggattctcttggcaatgcgggctctttttggttccatatgaactttaaagtagttttttttccaattctgtgaagaaagtcattggtagcttgatggggatggcattgaatctataaattaccttgggcagtagggccattttcacgatattgattcttcctatccatgaacatggaatgctcttccatttgtttgtgtcctcttttacttcattgagcagaggtttgtagttctccttgaagaggtccttcacatcccttgtaagttggattcctaggtattttattctctttgaagcaattgtgaatgggagttcactcatgatttggctttctgtttgtctgttattggtgtataagaatgcttgtgatttttgtacattgattttgtatcctgagactttgctgaagttgcttatcagcttaaggagattttgggctgagacaatggggttttctagatatacaatcatgtcatctgcaaacagggacaatttgatttcctcttttcctaactgaataccctttatttccttctcttgcctaattgccctggccagaacttccaacactatgttgaataggagtggtgagagagggcatcccgtcttgtgccacttttcaaagggaatgcttccagtttttgcccattcagtatgatgttggctgtgggtttgtcataaatagctcttattattttgaaatacatcccatcaacacctagtttatttagagttttaagcatgaagggctgttgaatttgtccaaggccttttctgaatctattgagaaaatcatgtggtttttgtctttggttctgtttacatgatggattacgtttattgatttgcatgtgttgaaccagccttgcatcccagggatgaagccaacttgatcgtggtggatacactttttgatgggcagctggatttggtttgccagtatcttattgaggatttttgcactgatgttcatcagggatatttgtctaaaattctctttttttgctgttgtgtctctgcccggctttggtatcaggatgatgctggcctcatgaaatgagttagggaggattcactgtttttctattgattggaatagtttcagaaagaatggtaccagctcctgcttttacctctggtagaattcagctgtgaatctgtctggtcctggactttttttttttggttgggaggctattaattattgcctcaatttcagagcctgctattggtctatcaagagattcaacttcttcctggtttagtcttggagggtgtgtatgtccaggaatttatccatttcttctagattttctagtttatttggtagaggtgtttatactattctctgatggtagtttgtatttctgtgggatcggcggtgatatgccctatatcgttttttattgcatctatttgattcttctctcttttcttctttattcgtcttggtagtggtctatcaattttgttgatcttttccaaaaaccagctccttgattcattgattttttgaagggtttttttgtgtctctatctccttcagctctgctctgatcttagttatttcttgccttctgctagcttttgaatgtgtttgctcttgcttctctagttcttttaattgtgatgttaggatgtcaattttagatctttcctgctttttcttatgggcatttagtggtataaatttccctctacacacttctttaaatgtgtcccagagattctggtatgttgtgtctttcttctcattggtttcaaagaacatctttatttctgccttcattatgttatgtacccagtagtcattcaggagacagttattcagtttccatgtagttgagtggttttgagtgagtttcttaatcctgagttctagtttgattgcactgtggtctgagagacagtttgtcataatttctgttcttttacatttgctgaggagtgctttacttccaactatgtggtccattttggaataagtgcgatgtggtgctgagaagaatgtatattctgttgatttggggtggagagctctgatgtctattaggtcctcttcatgcagagctgagttcaattactggatatctttattaactttctgtctcattgatctgtctaacgttgacagtggggtgttaaagtctcccattagtattgtgtgggagtctaagtctctttgtaggtctctaaggacttgctttatgaatctgggtgctcctgtattgggtgcatatatatttaggatagttagctcttgttgttgaattgatccctttatcattatgtaatggccttctttgtctctttcggtctttgtttgtttaaagtctgttttatcagagatgaggattgcaacccccgctttttttgtttgttttccatttgcttggtagatcttcctccatccctttatcttgagactatgtgtgtctctgctcatgagatgggtctcttgaatacagcacactgatgggtcttgtctctttatccaatttgccagtctgtgtcttttaattggagcatttagcccatttacatttaaggttaatattgttatgtgtgaatttgatcctgtcattatgatgttagctggttattttgctagttagttgatgcagtttcttcctagcatagatggtctttacaatttggcatgcttttgcagtggctgatactggctgatcctttctatgtttagtgcttccttcaggagttcttgtaaggcaggcctggtggtgacaaaatctctcagcattcgcttgtctgtaaagtattttatttatccttcacttatgaagcttagtttggctggatatgaaattctgggttgaaaattcttttaagaatgttgaatattggcccccactctcttctggcttgtagagtttctgccaagagatctgctattagtctgatgggcttccctttgtgggtaacctgacctttctctctggctgcccttaacattttttccttcatttcaactttggtgaatctgacaattatgtgtcttggagttgcttttctcgaggagtatctttgtggcattctgtgtatttcctgaatttgaatgttggcctgccttgctaggttggggaagttctcctggataatatcctgaagagtgttttccaacttggttccattctccccatcactttcaggtacaccagtcagacagagatttggtcttttcacatggtcccatatttcttggaggctttgttcatttctttttactcttttttctctaaacttctcttctcacttcatttcattcatttgatcttcaatcactgttaccctttcttccacttgatcaaattggctactgaagcttgtgcatgcatcacgtagttctcgtgccatgctttccagctccatcaggttatttaaggtcttctctatgctgtttattctagttagccattcgtctaatcttttttcaaggtttttagcttctttgtgatgggttcgaacatcctcctttagcttggagaagtttgttactactgattgtctgaagccttcttctctcaacttgtcaaagtca

SEQ ID NO: 10628 - DNA, 7029 bp, Homo sapiens
tatgtatacatgtgccatgttggtgtgctgcacttgttaactcgtcatttacattgggtatatctcctaatgctatccctccaccttcagcccaccctacgacaggccccggtgtgtgatgttccccaccctgtgtccaagtgttctcattgttcaattcccacctataaatgagaatatgcagtgtttggttttctgtccttgcgatagtttgctcagaatgatggtttccagcttcatccatgtccctacaaaggacatgaactgatccttttttatggctgcatagtattccatggtgtatatgtgccacattttcttaattaggtctatcattgatggacatttgggttggttccaagtctttgctattgtgaatagtgctgcaataaacatacatgtgcatgtgtctttatagcagcatgatttataatcctttgggtatatgtccagtaatgggatggctgggtcaaatggtatttctagttctagatccttgaggaatcgccacactgtcttccacaatggttgaactagtttacagtcccaccaacagtgtaaaagtgctcctatttctccacagcctctacagcatctgttgtttcctgactttttaatgttcaccattctaactgctgtgagatggtatctcattgtggttttgatttgcatttctctgatggccagtgatgatgagcattttttcatgtgtctattggctgcataaatgtcttcttttgagaagtgtctgttcatatactttgcccactttttgatggggttgtttgattttttcttgtaaatttgtttaagttctttgtagattctggatattagccctttgtcagatgagtaggttgcaaaaattttctcccattctgtaggttgcctgttcactctgatggtagtttcttttgctatgcagaagttctttggtataattagatcccatctgtcaattttggcttttgttgccattgcttttggggttttggtcatgaagtccttgcccatgcctatgtcctgaatggtattgcctaggttttcttctacagtttttatggttttaggtctaacatttaagtctttaatccatcttgaattaatttttgtataaggtgtaaggaagggatccagttgcagctttctacatatggccagccagtttccccagcaccatttattaaataggcaatccttttcccatttcttgtttttgtcaggtttgtcaaagatcaggtggctgtagctgtgtggtgttatttctgaggtctctgttctgttccattggcctatatctctgttttggtaccagtaccatgctgttttgcttactatagccttgtagtatagtttgaagtctggtagcgtgatgcctccagctttgttctttggcttaggattgtggcaatgcaggctcttttttggttccatatgaactttaaagtagttttttccaattctttgaagaaagtcattggtaacttgataaggatggcattgaatctataaattacctttggcagtatggccattttcatgatattaattcttcctatccatgagcatggaatgttcttccatttgtttgtgtcctcttttatttcattgagcagtggtttgtagttctccttgaagaggtccttcacatcccttgtaagttggattcctaggtattttattttctttgaagcaattgtgaatgggagttcgctcatgatttggctctcttgtttgtctgttattgatgtataggaatgcttgttatttttgcacattgattttgtatcctgagactttgctgaagttgcttatcagcttaaggagattttgggctgagacgatggggttttctaaatatcatgtcatctgcaaatagggacaatttgacttcctcttttcctaattgaataccctttatttctttctcctgcctgattgccctggccagaacttctaacaccatgttgaataggagtggtgagggagggcatccctgtcttgtgccagttttgttttcaaagggaatgcttccagtttttgcccactcagtatgatattggctgtcagtttgtcataaatagctcttattattttgagatacgtcccatcaatacctagtttattgaaagtttttagcatgaagggctgttgaattttgtcaaaggccttttctgcatctgttgagataatcgtgtggtttttgtctttggttctgtttatatgatggattaaatttatggatttgcatatgttgaaccagccttgcaacccagggatgaagccaactggatcatggtggataagctttctgatgtgctgctggattcgatttgccagtattttattgaggatttttgcatcgatgttcatcagcgatattggtctaaaattctctttttttgttatgtctctgcccggctttggtatcaggatgatgttggcctcacaaaatgaattagggaggattccctctttttctattgattggaatagtttcagaagaaatggtgccagctcctctttgtacctctggtagaattcggctgtgaatccatctggtcctggactttttttggttggtaggctattaattattgcctcaatttcacaacctgttattggtctaatcagggattcaacttcatcctggtttagtcttaggaggttgtatgtgtccaggaatttatccatttcttctacattttctagtttatttgcgtagaggtgtttatagtattctctgatggtagtttgtatttctgtgggatcagtggtgatatcgcctttatcattttttattgcatctatttgattcttctctcttttcttctttattagtcttgctagcagtctatcaattttgttgatctctcaaaaaaccagctcctggattcattgattttttgaagggttttttgtgtctctatttccttcagttctgctctgatcttagttatttcttgccttctgctagcttttgaatgtgtttgctcttgcttctctagttcttttaattgtgatgtttgggtgtcagttttagatctttcctgctttctcttgtgggtatttagtgctataaatttccctctacacactgctttgaatgtgtcccagagattctggtatgttgtgtctttgttctcattggtttcaaagaacatctttatttctgccttcagaaataaatgactactgtacccagtagtcattcaggagcgggttgttcagtttccatgtagttgagcagttttgagtgagtttcttaatcctgagttctagtttgattgcactgtggtctgagagacagtttgttttaatttctgttctttaaaatttgctgaggagtgctttacttccaactatgtggtcagttttggaatacatgtgatgtggtgctgagaagaatgtgtagtctgtagatttgggatggagagttctgtagatgtctattaggtccacttggtgcagagctgagttcaattcctggatatccttgttaacgttctgtctcgttgatctgtctaatgttgacagtggggtgttaaagtctcccattattgttgtgtgggagtgtaagtctctttgtaggtctctaaggacttgctttatgaatctgggtgctcccgtattgggtgcgtatatatttaggatagttagctcttcttgttgaattgatccctttaccattatgtaatggccttctttgtgtcttttgatctttgttggtttaaagtctgttatatcagagactaggattgcaacccttgcttttttctgttttccatttgcttggtagatcttccaccatccctttattttgagcctatgtgtgtctctgcacatgagatgggtctcctgaatacagcacactgatgggtcttgactccttatcccatttgccagtctgtgtcttttaattggagcatttagcccatttacattaaggttaatattgttatgtgtgaatttgatcctgtcattatgatgttagctggttattttgctcattagttgatgcagtttcttcctagcatcaatggtctttacaatttggcatgtttttgcagtggcttttaccagttgttcctttccatgttcactgcttccttcaggagctcttgtaaggcaggcctggtggtgacaagatttctcagcatttgcttgtctgtaaagtattttatttctccttcacttatgaagcttagtttggctggatatgaaattctgggttgaaaattcttttctttaagaatgttgaatattggcccccactctcttctggcttgtagagtttctgccaagagatccgctgttagtcttatgggcttccctttgggggtaacctgacctttctctctggccgcccttaacattttttccttcatttcaactttggtgaatctgacaattatgtgtcttggagttgctcttcttgaggagtatctttgtggtgttctctgtattttgtgaatttgaatgttggcctcccttgctaggttgaggaagttctcctggataatatcctgaagagtattttccatcttggttccattctccccatcactttcaggtacagcaatcagacatagatttggtcttttcacatagtcccatatttctcagaggctttgtttgtttctttttactcttttttctctaaacttatcttctcacttcatttcatttatttgatcttcaatcactgatgccctttcttctacttgatgaaatcagcttctgaagcttgtgcatgcgtcaggtagttcttgtgccatggttttcagctccatcaggtcatttaaggacttctctacactgtttattctagttagccattcgtccaatcttttttcaaggtttttagcttctttgcaatgggttcaaatatcctcctttagctcagagaagtttgttattaccaatcttctgaagccttcttctctcaactcatcagagtcaatctccgtccagctttgttccgttcctggtgagcggctgcattcctttggaggggaagaggggctgtgatgtttagaattttcagcttttctgctctggtttctccccatctttgtggttttatatacctttggtctttgatgatggtgacgtacagatggggttttggtgtggatgtgctttctgtttgttagttttccttctaacagtcaggaccctcagctgcaggtctgttggaatttgctgctggtccactccagaccctgtttgcctgggtatcaccagtggaggctgcaggactgcaaatattgcagaacagcagatgttgctgtctgatccttcctctggaagcttcgtctcagaggggcactggactgtatgaggtgtcagtcagcccctactgggaggtgtctcctagttaggctactcgggggccagggacccacttgaggaggcagtctgtcagttctcagatctcagacttggtgctgggagaaccactactctcttcaaagctgttagacagggacgtttaagtctgcagaagtttcttctgccttttgttcagctatgtcctgcccccagaggtggagtctactgaggcaggcaggcctccttgagctgcggtgggctccacccagttggagcttcctggcctctttgtttacctactcaggcctcagcaatagcggacacccctcccccagcctcgctgctgccttgcaatttgatctcagactgctgtgctagcagtgattgaggctctgtgggcgagtgacccttacagccaggtgtgggatataatctcctgctgtgccatttgctaagaccgttggaaaagtgcagtattagggtgggagtgtcccgattttccagatacagtctgtcatgacttcccttaggtaggaaagggaattcctggacccttgggcttcccgggtgaggcagtgccccaccctgctttgtgggctgcactcactgtctgacaagccccagtgagatgaacctggtacctcagttggaaatgcagaaatcacctgtcttcggcgttggtcacgctaggagctgcagactggagctgttcctatttggctgtcttggaacctctctagatcatgtatttttatgcattctggcaatctgtgtcttttgattagagagtttactccatttacatttaaagtaattactgataaggaggaatttaaatctgtcattttgctgcatgttttttatatgccatgcatcttatttaccttttgtttcctacattattgtcttcttttgtgtttaatttttatagtgaaatatttaaattcctttgtcattttcttttgtgtacattctacagatattttctttaaggttgccatggggattacatttggtatttaaagttgtaacactctaggctgggcgcagtggttcacgcctgtaatcctagcactttcggaggccgaggtgggtggattgcaaggtcaggagattgagaccatcctggctaacatggtgaaaccccgtctctactaaaaataccaaaacaaaattagccgggcgtggtggtgggcacctgtagtcccagctactcaggatgctgaggcgagagaatggcgtgaacctgggaggcggagcttgcagtgagccgagatcatgccactgtactccagcttgggcaacagagcgagactccatctcaaaaaacaaacaaaaaaacaaaacaaaaagttataacactctaatttgaatttataccatcttaacttcagtaacacacaaaatctttgctcctttatagctctgccctcacctcttttgattgttattttcacaagattacattattatacattgtgagtccaaaaatgtaaatgaatactttctttaaatgtattcatttacattttgtatttaaatgaatttatgtatttaaatgaatttatgtatttaaatgaatatatgtatttaaatgaatatatgtatttaaatgaatatttctttaaatgtaaattttcatttgaactttggtgaatctgacaattatgtgtcttggagttgctcttctcaagg

SEQ ID NO: 10629 - DNA, 6060 bp, Homo sapiens
agatgtctttatttcatcctttttttttagggtttttttttattatacttgaagttttacggtacatatgcacattgtgcaggttagttacatatgtatacatgtgccatgctggtgcgctgcacccactaactcgtcatctagcattaggtatatctcccaatgctatccctcccccctccccccaccccaccacagtccccagagtgtgatattccccttcctgtgtccatgtgatctcattgttcaattcccacctatgagtgagaatatgcggtgtttggttttttgttcttgtgatagtttactgagaatgatgatttccaatttcatccatgtccctacaaaggacatgaactcatcattttttatggctgcagagtattccatggtgtatatgtgccacattttcttaatccagtctatcattgttggacatttgggttggttccaagtctttgctattgtgaataatgccgcaataaacatacgtgtgcatgtgtctttatagcagcatgatttacagtcctttgggtatatacccagtaatgggatggctgggtcaaatggtatttctagttctagatccctgaggaatcgccacactgacttccacaatggttgaactagtttacagtcccaccaacagtgtaaaagtgttcctatttctccacatcctctccagcacctgttgtttcctggctttttaatgattgccattctaactggtgtgagatggtgtctcattgtggttttgatttgcatttctctgatggccagtgatgatgagcattttttcatgtgttttttggctgcataaatgtcttcttttgagaagtgtctgttcatgtccttcgcccactttttgatgggtttgtttgtttttttcttgtaaatgtgtttgagttcattgtagattctggatattagccctttgtcagatgagtaggttgcgaaaattttctcccattttgtaggttgcctgttcactctgatggtagtttcttttgctgtgcagaagctctttagtttaattagatcccatttgtcgattttgtctttgattgtcattgcttttggtgttttggacatgaagtccttgcccatgcctatgtcctgaatggtaatgcctaggttttcttctagggtttttatggttttaggtctaacatttaagtctttaatccatcttgaattgatttttgtataaggtgtaaggaagggatccagtttcagctttctacatgtggctagccagttttcccagcaccatttattaaatagggaatcctttccccattgcttgtttttctcaggtttgtcaaagatcagatagttgtagatatgcggcattatttctgagggctctgttctgttccattgatctatatgtctgttttggtaccagtaccatgctgttttggttactgtagccttgtagtatagtttgaagtcaggtagtgtgatgcctccagctttgttcttttggcttaggattgacttggcaatgcgggctcttttttggttccatatgaactttaaagtagttttttccaattctgtgaagaaagtcattggtagcttgatggggatggcattgaatctgtaaattaccttgggcagtatggccattttcacgatattgattcttcctacccatgagcatggaatgttcttccatttgtttgtatcctcttttatttccttgagcagtggtttgtagttctccttgaagaggtccttcacatcccttgtaagttggattcctaggtattttattctctttgaagcaattatgaatgggagttcactcatgatttggctctctgtttgtctgttgttggtgtataagaatgcttgtgatttttgtacattgattttgtatcctgagactttgctgaagttgcttatcagcttaaggagattttgggctgagaaaatgcggttttctagatatacaatcatgtcgtctgcaaacagggacaatttgacttcctcttttcctaattgaataccctttatttccttctcctgcctaattgccctggccagaacttccaacactatgttgaataggagtggtgagagagggcatccctgtcttgtgccagttttcaaagggaatgcttccagtttttgcccatttagtatgatattggctgtgggtttgtcatagatagctcttattattttgaaatacatcccatcaatacctaatttattgagagtttttagcatgaagcgttgttgaattttgtcaaaggccttttctgcatctattgagataatcatgtggtttttgtctttggttctgtttatatgctggattacatttattgatttgcgtatattgaaccagccttgcatcccagggatgaagcccacttgatcatggtggataagctttttgatgtgctgctggattcgttttgccagtattttattgaggatttttgcatcagtgttcatcaaggatattggtctaaaattctcttttttggttgtgtctctgcccggctttggtatcagaatgatgctggcctcataaaatgagttagggaggattccctctttttctattgattggaatagtttcagaaggaatggtaccagttcctccttgtacctctggtagaattcggctgtgaatccatctggtcctggactctttttggttggtaaactattgattattgccacaatttcagctcctgttattggtctatgcagagattcaacttcttcctggtttagtcttgggagattgtatgtgtcgaggaatttatccatttcttctagattttctagtttatttgcgtagaggtgtttgtagtattctctgatggtagtttgtatttctgtgggatcggtggtgatatcccctttatcattttttattgtgtctatttgattcttctctctttttttctttattagtcttgctagcggtccatcaattttgttgatcctttcaaaaaaccagctcctggattcattaattttttgaagggttttttgtgtctctatttccttcagttctgctctgattttagttatttcttgccttctgctagcttttgaatgtgtttgctcttgcttttctagttcttttaattttgatgttagtgtgtcaattttggatctttcctgctttctcttgtgggcatttagtgctataaatttccctctacacactgctttgaatgcgtcccagagattctggtatgttgtgtctttgttctcgttggtttcaaagaacatctttatttcttccttcatttcgttatgtatccagtagtcattcaggaacaggttgttcagtttccatgtagttgagcagttttgagtgagattcttagttctgagttctagtttgattgcactgtggtctgagagatagtttgttataatctctgttcttttacatttgctgaggagagctttacttccaactatgtggtcaattttggaataggtgtggtgtggtgctgaaaaaaatgtatattctgttgatttagggtggagagttctgtagatgtctattaggtccgcttggtgcagagctgagttcaattcctgggtatccttgttgactttctgtctcgttgatctgtctaatgttgacagtggggtgttaaagtctcccattattaatgtgtgggagtctaagtctctttgtaggtcactcaggacttgctttatgaatctgggtgctcctgtattgggtgcatatatatttaggatagttagctcttcttgttgaattgatccctttaccgttatgtaatggccttctttgtctcttttgatctttgttggtttaaagtctgttttatcagagactaggattgcaacctctgcctttttttgttttccatttgcttggtagatcttcctccatccttttattttgagcctatgtgtgtctctgctcatgagatgggtttcctgaatacagcacactgatgggtcttgactctttatccaatttgccagtctgtgtcttttaattggagcatttagtccatttacatttaaagttaatatggttatgtgtgaatctgatcctgtcattatgatgttagctggttattttgctcgttagttgatgcagtttcttcctagtctcgatggtctttacattttggcatgattttgcagcagctggtaccggttgttcctttccatgtttagcgcttccttcaggagctcttttagggcaggcttggtggtgacaaaatctctcagcatttgcttgtctgtaaaggattttatttctccttcacttatgaagcttagtttggctggatatgaaattctgggttgaaaattcttttctttaagaatgttgaatattggccaccactctcttctggcttgtagggtttctgctgagagatccgctgttagtctgatgggcttccctttgagggtaacctgacctttctctctggctgcccttaacattttttccttcatttcaactttggtgaatctgacaattatgtgtcttggagttgctcctctcgaggagtatctttgtggcgttctctgtatttcctgaatctgaacgttggcctgccttgctagattggggaagttctcctggataatatcctgcagaatgttttccaacttggttccattctccccatcactttcaggtacaccaatcagacgtagatttggtcttttcacatagtcccatatttcttggaggctttgctcattttttttttattcttttttctctaaacttcccttctcgcttcatttcattcatttcatcttccattgctaataccctttcttccagttgatcacatcggctcctgaggcttctgcattcttcacgtagctctcgagccttggttttcagctccatcagctcctttaagcacttctctgtattggttattctagttatacattcttctaaatttttttcaaagttttcaacttctttgcctttggtttgaatggcctcccgtagctcagagtaatttgatcgtctaaagccttcttctctcagcttgtcaaagtcattctccatccagctttgttccgttgctggtgaggaactgcgttcctttggaggaggagaagcgctctgtgttttggagtttcccgtttttctgttctctttttcccccatctttgtggttttatctacttttggtctttgatgatggtgatgtacagatgggtttttggtgtggatgtcctttctgtttgttagttttccttctaacagacaggaccctcagctgcaggtctgttggaataccctgccgtgtgaggtgtcagtttgcccctgctggggggtgcctcccagttaggctgctcgggggtcaggggtcagggacccacttgaggaggcagtctgccggttctcagatctccagctgcgtgctgggagaaccactgctctcttcaaagctgtcagacagggacatttaagtctgcagaggttactgctgtctttttgtttgtctgtgccccgcccccagaggtggagcctacagaggcaggcaggcctccttgagctgtggtgggctccacccagtttgagcttcccagctgctttgtttacctaagcaagcctgggcaatggtgggcgcccctcccccagccttgctgctgccttgcagtttgatctcagactgctgtgctagcaatcagcgagactccgtgggcgtaggacctccgagccaggtgcgggatgtaatctcgtggtgcaccgtttttcttaagccggtccgaaaagcgcaatattcggttgggagtgacccgattttccaggtgagtctgtcacccctttctttgacttggaaagggaactccttgaccccttgcgcttcccaagtgaggcaatgcctcgccctgcttcggctggcgcatggtgcgcgcacccactgacctgcgcccaccgtctggcactccctagtgagatgaacccagcacctcagatggaaatgcagaaatcacccgtcttctgcgtggctcacgctgggagctgtagactggagctgttcgtattcggccatcttggctcctcct

SEQ ID NO: 10630 - DNA, 48563 bp, Homo sapiens
tcattttttttttattatcatactttaagttttagggtacatgtgcactttgtgcaggttagttacatatgtatacatgtgcaatgctggtgtgctgcacccactaacgcgtcatctagcattaggtatatctcccaatgctatccctcccccctccccccaccccaccacagtccccagagtgtgatattccccttcctgtgtccatgtgatctcactgttcaattcccacctatgagtgagaatatgcagtgtttggttttttgttcttgcgatagtttactgagaatgatggtttccaatttcatccatgtccctacaaaggacatgaactcatcattttttatggctgcatagtattccatggtgtatatgtgccacattttcttaatccagtctatcattgttggacatttgggttggttccaagtctttgctattgtgaataatgccgcaataaacatacgtgtgcatgtgtctttatagcagcatgatttatagtcatttgggtatatacccagtaatgagatggctgggtcaaatggtatttctagttctagatccctgaggaatcgccacactgacttccacaatggttgaactagtttacattcccaccaacagtgtaaaagtgttcctatttctccacatcttctccagcacctgttgtttcctgactttttaatgattgccattctaactggtgtgagatgatatctcatagtggttttgatttgcatttctctgatggccagtgatgatgagcattttttcatgtgttttttggctgcataaatgtcttcttttgagaagtgtctgttcatgtccttcgcccactttttgatggggttgtttgtttttttcttgtaaatttgtttgagttcattgtagattctggatattagccctttgtcagatgagtaggttgcgaaaattttctcccatgttgtaggttgcctgttcactctgatggtagtttcttttgctgtgcagcagctctttagtttaattagatcccatttgtcaattttgtcttttgttgccattgcttttggtgttttggacatgaagtccttgcccacgcttatgtcctgaatggtaatgcctaggttttcttctagggcttttatggttttaggtctaacgtttaaatctttaatccatcttgaattaatttttgtataaggtgtaaggaagagatccagtttcagctttctacatatggctagccagttttcccagcaccatttattaaatagggaagcctttccccattgcttgtttttctcaggtttgtcaaagatcagatagttgtagatatgcggcattatttctgagggctctgttctgttccattgatctatatctctgttttggtaccagtaccatgctgttttggttactgtagccttgtagtatagtttgaagtcaagtagtgtgatgcctccagctttgttcttttggcttaggattgacttggcgatgcgggctcttttttggttccatatgaactttaaagtagttttttccaattctgtgaagaaagtcattggtagcttgatggagatggcattgaatctatacattaccttgggcagtatggccattttcacgatattgattcttcctacccatgagcatggaatgttcttccatttgtttgtatcctcttttatttccttgagcagtggtttgtagttctccttgaagaggtccttcacatcccttgaaagttggattcctaggtattttattctctttgaagcaattgtgaatgggagttcactcatgatttggctctctgtttgtctgttgttggtgtataagaatgcttgtgatttttgtacattgattttgtatcctgagactttgctgaagttgcttatcagcttaaggagattttgggctgagacgatggggttttctagataaacaatcatgtcgtctgcaaacagggacaatttgacttcctcttttcctaattgaataccctttatttccttctcctgcctgattgccctggccagaacttccaacactatgttgaataggagcagtgagagagggcatccctgtcttgtgccagttttcaaagggaatgcttccagtttttgcccattcagtatgatattggctgtgggtttgtcatagatagctcttattattttgaaatacgtcccatcaatacctaatttattgagagtttttagcatgaagggttgttgaattctgtcaaaggctttttctgcatctattgagataatcatgtggtttttgtctttggctctgtttatatgctggattacatttattgatttgcgtatattgaaccagccttgcatcccagggatgaagcccacttgatcatggtggataagctttttgatgtgctgctggattcattttgccagtattttattgaggatttttgcatcaatgttcatcaaggatattggtctaaaattctcttttttggttgtgtctctgcccggatttggtatcagaatgatgctggcctcataaaatgagttagggaggattccgtctctttctattgattggaatactttcagaaggaatggtaccagttcctccttgtacctctggtagaattcggctgtgaatccatctggtcctggactctttttggttggtaaactattgattattgccacaatttcagatcctgttattggtctattcagagattcaacttcttcctggtttagtcttgggagagtgtatgtgtcgaggaatgtatccatttcttctagattttctagtttatttgcatagaggtgtttgtagtattctctgatggtagtttgtatttctgtgggatcggtggtgatatcccctttatcattttttattgtgtctatttgattcttctctctttttttctttattagtcttgctagcggtctatcaattttgttgatcctttcaaaaaaccagctcctggattcattgattttttgaagggttttttgtgtctctatttccttcagttctgctctgattttagttatttcttgccttctgctagcttttgaatgtgtttgctcttgcttttctagttcttttaattgtgatgttagggtgtcaattttggatctttcctgctttctcttgtaggcatttagtgctataaatttccctctacacactgctttgaatgcatcccagagattctggtatgtggtgtctttgttctcgttggtttcaaagaacatctttatttctgccttcatttcgttatgtacccagtagtcattcaggagcaggttgttcagtttccatgtagttgagcggctttgagtgagattcttaatcctgagttctagtttgattgcactgtggtctgagagatagtttgttataatttctgttcttttacatttgctgaggagagctttacttccaactatgtggtcaattttggaataggtgtggtgtggtgctgaaaaaaatgtatattctgttgatttagggtggagagttctgtagatgtctattaggtccgcttggtgcagagctgagttcaattcctgggtatccttgttgactttctgtctcgttgatctgtctaatgttgacagtggggtgttaaactctcccattattaatgtgtgggagtctaagtctctttgtaggtcactcaggacttgctttatgaatctgggtgctcctgtattgggtgcataaatatttaggatagttagctcctcttgttgaattgatccctttaccattatgtaatggccttctttgtctcttttgatctttgttggtttaaagtctgttttatcagagactaggattgcaacccctgccttttcttgttttccatttgcttggtagatcttcctccatccttttattttgagcctatgtgtgtctctgcacatgagatgggtttcctgaatacagcacactgatgggtcttgactctttatccaacttgccagtctgtgtcttttaattggagaatttagtccatttatatttaaagttaatattgttatgtgtgaatttgatcctgtcattatgatgttagctggtgattttgctcgttagttgatgcagtttcttcctagtctcgatggtctttacattttggcatgattttgcagcggctggtactggttgttcctttccatgtttagcgcttccttcaggagctcttgtagggcaggcctggtggtgacaaaatctctcagcatttgcttgtctataaagtattttatttctccttcacttatgaagcttagtttggctggatatgaaattctgggttgaaaattcttttctttaagaatgttgaatattggcccccactctcttctggcttgtagggtttctgccgagagatccgctgttagtctgatgggcttccctttgagggtaacccgacctttctctctggttgcccttaacattttttccttcatttcaactttggtgaatctgacaattatgtgtcttggagttgctcttctcgaggagtatctttgtggcattctctgtatttcctgaatctgaatgttggcctgccttgctagattggggaagttctcctggataatatcctgcagagtgttttccaacttggttccattctccccgtcactttcaggtacaccaatcagacgtagatttggtcttttcacatagtcccatatttcttggaggctttgctcatttctttttattcttttttctctaaacttcccttctcgcttcatttcattcatttcatcttccattgccgataccctttcttccagttgatcgcatcggctcctgaggcttctgcattcttcacgtagttctcgagccttggttttcagctccatcagctcctttaagcacttctctgtattggttattctagttatacattcttctaaatttttttcaaagttttcaacttgtttgcctttggtttgaatgtcctcccgtagctcagagtaatttgatcgtctgaagccttcttctctcagctcgtcaaaatcattctccatccagctttgttccgttgctggtgaggaactgcgtccctttggaggaggagaggcgctctgcgttttagagtttccagtttttctgctctgttttttccccatctttgtggttttatctacttttggtctttgatgatggtgatacacagatgggttttcggtgtggatgtcctttctggttgttagttttccttctaacagacaggaccctcagctgcaggtctgttggaataccctgccgtgtgaggtgtcagtgtgcccctgctggggggtgcctcccagttaggctgctcgggggtcaggggtcagggacccacttgaggaggcagtctgccagttctcagatctccagctgcgtgctgggagaaccactgctctattcaaagctgtcagacagggacacttaagtctgcagaggttactgctgtctttttgtttgtctgttccctgcccccagaggtggagcctacagaggcaggcaggcctccttgagctgtggtgggctccacccagttcgagcttcccggctgctttgtttacctaatcaagcctgggcaatggcgggcgcccctcccccagcctcgctgccgccttgcagtttgatctcagactgctgtgctagcaatcagcgagattctgtgggcgtaggaccctctgagccaggtgtgggatatagtctcgtggtgcgccgttttttaagccggtctgaaaagcgcaatattcgggtgggagtgacccgattttccaggtgcgtccgtcacccccttctttgactcggaaagagaactccctgaccccttgtgcttcccaggtgaggcaatgccttgccctgcttcggctcgcgcacggtgcgcgcacccactgacctgcgcccactgtctggcactccctagtgagatgaacccggtacctcagatggaaatgcagaaatcacccgtcttctgcatcgctcacactgggagctgtagactggagctgttcctattcggccatcttggctcctccagaatctactcatttttaagtgactatttcatttggagaaatggtcataaaagtcagttagcatttataattaaaactcagctttagttaaatttaattgtgtgtgcagcagagcatagaattcaatttcaaaatcctgaaccatattttatgacttgtcttcattagcagttattggaaatttgctatctctctacatgtattcctcatttaattcccacaactctaggaagtaggtactagtatgcccattttagaaatgagaaagctgagacatgaatagattaagaaacttaccctagaccagtgtttctcaaactttatgtgcaaaagaatcacccaagagtcttgataatttgcaaattctgacttggtaggtctggggtgaatcctgagattctgcatttttaatcagctcccaggtcaaggccaacactgttggcttgtggatcatacattgtgtaacaaggttctagattacatgtcctagggtcttaacactgcctgtctgacactgaaacccatgcacataacccctatgcagagtatgcattgacttttctctttactacattgtaatttacttcctacagatgaaacagttacattagttcttgatgcatatacatttgtgatgcaattttacccttgaggaatatccagggaagcaaagcattactgggaccatcatcctcatcctaaaggctctcttctacatctgcctcttctgggaccacagctcccaaaaggaaacatagaggtggcagtggcagctgacaatttaccttattctttggaatctcagggtttctcctgctcaatgagtgcagccattcaactttgacttctcctcctcgatcctcccgtgaatatgtagtatataaaatcatactatgcttcatgctttcttatgcatgtttatttaaatatatatattatatgcatgtgctttctttacttctcattttacttggtattcacagttcattttcttccagtaagtctttttatcctattctttgtttgtatccccaaactcttcctttgtggttacgctataattttaatatttaccaaaaaagaagattcaagttagacacttttcatattatattactttggttaaatcagcctggcctagaggatttccttttcaccattttctttctcatcaggtgaggtagtttgactgacttggtttgttcaagcaaaaggacaatgggaaataaatctaggtgttcagcataaaaacagctaatgacaaagctatttttagggacttcttgtctttcctatgttattctttatgtctgtttgatatctattttctggctcttatctttaaaagacagctgctttgcctcaggcataaatcagaagaggaaaaccagcttctggacctggagagaggatgaaagggaataggaattgagggaagcggaagggaagaataagggacccctggagagtccctaccaagccagacataacaaacaaaagtcctctactactgaggaagacagaacagggaagccagcaggggaagaaaaagatgctgctgctcttgatgcctcaaaaacagcaaggaagaacccaagcaactgatgtacacacccttggaacaaatctgccccagaagtacaagacacactcttcgaattcatggaataaatgggaggtgagtgttcaattccaagacacaagacagaattgggcaagagggaggaatgctactacttgtaagtcatagttacataaaaacagcaaccacattgtgtttttctgtaatgctctagatctgtggtccccaatatttttggcaccagggactggtttcctggaagacaatttttccactgactgatgattcaagcacattacatttattgggaactttatttctattattattacattgtaatatataatgaaataattatacaaaccataatgtagaattggtgggagacctgagcttgttttcctgtgactagagggtcccatctgggggtgatgggagacagtatcagatcatcaggcattagattctcataaggagtgtgaacctagacccctcgcatgcacagttcacaatagaattcgcactcctatgagaatctaatgctgctgctcatctgacagcgggtggagcttgggcagtaaagctctgtagccctgctgatcacttcctgctgtgcggcagggttcctagcaggccatagactggtaccagtctgtggcccagtggttgggacccctgctctagatttaagtgtttgtagatgaagcactttagctttcccggaaaatgtattgaagataaatttattcaaagttatcatacatttaaaaaaccccacaaaactcttaacccctgtaaccccagtaggtttgggaggccgagctgggaggattgcttgaggccaggagtttgagaccagcacaggtaatattgagaatctctgcttttacaaaacaactctcaaaattttatatgtacacacaaatttggacttcctgaattaaccagttaatagattttaaaatacacattaacccaagaggtaaataattcatcaaaattcagcaaaaataattacttgacaccagatagctagttttacattttccaattttttagccagttgctagaaatcacataaacacagtctgatttttataaatttggctgaaaaattgaaggactattatcaatttcagttaacgtttctttttaaaaattagcttaagtttgatattgaaaatataaagctttttaaaaattgaaatgctgcatgaaaggaataaaaatcatgttataatgttagtagagttctcaaccagctcactcatattttaacatactcttaccctaaggtattaaagagtggattatttaaatacaggtaaataaaagtgataggagttacagaaatggtgaaaagagggaatgctagcaattttgtggtggccaaataaaaacaatgtatttatcagtagataaaaatgtgcagattaattcttattttagatatctgtggcagctagaagtacaactttaggctcttcaagaatgacagttttgatttatattattctccacagctccatttaagtacactactatgctctctgcattccttttctcttacttgatggctaataggcattgccattccttgatatctctcaaagaaataaaactagaaggatttttaaggagcataaaaattcagctcccagctgtgtacacacacccatacacacacacactcacactcacgaagttagagagaagctcataaaaacaacaacaataaaaagccagggaatgtataaatgtagaacctgagtttctactgaatattcttaaacagaaactactaaactactgtaattgttgtgctaacagacagcactgatgtctgagtgagagtttaaatatatgaagattataagactatagataaatctgcatatatagcttttttttttttttgagacaagctctcactctgttgcccaggttggagtacagtgacacgatcatggtccactgcatcctcgacttcctgggctcaagcaatcctccctcctcagcctcccaagtagctgggactgtacgtgcatgccactacacccagctaattttctctagtttttgcagagatgaggtcttgctatattgcttaggctggtctcaaacctctgggctcaagagatccttctgccttagcctcccaaaatactgagattataggcgtgaaccaccatgcctggccacatatagcacttgtaaaaaaatgttatagtaatatatgcatgtggtacaaaattgaatggttatgcagtaatcagaaatccctctatcctaaccttcatccacccaatcctcctcctagaggcaaccacaattagcaatatcttgaatattttttcagagatacaacaagaaagattttaatctccctttagtccctcagttgaaacttaagaggtttagatttccgctgacttaaaaacaatgcaatggaattctggtctttggttcagatctgaaaacaacttccatttatcagtccagaaaactgagaacttactggttatatcactaatggttcaggattcctccttagaagagagttcttttctctagcaacaagataaatagctgatttcttggaagctgtcctttctttataggccctatttcattagttcattgcctggtaattacagctgcatggaaataaaaatgtaaaatgagtgtgatttccttttataggttgaataatatgggtagccctggattgtgaaaggaaacagattgctcctcggttttttttattatatccaaggtttcctatctgctttgggtgaattatcactagtcacctaaaaacacactgattaaaaaaaagggagaagtcacacatctccctcctgtgcaatgctgataaatttatacggctatttaaatagtcatatgaaatatcaattattaataacagcagtagatcttttgagttctaagagctttaaaactgatgatctctccaaaacatctataatttgcaactatttacagtacagcagaacgacctcatgaaaatatttatggctcttacagtgtcaaaattttgttttgttttggcatttacagcagttaactaaatgctagttctgtgttagttctcattgctataagtgtgggagtaaattgaaacaattgtgacaaacataccatgatggcaatgaacgatgaaaacattattttcattccctgcttacatcgaaatttttccaggtatcaaaccaagaggtggattactgggtgccatataggactctgcagctgaaagctccttttaattttggcagaacaaatagttatagtatacaatgatagaattgaaggtggaaatgtcacatctcagaaagtatgctaatagtattactagctatgaattattaccttcagtatgtgccagcaggaaatcacatagatctaaacatgttcaatacttgttttcctaggtcaaccatctaagatgttatttgtcattatttataaattatatttgaatttctgaatataaagcaatcaatttttctactatttaagctgaatttttattttcaaagctatgcacatacatagcttaaaaagtcaaatatttcacagggctaataatttaaaaacagcattcttctgttccttcccctgattattgctcctcagagaaaaccatttttaattccctcagctctttttcctggtgtctactgctataagtctaagaacactcatttaatgctattttttcaaatttttattatactgttggttaatttcttatttctaacccctgccctcctaccacctcaatcacagttaccttctccttctcttctcagtatagctacagctttatttggctaaaccaatgttcagttttcattatgaccaattagatatcattcatagctgatgcatgtagtatatcaggattgtaattatttcttctacactttgttttctgggtactttaaattgtatcttttaaaaaaatttttgctttgttttctgtgtgctcatggctaccagagtcatcctgtgttgcttcacaaagtgttgagttcctcttaatatagtctaacacttcaggaaatctcagtttccctgttgtcttgaagatacactttccaccctgctgctcctatctgggctgcttgtcttccccatctgcccctcagctgtcttcctgggatatcctgtcacatcatctgggatatttccttcaccttccttctgtctgagatccttattcctggatcccgagacttcctctttattgatttactctcttgtttctggtggggcatattttccagtagcttcctgagagactgcctgagaggtgaactttgagaccttgcccatctgaaaacgtcctgattctaccatcgcacgtaatttatagttagacagggtgtagaattctaggtttgcaatacttcattcttaaaatttgaagggattcttctactatgttgcaggtactagttttggtactgagacatctagtgccttcagattcatgcttgttggtatgtgacctgctttctcctttccacctctccagaagcttttagcatcttcttttctatttgtgatgttctgaagtttctcagtcatatgcatttataggactgtttttcttcccattgtgctggacaccttgtatcatggtgtcacctttcagtttggaaactcatgttttttagttctggaaaattttcttgaatcatttgttgaataccttcttcctcttctttattttttctgatttctttatgagactcccattatttggaagtcagatatcctggaaaaaaatgccataattctctttgacctttttgttgtcctgttctctctctctcacgtggcttgtgaacctaattgtaaacttgatcagtaaaaaccattgtggcagtgcaaaggcaaattcaaaattgttatctctggttatttttagtgttttttcagctatttcagttttgtcatttatcaatgtatcttatgtttttatattcctcaataaatatttgagtgccctacactgttttttcctgatgaattgaagctaggacaaactagagataatcagtaaattcattaaattgagttcaaattctgctccactcaaacttattccgtttattcattcaaacattaaaagaactacagtgtatgaagcagttagctgggtagtaggtacacaaaaataaatgaaaataaacaaaatgtctttttctttgtggaaattataaaatgtgaatgtatgtgtatggggatagatgggcaggggagtatcattgttactgcaatgggggtgagtacacatgttgttactgaagaaaaggaagctcatctaaccctggcttggggacaattcattcacactgtctgtggtctatagaatgggttggagggctcaggacagtcttggagacgaactaaaacaccaatgaataattcaggtgagatggtagtggtctgaattaggtctgtgacaagaaggagaaaagtgaattttgagacactaggagtttaattagataggacttgaatttcattgaattagaggaagtgaaagtgagttctaaggcagaagatagtgaatttaattttggaaaagtttaattttatgtgggatgtgcaagtggggatttgaatcagaagctcagaagggacagaagccctggaaatagattcttgggtgtcactcacatatggtactgtctggagccatgtgaattgagagcacaggaggaaagtgtgtcaactcaacaaggtcagagaaagtttgatgaagaaacctaagggaacatggagatttagaggctagaaagagaagaatatcccacatatgtcaagagaagagagggttaaagaaatgaatacttggcatgatcaaatgctaccatacattcatataaggctttatgatatgtgtgattttgcatatattttcttacttaatccctgtaatggctttatggttcatctatctcacttttccacttttttctaaaagtgtttagataagaaaacggaggcccaggaacacagcaatttgttcaagattacaaaagttggctgggtgtggtggcttagcctgtaatcctagcactttgggaggctgaggcaggcggatcatgaggtcaggagatcaagaccatcctggctaacatggtgaaaccctgtctctactacaaatacaaaaaacaattagctggacatgatggcacatacctgtagtcccagcaacttgggaggctgaggcaggagaattgctcgaacccgggaggcagaggttgcagtgagtcgagattgtactactgcactccagcctgggtgacagagcgggactctgtctaaaaaaaaaaagattacaaaagttgtgaaaagcaaactcgggtgttgaacagatttctggagtttctcaggtgcagagtggtgagtccagactgcaaagtggcgcagttaatgtgagccctcactgtgtgcaggcactgtgctgagtgctttgtgcacattatctcatttaattttcaaatcttatactataaacttgttaacattataatccccatttaaggaatgaggtagaggaagctcagaggttaagcaacctgcccaaagtcataaaaccagtaaatggtagaagcagaggaattcacgtccatttgctgtatgacacacgtattaacaattccatcattacgtatgaatttctttcatccaaagacttccctgattttttttttttttgcctactaatgcttctgggctgcataaagataaaaatctcaataaataatagttattttgaaaggcctacaatgtggtgaggtgctcaactaaataatttatttgtagtctattcactctttacaaacctgaatgggaaagtatttttacccccattttacagatgagaaaactgacccccagagattaaataacaatacacattgtacgcatgtttcaaaatatcacttgtacccttaaaaatttttttagaatcacatgggtcctataaatatgtacaaatattacatatcaaaatgtttttaattaaaaaaaataaggacagagtaggcattctagctcaaatccttttccttttcttcttctcttctttcttccttcctttcctcccttagccaaccctccttccccatctcctctatccttctctttcatttggcctactgcttcttaggtgacaataagagtgaatttagaatgaggcctttaggaatgggatataggtcaaggcactgggattcagaggagacaaggggtaagcactttgctagtgtaattgtaatgtttggaactcagttaaaatgttcaccagactctctggtgccctgatatacccacataggggcttgtgtgattgagaactaaggtttttagacatttagtttgaaatataattaactgtgtatatcaaagtttgtaatttgagactaataattgagaataaaattgatggataattaagtaaaataaaatatatcttagacataaagaataagataccttagtggtcattcataatttgtttcatttttatataaaaattatttgcttcccatacacaaaacctgagtgctcatctacttgatgatttatgacacagaactggagttacttatgtcaaagctctgctttgtttttttttcttcttttgagatggagttttgctcttgttgcccaggttggagtgcagtagtatgatctcggcttactgcaacctctgcctcctgagttcaagtcattctcctgcctcagcctcccaagtagctgggattacaggcgcttaccaccatgcctggctaattcttttatttttagtagagatggggtttcaccatgttggttaggctggtctcaaactcctgaccttagtgatccacctgccgcggcctcccgaagtgctgggattacaggtgtgagccactgcacccggcccgaagctctacttagaaggacagcagtgctctatgttcaagacagagcttttctctgtgcctcaaaaaccagttgaaaaagagcattgcaatattatgtgttaactgttctgtagaccaaaaatgttggttatattgatggcaaaacctgaaagaaatccacaacgcagaattaggtagatactgccccctctcccttggaactttatacattccgcatttttactaaaatgcttatgatgctgtttcacgatttgtttatatctctgctctgcaactttgaaatgcttgaaagcaaggtttaggtcatatgtttatctttgtaaccacagagtttagcacaaattatgtcctcaagtttacagatttaactaaccatagtcagggactcaaatattgtgtagccaggcatatgttctaaaccagaaattgtcccagtgttttcctcacttcacttaggatcacatatggtgtttttttttttttttttaatacagagtctcgctcttgtcacctagggtggagtgcagtggcacgataatggctcactgcagcctcaaccttctaggctcaagtgatcctcctacctcagcctcctgagtagctaggactacaggcatgcaccattactagataatttttatattttttgtagagacaggatcttgctatgttgcccagactagtctccagcttctgggctcaagtgatcctgctgcctcagcctctcaaagtgctggaattacaggtgtgagccaccacacctacccacttagcatcctgtacaaattttactgttaaagaattttatgttttaatagacttctaccaagcaaactacaattttaaaaataatctctggcttctgttcattgttgatacatacatatacaatactggttgaaaaattccaaccaagaatgaagaaatgtgatgttttggttagccttggtaatgctattgtggttaactagtattcttatttaaccatgtgaactactaaagtatcattcaacttcattttttaactgtatcatttattttaaagatttatccctattgatatagctaaacttaagcccattcttccttaaaaacatgcattagaatgtcaaacctctaatacaggtttagtggttacacctgggaagagaggagggcagagatgagggtagatatgtttctatttctgtaatgctttatttctttaagaaaaaatctgaagcaaatatggcaaaatataaacctgttaaatgtggctggtgggtacatatctatctaattcattttctgtatgtttgaaaatttcatactttaaaaagtgaaacagctgatttcaaatgcctcttttaaacaagcacccatgtaaaatggcattaatacatttacttatttttaaaaagttaaaaaaaattctaagattgaaaacatttgcccttaactttagaaaaactttaaaagcatcagagtaaatatagaattctaattatagacaatagaaaaagacagatcaagagagatttgaagctctcaaaaattgaaattttgatatttaaagttaagatttcattaaagcctatgcatcctaaattaccacctgtacttagacaactcaatgtttagtatagacatttgtaaattccagacactcacacccaacagtctgctttacagtttttctctgagccccatatgatccaaacgaaagtcatgggcccctgcactgtctttaatgtaatacacataaacctagttctcttattccagtgactggagtcatgcaagtcagaaacccagggaagtttcttaattgccacgccttacaatgttaatattacttcatcacatgggttttttttttacagcagtcttttaaagattatgtctattttatgaagattatttcagttaaactagcactatattcataaagctacttaacctggcatacataaacagaggcacagtcaatatgtgaaagtcaacactgtggaacgctcatcctttccttacattacctcagctaccctaaatgagtcatgacacctgtcatactgactaagtgaatccctaggataaatattaatgaagcttaagtttttaatatgtgtttgtacaagtttgaacactttgtccttgctgtccagtggaacatcttgtatactccatattggagactgcaactctatactgtggtcagaatatttttgaaactcaaaatgattatgtttctctttcctccctatccttcatatattaaccttccagagacttcctatttgctctaaatatgaagaccaaaatctttagcatggcgtttggtcaagtcttttcacaatttgtcctctatctccctcttcagcctcaccttaccaaaagctaacccttgctctttgatacaaagatatgaagaaatgcacctccctatggtttgatcgtagcacttatttcagttgtaattttacttgcatattttattgtttgtttagtatctacctcctataccacaagctatgtaagttattttaagaagtaaacaatcaaaatgagaaagaagataaagcaatttctcaaaagattgatattttcacaagacatcggccaatgaacctagataaaagatcatgtgtaaaaacaccaaagggtcaaacgatgggaaaatataaaaaataatatttattgtttataagaagaaaatagaggctttaaaaaatatcttatttccacttttttttaggctttttaaaattagaaaaaataataaaaaatggccataactttattttggagaaaggctcagacccaccactttgagctgatggtataaaattatagatgacagtgacaaaactattcaatgtttatttctttatcagtattgccatttagatatgctgattatgaaatattgcctagctgttctttatagttgttctttatagattctttatatatatatatacacacacaatatatatacatacatattggccatacatatatatatggccaagatgaattataactttaggaacagaaaaaattagcagatggattttataaaccaataatatatatatataagtatatacatatgtatttaaggaactgcaatttgctttttaaattaaaaaattaaactagtttcaaacctatagaaatgttgccggaatagaacaaaattatttttttattttcagacagggtcttgctctgtcacccaggctgaagtgagacggagtgatcatgggtcactgcaaccttgacctcctgagctcgagctatcctcctctctcatcctctcaagtaattggtgccattgtgcccagccaaatttttaatagtttatagagatggggtcttactttgttgctaaggttgttctcaaacttctggcctccagcaatattcctagcttagcttcccatagcgctgggattatagatgtgagccaccttgcccggcttgaacaaagcaatcgtttttgtttggatgattgcttaatattttactatgtgtatatatatttattgcttctctctctctcccccaatctgatgtccctctactccctaaatacttcagtatatacatgccctaaactgggacactctgctgtaatagtatcaatatacttggctgccaataagaaaatcaaagttgatagaacactaccattgaatccacaaactttgatcatattttgccaactgtcccaacaatgttttctcctctttttggtccagtatcctatacaggaaattgcattgcatttagtggtcatgcctctttagattccttcaatttggaacattttgttatttcactctctctcaagtccctgggttttaaagaatggattccttttattctatgggacaaccctaaacacaggtctgtctgatgtttcctcatgaccagacacaagtcatgcatttgtggcaggaatatcacagaagtgatgctgtgctcttcctagtgcctcatatccggaggcaccacacaatgttgatctgttccactgcttgatcttgggtgcctgtttatgttagtgtttactagatttccaaaggctcaatttttctttaagaccaattaacatttgaaggcaagacttctaagattttacactaatatcccgtttctcatcgagtttcccacaccagcaattgcattcattgacaatttccacctgagccaaccatcataatgagggttgccaaatggctgcttatttgcttctttctacaattattagttgatactctactataacagtacatttctcttctcacatttctttattatttatattagtgtggattcatggattccagttttagttactgagttttcatttgataatattattatttattgtgatgtggatattatcccagatttgaccagttttatccctgttaaactggcttctgtatccttttgacatatctccatcactcattgtatatgttttttagagataacaaaatgcaccaggtacattttttcattccatattccagccctggcattagccatttcttaaaggacccttgatttcttttaataaaggataatattcattaaaggaatgaaacaatgacctgggtcacctggagttagccatttcttaaagaacccttggtttatttatttatttattttttgagatggagtcttgctctgtcacccaggctagagtgcagtggcacgatctccattcactgcaacttctgcctcttgggttcaagtgattctcctgcctcagcctcccgagtagctggggttacaggcatgtgccaccacgcccaggtactttttgtatttttagtagagacagggtttcaccatgttggctaggctggtctcaaactcttgacctgaagtgatccacctgctttggcctcccaaagtgctgggattactggcgtgagccaccatgcccagccaacccttgatttcttttaatgaaggataccatttattaaaagaatgaaacaatgatctgggtgctcatgttcatcattaccgaggtgtcattgcattgggaattttcagtagaaagagctagaaaatgttgtatgtatatacgcatgtacatgtgtatgtatacgagcatatgattgtaactatttttatttatgtacatgtgtatgtgtgtgtgtgtgtgtgtgtgtgtgttttcatacctgacttgatgctgatacttttaattctaatcgtataccttggggttctttttatttattatgtgttttatttttagagacagagtcttactctgctgcccaggctggagtgcaatggtgcgatcatgactcactgcagtctcgaactcctgggctcaagcgatccttctgcctcagctccccagtagctgggactacagccatgtgccaccatgcgcagctaatgttttttattttatgtagatcgggtgtcactgtgttgcccaggctggtctcaaattcctggcctcaagtgatcttcccgcctcagcctcccaaaatgctgggattacaggcatgagccactgtgcccagccaagattcattttagtctgcttcctttacatggtgcaaattccttctcagatattaagaaatatagtttttaatatcttcacctctttcctttcttccctcttccttctttctttcctccttttttttcttttttgtttcctccatttcttcctttctttcttccttccttccaagacatagggtcttgctgtgttgcccagactggacttgaacttctgagttcacatcatctttcctccttagactccagaatagctggaattacaaacatgtgccactgcgcccaactgcagtagtcttctaattggtttccctgcttcttcacttgctcccatatggccaattccctatataaagctagagagattttctaaaacataaatcatatgtctcttctctgctaaaagtgtgccaatggcttcccactaaagttagaaaaaaaaatctttgaaactaaagattggactgtcttaaaagcaaacagactatataacaggcacatgtcttaatctgtttgctataacaaaataccacagactgagcaatttacaaacaacagaaatttatttccgacagttctggaggctaaaaagtccaagatcaaggtactggcactggtgcatgttaagacctgctccctgcttccaagatggcaccttgttgccatgtcgtcatgtggcagaaggtggaaaggcaaggctttcttcaacctagagccctttttaataatggttctaatgccatttagaagggcaggaccctcatgacttaatcacttcccaaagtccacatctcttaatactgttgcattgaggattaagcttcaacctgaactttgaaggggacatagcagcatagtagacttttaatgaatattcaccaattgaaagaataaattagaatttcaaaacaaattgaaaatgaagaaagtaaaggtatacactctcctatctctatcacacccacatccaaacagaagatgctcttagatctaatatcagcgttttcagaattggattactttgctattgtctctattcccaccatggatcatgctcccatcatatcttcagtattgcttgcattttcacgatagttccctaactgttatttcagtttctgcccttgcctcccttcactctattttcacagaggccagaataattcggttaaaaaatgccagatcacatcacttctctcttaaaacccttcagtggctttccgttttactctgggtaaaagccaaagtgctttaaatggccaacaggccctgtattcattatctgttgctatgtaacaaagtactcaaaacttagttgcgtcaaaacatacatttattatctcatggtttctgtgggtcaggcatctgggcccaggctctcttgtatggctgcaatcaatttatcagctggggctgaattgttgaaaggcctgactgagggaggttctgatttcaagctcacattgctgttgtcaggctccggtcccctgctgattgttggctggagacatcagttctttgtcatgtggcccaatccatacgactgtttacaacatggtagcttgcttcccccagagtaagggctgtgtgtgtgagggagagaaagacagatattccctaatgtcttttgagtctttatacttttctatggcatttattgtatccaatatctcatgtgttttactcattgtctgtttcctcatttctctatcctcattacaatataagctataatagagcaggacatcttgcttgtttcactgactattttatctacagtgatcagaacagtgttaaacacattcaaaacaaatactgaataaatgcaatcatttcagaaaagatttgaggaatctcaaaaacagacatccatctgctatgaaaccctgtaacatacagaattactgtaaaaggctgtagtgtattcatgaaacagaatccagagattactgtataggaagaaaaaaattagaacagtcctaccaaacatacaccaaaaagcaaacaaaaattcagcaatatacaaagaatattattagtatttaatatatatacacataaacacaaagactgtcatacagattttgtcatatgtggttatgtataaccaccaataatcaccaattttcaagttcagttcttggtcttggagtcaatgatagatctgtacccttcatgacagcacaagagacctgggtttttggggtagatgcagcattcctttcttctcttagaaatacattgcacctgaaagggaaaatggtcaaccccactgtattttttccagattatgagctcctccttagaagccagccaagcatgcccagatgatgggttaaggctactgagctttccatggtgctagtgcagtttgcagtcttgctgtatttcatagttgccccacagaatttatttccctgtcagccatggacagctgtatgaattgacatctcagagggtatctgccaagtctctggaaatgctaatgcccatgctgattaggttggacaatgtcaacttgttctgggcatcaatccattgagctacaagcttctcatgatgggaaaagagggcttcctgaagagaagtagacagcatgctcaaactgctaagaagggtgatgacaaagctcctgctaaggccctggttcttttaggaattatcctcatattgtcagctcaggctatggtttgggctgtgagatctcatcttccttcatcttctgtggacccactggcttgccaagacctctttaggaacgaagcagtctgaggaagtgcagtctgagggtctgtcatttctatagaagcagctggagatattgggaaaatgggccaggattgtggcttctccagactgcaacagagcaggacaggaatttttctctgctccaaatctcagcccctcaccatgtccctgcctaaacaacaaacacatacattctttttttcacttccgcttttgcttctgcatcagttgtttttcttttacaaactgtcaagatcctattgatcagcatccaattcatttaattatgcaatccagttatcttgtatcacctaggaaaagtacatataagactgtcttaaaataaaagactagtgacaataaagattttttgcccaacagaggccattgaaggatacacttcctctttaaatcatgtgaaattcatcctggaatgcttttctcatagaatatactcatttctttcatatctgaaccatagctgaagtagtagattcccatgcttttcctcctgtctcatttttcttttttgtagctcctggccacagtgggagccatgatctctctcctttacatgtggctgtattcccagagctttcatttccatgtggcacatttttatgctcattttgggtaccccagtgctcagcatattgttaggcaaagatacgtgaaaagtaaggtaactttgtttctctggtgctattccactgggggaaaagaggtggggagagatttgctggttagagttctaaaagtaatggcaaaaaccacaattaactttgcaccaacctaatatatctgtaggcttataggttttagcattaagcagttaattgagtccgtttttaaaaatataatatcttttgtttacctaggagctggtgtagtgaaggatgaagagaaggcaatgcattggtttaggtaagatgatgacatctgcccaaaagcaaagcttcagagttacctgttcagaaagtacaggttgagcatcccttatccgagatgcttgagaccagaagtgttttggatcttggattttttttaatttttttattttgaaatatttgtattatactaactggttgagcatccctaacctgaaaattcagaatctgaaatgctccagtgagatttttctttgagggtcatgttggtgctccaaaactttcagattttggagcattcagattcagattttctgattagggatgctcaacctatgctgaaatagaaaaccttataattttggtgctctttccctagagcaaaaataagctagagatcttaatattaaagtcttggtaccctttttactttttccacttggtgatgaggtaggagtactggtggagctatggagagggcggggccaatgcattttaaaacagtctacacaatgtaagcaaagagcagattagattcaaaagagccaaactggggaacgtggaccaatctaggtcaagattcagaatatcaataagtttattaacaatgttctgtgttaacgttactttggttattaaggttttgagctcttgactataaaacatacactaatttgaaatttacaaactgggctacatgttagaatcacctggggagcttctgaaaaatgctgatgcccagctccagattgatttaaatgagcagaaaatgattcctaggtgagtgtaatatgctgccagctcaaactactccagaagtctataatggttaataaagtaaacatgaaccagcagaagaaggcatttcaggaacatattctaaagcttaaaatcgatattctgataaagttcacctgacaacagaagaaacacctttgagaatcaggaagggagtgacatggttccaaagtggcaaagtgtcgttggtgattaactgcacttggctgaagtgcttgccactgggagtatagtccgtacacccagagcattggcatcgccaggtgggcacttggtaggaatgcagtctctgaggctctaacacagacccactgaagtagaatcttcattttaataagttcctggggtgactgatatgcactctccgatattgtagccaacagccacaatgtggccatataaatgtaaatgaattaaaactaaataaaatcagaattttagttcatagttgcactgtctacatttcaagtattcaatagccagtactggctactgtactggacagtgcaaatatagatcgattctatctttggtaaaaattctactggaaagtactagcaatttacatttatgtttcagcaattggaaatagtgcttaagggtcagtttacgtgttattgaatttctaacattcccagatagtcctttccagcattttgattgcctgtatagtttggagaaaagagtataattatattaatatttggaaaagctgatgaattgattgaaacaaatacgcaactaatttttttaaaagtactgtacttgtttcaagtaagaaaaacattttttttttttttgagacagagtctccctctgtcacccaggctggaatgcagtggcgtgatctcagctcactacaacctcctcctcctgggttcaagcaagcctcagcctcccaagtagctgggattataggcatgtgccaccatgctcggctaattttttttttattttcagtagagactgggggttagtcagggttctctagagggacagaactaataggatagatatttatatataaaggggagttattaagtagtattaactaacatgatctcaagtcccacagtaggccatctgcaagctgagaagcaaggaagcctgtctgagtccccaagctgaagaacttggagtccaatgcttaagggcaggaagcatccagcatgggagaaagatgtagcctgggaggctaagccaatctagccttttcacatttttctgcctgcttttatcctagctgcgacagcagctgattagattgtgcccacccagattaagggtgggtctgcctttcccagcccactaactcaaatgttaatctcctttggcaacaccctcacagacacacccaggatcaatcctttgcatccctcaatccaatcaagttgacactcagtattaaccatcacaagtccaccccttgtcaactttaaccgatacacatctcctgagatcatacataatcttcaaataaaagcaataataagctcataattatgcctaacataatgcaactatccttcatacagccagaaatgcaccactccccaacccaaatactcttacataaagttaatgatgctcgaatgctgatatgaagtaaataaatcttatgtcacatgataaacgaaaaaggaaataaaatgaagttattttcttagtacaagtgtatatatgcacacacatgtttttaacaaaagaaggaggaaatactcatgacaattacagtctccatttctgcaactggtcacggggccattgatgattaccttcttctactacccattcgtatttcctttaccttcatcaagcaccttagcagatcatggtttttttcctaccttcttctgctactcattcgtatttcctttgccttcatcaagcaccttagcaggtcatggtttttttcttggtggagtgacccaaaccttcattcctgaatggtctgggccaactgcctggattgggctattgtagtttcccattgaccttaatcacaaagcatgataatactaagagacatcctaagggatctcctgtattccatacatactcttccttacctctgttgtggagtagtagactgacttcatcttgatagcccgggtcaatcaccctagccaacactgtaactcacttcttagcctgttgacttaaaggtaggaggagcctaaagtgtccagttggcaatcttaacttctagtttaatggaatcactgtgtctcctggtggcaacatttctcccactggaactaagacctctaggccagcagaatgtaatgtcatggaaacaggaagcaaaaattttgttagtggatcactaggggtgatggtgagtggtgccacttccatttccaacccttgattcctggacccatgaatcctggctatgggagaaacagtaccatatattgaatgctgattcagagcatacatggccttttggagaactttgccccagccctggcaaagtattgtcacctagttggcattgtaattgtgacttcaaaagggcattccaccattctatcaatacagctgcttcaggataatggggaacatggtaagaccaatgaattccatgagcacaagtccactgctgcacttctttagccataaagtgagtgccttggtcagaggcaataccatgactgtggataaggcattccgtgagcccatggatggtagtcttggcagaatcattgcatgcaggataggcaaacccatatctggagtaagtgtctattccagtgaggacaaacctctgccctttccgtgatggaagaggtccaatataatcaagttgctaccaggtagctggctgatcaccccgaggaattttgccatatcgagagcttagtgttggtctctgttgctggcaaattgggcactcggcagtggccgtagccagggcagccttggtgagtggaggtccatattgctgagcccatgtgtaacctccacacctgccaccatggccatgttgttcatgggcccattgggcaatgacaggagtggctggggaaagaggctgagtggtaaccacagaatgggtcatcttatccacttgattattaaacttctcctctgctgagatacttgtaggtgagcactcacatgggatacaaatacagtttttgatcacctagagaggtctatccacatacatctttctcaaatttctttgtcaccaattttccaatcatacttcttccaagtctctgaccatctagccaaaccattggctacagcccatgattcagtatataattgcatatctggccatttctccttccatgcaaagtgtacaactaggtgaactgcttgaagttctcctcactgggaagatttcccttcactgctgtccttcagggatgtcctagaaaggggctgtagtgctgcagctgtccactttcaggtggtgcttgtgtatcgtgcaaaaccatctgtcttctcttaaaaaaaccctagtcttctcttcctctgtcaactgatcatagggaactgcccataaggccattggtgtatgctgtgggagagaagatagggtggcaggagtggagaccatgagcatttgaaccacttcctcatgtaacttacttgtgccttcaggacccactcgagcccaatcacgtatataccacttccatttaataatgtaatgctgctgtgcatgacttactttatagctaaatgggtcataaagcactcagttcatgataggcagttcaggtcacatgatgacttgatgacccatcattaaacattcagttcccaccaaaacccagtaacaggccaagagctgtcactcaaaaggagagtagttatctacagaagttggcagggccttgctccaaaatcctggagacctccactgtgattcatctatgggggcctggcaaaggctccaaacagcacccctatctgccactgacccctcaaacaccattgaatctgctgggtcatatggtccaagtggcagagcagcttgcacagcagcctggacctgttgtggagccttctcctgttctggaccccactcaaaactggcagccttttgggtcactggataaatgggccagagtaacacacccaaatgaggaatgtgttgcctccaaaatcctaataggcccactaggcattgtgcctcttttttggttgtaggaggggccaaatgcagcaacttatccttcacctcagaaggaatatcttgacaggccccacaccactggatccctagaaatttgactgaggtagaagctgcctgaatttttgttagatgtatttcccatcctctggcatgcaaatgtctcaccaataagtccagtgtgtttgctacttcttgcccactggatccaatcagcataatgtcatcaatgtaatggacaagtttgatatcttgtggaagcgaaaggcgatcaagtgctctccgaataagattatgacacaaaggcagagagttgatatacccctgaggtaggacagaaaaaggtatattgctggccttaccagctgaaggcaaattgcttctggggggctttatggacaggaatggagaaaaaggcatctgcgaagtcagtggctgcataccaggtaccagatgtgctaatttgctcaagcaatgaaaccacatctggtacagttgctgcagttggagtcaccacttggtaaagcttacagtaatccacggtcattcttcaagatccatctgtcttctgcactggccaaataggagagttgaattaggttgttgtgtggatcaccacccctgtgtccttcaagactttgatggtggcgctaatctctgcaatccctgcagggatgcgatattgtttttgatttactatttttctaggtagaggcagttctaatggcttccatttggcctttcccaccataatagccctcaccctaccagtcagggagccaatgtgggggttctgccagctactaagtatgtctatgccaattatgcattctggcactggagaaataaccacaggatgagtccagggacccaatggacccactgtatgttggacctgagctaaaactccattaattacctgacctccctaagcctctactttaactggagaaccacaatgacattttgggtccactggaatcaacttcagctcagagccagtgtccagtagttccccaaatgtctgatcatttctctttccccagtgcacagttaccctggcaaaaggccagaggtcgacttggggaaggatgggagaaaaattaacagcataagttgtcagtagtgtagtggggtccttccttaaggggacatgtcctccccttcattcaaggggctctgggcctgcaaactggctcaagtctggaaattgattgagggatcatgattctctgtttttataattcaaattagtcttttgtccattccatctggaagttttctgcttgtctaaattgagtaggaatgcagtacacttcccatcaatttcacttctaggaacactgtgattaattagccattgccagagctctacacaagtcagaatattctaatttctgctttgcctctgctgtccattatagtagctatgcccaccttgcctttgatggttaagtgccatcacttggcctctgccaccttgggatccaattattctcattctatttaaattttgtagttgagtgactgccattcccactgttagatctgccacacggagaagagcaattacaggactcttcaaaggtgcagatgctgccctcacaaatctattttgcaatgcattggtcaagggtatatcttctggaccctcccaattgaaatatataggtctaaagtgactccagcatcctaatctccctaagcctttggatcccttcctctacattaaaccaagggagatcaggcatttccagctcgctcacagtgggccatcgtttaatcatatttcagctaactaagcaaataaactattgaatcttttttaactccccaagctgcaacattaaatgcagaatccctgcttagtggacccaaatcaataaattcagcctgatacaactctatttttttccaacattacaccacacgcttactatccattcccatgcctgttctccagatttctgtttacataaattacaaaactcaagcagttctttttgaatgttgcacaccgcctcctggatcacactctgaacctcacatctagaggcctgccaggactttagttataggtctagaggcaaacaggggtattgggggtggctcctgaggagaatcaacattatcttgcctggcaactgcctcaggggaagccatcactgttgcctcaggcagcatagggtttacctcctcagacaaaggtggaaagactgatggcagcatgggttggggaggggatgttgccactactggggatttggcaattgtttcttctggcaaaaaagtttcatcagaatttacaaacacagtgtccccagtttcatcagggtcctcccacacatcctcattccaagttgcagggtcccattcttttccaatcaatgccctcattttaatagtagacacctggaaaggccgtgcatgcacctttcattgcaggtcagccactcatgagaagagcttgtgtctgtttttttgcaatttcagctctttctctacaggagataagactcaggacaatcttggcagacttgaggctcagtatctgcttctgaagccaggagttagaatctctaacttcataattttctttcatcactttgtccactgaacttaggagcaaccaaccaacttcattatgttccttggtccttcacatatggtcaaaggtattatgtatagagtcactagactccttgcctctcatgagcagtgaatcaggagtgtcaaatgcatgtattttgcataactctctaaacagttcatgccaaggactatcagtgttctccatagttttagaagtagagtccttagcattttggggtctaatcatattaagcagtgaactccataaaccccaaaaccatccttaatattctgttcctctggaaccactcctggtaccaaaatctgtattagtcagggttttctagagggaagaactaataggagatatatgtgtgtgtgtgtgtgtgtgtgtgtgtgtgtgtatgggagttattaagcagtattaactcacccaatcacaaggtcccacaataggccatctgcaagctgagcagcaaggaagacagtctgaatcccaaagctgaagaacttggagttcgatgtttgagggcaggaagcatccagaatgaaaaaagagtagattgggaagctaagtcagctagccttttcatgcacttctgcctgcttttatcctagctgctctggcagctgatcagattgtgcccacccagattaagggtgggtctgcctttcccagcccactgatttaaatgttaatctcctttggcaacaccctcacagacacacccaggatcaatactttgcatccctccgtccaatcaagttgacagtattaaccatcacacagggtttcaccatttggccaggctagtctcgaactcctgacctcaaatgatacacccacctagacctttcaaagtgctgggattatgggcatgagccaccatatctggccaagaaaaacatttttaatgaaggaggcttattattttttggctagatatatggtaagatagaagtaatggtttctagtaatagtctttattggtgctgtccttggttttatgaaggggatgcttttttataaggttgtttctttgttttctatagcatgcttccccccatcaccagttccctttcttcttcctccttttcagacaagcctcccagcaggaccatcctggtgctgcctttaaccttgcagtaggaacactgaaaaacatgactgcctccatggaagcagggtaataaaatttgctgtcttttcccttctagctgacatgtcattctttccaaagatgcccctcatatactacctgcaattcacaggcaaaaacattttttatatagctcactttctgctcttgcctttctatgttcttacattgctgagttacaataaaagtcacaaagcaagggaatgcaatattcatatatgtgcatatatcccactgactaaattcttcaggcattctgtgagcctgagatgaaatgctgggttatttcatggtcctcacactctcctgtgaattcttatggcccccttaaatatcatctttacagccttaccacattttcttataaacagaatagagcagacacgaatataaggtagagaactctctttgggcacaaatatctttagtgtctgttggactaatcctcttgattactcacagttataaaaataaatataccactactttctctggagaagattttcttaatgcttttgaatagttcatagtctatgacatttttattcagctattttgagtcagacacattttttgatagggtcccgaaaacaaaccattaaactttcagcttgttttctctttttttaaagtaatgcaactgacatctacttcatttccaattaatgtgtacaacaacctcctgcaactccagcatttaatcttctacctcaggctaagaggtagaccaggtttagaaaaaaagttcagtaaggggctgaggatggggtgaatctttggaatttgtacaatagtcagggatgttgcctgcacaattggtaataaaattttgaaatgaccattttgaggcagccaagtcaaaatggcgaagccaatatgttctactttacaactgacggttaccagatgggaggttgtatagaatccctctccagttagcactcccaaaccaaaatatagaatttgcttgcaagagaggggtgcctccaacattacatgagattcttggctagaaaaacttctctaaatagggcaaaataatctagctaggctctggtcttttaagaatatttatttgggtagctctgattgtattatgaagattcttgtattagtccattctcatgatgctatgaagaaatacacgagactgggtaattaataaagaaaagaggtttaattgactcagttctgcatggctgggaaggcttcaggaagcttacaatcatggcagaaggggaagcaaacacgtccttcttcacaaggtggtaggagagagaagaatgagagctgagtaaagggggaagcctcttataaaaccatcagatcttgtgagaacttactatcacaagaatagcatgggggaaaccacccccatgattcaattacctcccactgggtccctctcataacacatgaggattatgggaactaccagtaaagagggagactcaaccataccatatcattctgccccatcccctcccaaatctcatcctcacatttcaaaatacaatcatgcccttccaacagtcccccaaagtcttaactcattccagtattaactcaaaagtccaagtccaaagtctcatctgagacaaggcaagttatttctgcctatgagcctgtaaaatcaaaagcaagttagttacttcctagataacaataggggtacagacattgggtaaatacacccattccaaaatagaaaaattgaccaaaacaaaggggctaccagccttatgcaaatctgaaatctgatagggccctcattaaaccttaaagttccaaaatgatctccattgattgcatgtctcatatccaggtcatacttacgccagaggtgggctcccacagccttgggcatctccgcccctgtggctttgcagggtacagccacccctcctggcttgtttcatgggctggcattgaatgtggcttttccaggtacaaagtgcaagcggccagtggatctaccattctggggtctggaaaatggtggccgtcttctcatagttccactactcagtgccccagtgaggactctgtgtgggggctctgaccccacatttcccttccacactgccgcagcagaggttatccatgggagccctgccatgtagcaaacttttgcctggacgtccaggcatttccgtatatcttctgaaatctaggtggaggtttccaaaactcagttcttgacttctgtgcacccacaggctcaacaccacatggaagctgccaaggtttggggcttgcaccctctgaagccatagcctgacatgtaccttggctccttttagccatggctggagcggcaagcacacagggcaccaaatccctaggctgcacacagcagggggtccctgggaccagcccaggaaaccacttttttctcatagggctctgggtgtgtgatgggaggggcttacatgaaggtctctgacatgtcctggatacagtttccccattgtcttggtaattaacattgggctccttgttacttatgcaaatttatgcagtgggcttaaatttctcctcagaaaatggggttttcttttctatcactttgtttggctgcaaattttccaaacttttatgtactgttttctctttaacattttgctacttagaaatttcttctgctagataccctaaatcatctctctcaagttcaaagttccacagatctctaggtcaggggcaaaatgcctccagtctctttgcacggcaacagtgacctttactccaattgccaacaagttcctcatctccatatgagaccacctcagcctagacttcattgtccatatcaatattagcagtttggttgaagcctttcaacaagtctctaggaagtttcaaactttcccacattttcctgtcttcttctgagcccttcaaactgtttcagcctctgcctgttacccagttccaaagttgcttccacattttcaggtatctttacagcagtgccccactcctggtaccaatttactatattagtttgttaatatgccactctgaagaaataactgagactgggtaatttataaaggaaagaggtttaatcgactcacagttctgcatggctgggaaggcctcaggaaacttacaatcatggcaaaaggggaagcaaacacatcctcttcacaaggcagcaggagagagaagaattagagatgagcaaaggtagaagccccttataaaacaatcagctatcacgagaacttactcacgatcatgaaaatagcatgggggaaactgccctcatgattcaaatacctcccattgggtccctctcatgacacatggggattatgggaactacaattcaagatgagattttggtggggacacagccaaactatatcagtactcatgatgaaacccaggtgaaatggcaagtgtttccctcatcaccttacaatgagtttaaacagctggtactctggcccttaactcaaactcttgaatgtgcaggtgcttttggtttactctttcttagcactactaaataactgtttcttctagggatgtagaaatgctccttaatgttgctgcaaaatgggggatccaagaagcccaagaacttctggagaatgttatttggactaaaagcaagctcttgccaactgaaagaaccaggagttcttataaaccataatgtgtgcctgcatgctcttcctggaacatgggatgttctgctctcacttgtccactgtggccttgcaatgctttgtggcattttcaatggaagctccttttacttatagtctcatatgctgctgcagcattaatttgctggttaaaatcctttaaatgaagtgttacttatatgttttcctgggatctgagtttgatctcttctggatagaggaatattttatttgggtttcattactgctcacttcagctaaagtttcattcaagccagtgagcattctataacgtggtaagtggaaaataacgaagaaacctgtcataccagagattggcttcttggatgtgttagctggcactcacagatccactgaaagagctagactcatcattagcctaatctatgacatgtgatgttctgcctaaaataagcctgttttcatttctctccatttcaattttctgctctattaggtttctatagtattttattacactcactttttgtattatagaaagtcctttataggggtaaaaaggctgttattgttgtcaattaaagggaaaaggataaagtataagacctaacaattattgaccatctgccacatgcaagatattttcttagctgtttaacatatatatatatatttgagactgagtttcgctcttgttgctcaggctggagtacaatggcatgatctctactcactgcaacctcagcctctcaggttcaggatgttatcctgcctcagcctcctgagtagctgggattacatgcgtgcaccatcacatccggctagttttttcatttttagtagagacggggtttcaccatgttggtcaggctggtcttgaacttctgacctcaggtgatctacctgccctgccctcccaaaatgctgggattacaggagtgagccaccacgtctggcctgcttaacaaatattttaacattcactagttataaaagtcttataaggtggatcttataactcctattttacagagtgaaaacaggtgtagagaagttgtgatatgtgcaaagtcacagagtgagtgatagagtggggtttttagtgctggcagtctgattctagagtcaacattcttaaccagttctaccaacattactctcccaagtcattaacatctctttcctaacaacaaagatgttctaagaacagataactgggtttattactggcatatggtgaacacttatcttagcaaataactcagccccattttctgactatgatttttttaaggacaaaccacgtagtcctattcttcaaaagtgatgtttttaaccttaattataattagctgtatttatctcatttagattatagcgcaattttctccttggaatatacatacagaaacacaaattgagggtgacaaaagtgtcaaactggaattcaatatgatgattaagctgtgtttaaaatatttgtttcccttttgattgccttgtttacactgtatacatatggaatatgactgtaagccttcagcaatcttctctttgtccaacgtgaacacataaacctttaaagatgtacatgaaatggtcacatgcaattttaaattctttaatgtagaaaatcccaaattcataaactaaattcttcacgtgaacctttggtaatagtatttttatcttctctagaagcacttatttttcttacatttttcccagagaaaccagtcttcatttcagtttatgttgttcaagatacaactctggaaattttattctgtgccacaaacacttataaaatactaggacaataatttcaatcatcgtgttagtgtgcatttttttaaccttcacagtaatatcctcttaactgtcttgtaatttaaatgcttgtttacagtaacaacccaaacttacaagtatgaaaatataccataggaatatgatcactaaatagtgtttttttattttaaaaaattcctttaggtgtcttctataaacatctccaactaacattgatttaggttgttttagggttctaatgtcttctaacagttctttgttgttgaaataaagtaatagagtagttgaaaaagcataacaacaattagaaagactttgtaaagcctcacatataaaaccccttcacttttaacttcggtaatacttgggtttaagatcgggaataacctaccagtccatcagggttgaaaaataatgcttcatgcaaaaccagaaaatgtgatggatgaggattcccctgaatccaaagctctgcttctacttcctttgctgtatctgggcaaaaattcaggggaaaagcaagacataagaaagaaattggatcataaagagagtgagagcatgagagaatgagaatggatttgcatgtgtttggccggttcagataccccaggttctgcttgctttcttccttccctgtgctccttctgggccacagaggttgagaacctctgcactcttttagatgccccaggtttcctatttagccatttgatgtcttgatcctttttctcaaggtctgccttaatgttaatataaaaatattttacattaaatatgacatatatttacagtacacatatcttaaatctacaactaaatgaattttacgtatatattacccatgtaactactgctcagatgaagatgcagatttacaatattccttccaagtcaatactcccaggtaactgctatcctgatatatattcctacagattagttttgcccacttgtgaatgctatcatatttgtttgtaaatttggttgtacatattatactgtacattcttttgtatctagattctttcactcatgatcatttgtgagatttatccttgttgttgcctgctgctggaatgagttcattctcatttgtatagtattctgttgtatgattacaccacaatttatctttctacttttgatgggcatttatattacttctagtttctggctattggtaaaaaaaaaaaagtacctatgaacattcttgttcatgtattttcatggatacactcatatcttttgaatatatacccaagaatggaaatgctggattatagggtattcatatgtttacctttggttaggtctgccaaacatttttccaaaagggttgtgtcattttacactcccaccatcaatttatgagaattccatttgctccacattcttgtcaacacttggttttgtcagtctttaaatttaagccattctagtcagtgtagagtggtatcttatcatagaaatttgaatttctctggcaagtaataatgggaagtatatctgtttggaggtatttgagaaagggagttgggtacacagtgcagcatgtactgcacttaagacttccaaaaggaggctgcctgatttcttggaggtgaactttctggtgtggccacattctcagtgacttgagatagactagtgttcaaacctaaattgtaaatagatggcttttaatgatctgaacagaactagggttttaattgtaggttgtcaccctgtgattttcttgtataagagatgtaaacttagccaggaactcagagttatttgaatttaaataggataattttcttataatcatgctttattacaaataatcttctaggctgcagtctatacaaccttgccctagtaagcaatatcaaattatgctacatatatgttattggtaaaatccatttgaattgtgattcaaatatggcaatatttttattattactacaagctgttatttggcatgtgataaaacagagttaaactgttggtgaatggcttacacaagttacccaatgacagtatattatctgaattaactttttggattcttagccccgtgcccaaacttactataagaaagtactgatgcagtgttttacatttttttctttcatatctgtaacagatttattttttaaagtaatggattttgagggaaagaaacatgggacagaagtatggaatacaaatatatgtgtgttgctaattatcttataaccacaacaaactaatacagagaatgccctgtacaaaacacaataaagtttcaaagattgaggtgttccttagcaaggctgaaaattttagtctctggtatttgtaatttaggctgcagtcctcatttctggatgagtcactctgtgtgtgtggcacagtctgtgcctttaaccagatttgaacagaagaatgcccatttggcccaggtagaagtagatgaagtgcttggtttcatgtgtcaggcaactaccaaagttcctccccgtgatgcaatgtcgggtgggattgtacttcttgtcaaactgcttctcgatatgggctgaaatagtcttttttatgttctccaatgcctgcgtagctcacaccactaagccctgatgcatctcttccaacgtgactgcattttttatcacagcctttcaatttcacatggttactgtggagcagaggctggtcaactggagtagtctccttggggaggtgctagcatggctcaggccctctggaagctatgttcactactggagccatggtacatctaacacagtttatattcttaatgagactctgtatctagtcgtgttctttctgtgcctaggaaagcatagaaagttcttctcatgctctttccccacctcagttttctcaaggaagcaggacagcacatttgcatataccagcattggaaccattgtaccagtttacttatcttgaacaagtggcttaacctttcagagctccagtttccccagttgtgcaataactactacctcatagtgttggtttgaggatggattagctaatgtttaaaaaacacatagcacaatccttcacatgaagtaatgaaactgaaggtagttatgttaaagttgtcaggcatgagaaaacgagaaaataatcactttctgtcagaggtggacttacactgaagcaaatgcagtttaaattttaatgaagtttaagggccccttgcaagtaagtatactcaaaataagatattttaactacaattggctaggatgactcttctcattttgatttcatctccatcacatttgcctttatttcaaccggtattggagggctgtaggcattcttggctttcagctgtgggaaagttgagtagggaatatgttcagtttgggcttatgagatatgtttgactcacatttctatacataattgggttacttctagctgtcttggtgttggaatggcttctagaaaacctctgactgcccactgtgctatgtgcagatgcaaaggccagagttgtggccaaatggttggacgtgtgcacagtatccagcttcagaagaatgtgggtggtagaaagggaatggtttcatatattccttagatgcacctagtggaaaattcttctgaaccttagagctcacatgtgaaagacacttggatggaagtgtttctaatatttgaccacaatcctgaaactttatgtgaagtcaccaatcatttgttgtgaaaccaaaagatactttattctaaactattgataaaataaattttaacacattgataaatctattttaaactattgataaaataaatttcaaagatgcactgaagtcctattctataatagatattatgaaataattatcatccataaaggtgctcaaagagcatgaagtccaaaacataggaaaaagagacaactagaagtatatcaggacattaattaataaaattatattatttttctggccttttggttgattgtagtatttatcagtttttaatgtatttgttgtgtttttttttctcatccctgatacttttgtagtcagtttggattcacaagtttgcatgttttttttcttttttttttttcttttattattatactttaagttttagggtacatgtgcacattgtgcaggttagttacatatgtatacatgtgccatgctggtgcactgtacccactaactcgtcatctagcattaggtatatctcccaatgctatccctcccccctccccccaccccacaacagtccccagagtgtgatgttccccttcctgtgtccatgtgatctcattgttcaattcccacctatgagtgagaacatgcggtgtttggttttttgtccttgcgatagtttactgagaatgatgatttccaatttcatccatgtccctacaaaggacatgaactcatcattttttatgggtgcatagtattccatggtgtatatgtgccacattttcttaatccagtctatcattgatggacatttgggttggttccaagtctttgctattgtgaatagtgccacaataaacatacgtgtgcatgtgtctttatagcagcatgatttatagtcctttgggtatataaccagtaatgggatgcctgggtcaaatggtatttccagttctagatccctgaggaatcgccacactgacttccacaatggttgaactagtttacagtcccaccaacagtgtaaaagtgttcctatttctccacatcctctccagcacctgttgtttcctgacttttaatgactgccattctaactggtgtgagatggtatctcactgtggttttgatttgcatttctctgatggccagtgatgatgtgagcattttttcatgtgttttttggctgcataaatgtcttcttttgagaagtgtctgttcatgccctttgcccactttttgatggggttgtttgtttttttcttgtaaatttgtttgagttcattgtagattctggatattagccctttgtcagatgagtaggttgcgaaaattttctcccattttgtaggttgccggttcactctgatggtagtttcttttgctgtacagaagctctttagtttaattagatcccatttgtcaattttgtcttttgttgccattgcttttggtgttttagacatgaagtccttgcccatgcctatgtcctgaatggtattgcctaggttttcttctagggtttttatggttttaggtctaacgtttaagtctttaatccatcttgaattgatttttgtataaggtgtaaggaagggatccagtttcagctttctacatatggctagccagttttcccagcaccatttattaaatagggaatcctttccccattgcttgtttttctcaggtttgtcaaagatcagatagttgtagatatgcggtgttgtttctgagggctctgttctgttccattgatctatatctctgttttggtaccagtaccatgctgttttcgttactgtagccttgtagtatagtttgaagtcaggtagtgtgatgcctccagctttgtccttttggcttaggattgacttggcgatgtgggctcttctttggttccacatgaattttaacgtagttttttccaattctgtgaagaaaggcattggtagcttgatggggatggcatggaatctgtaaattaccttgggcagtatggccattttcatgatattgattcttcctacccatgagcatggaatgttcttccatttgtttgtatcctcttttatttccttgagcagtggtttgtatttctccttgagaggtccttcatatcccttgtaagttggattcctaggtattttattcttctttgaagcaattgtgaatgggagttcactcatgatttggctctctgtttgtctgttattggtgtataagaatgcttgtgatttttgtacactgattttgtatcctgagactttgctgaagttgcttatcagcttaaggagattttgggctgaggcaatagggttttctagatatacaatcatgtcgtatgcaaagagggacaatttgacttcctatttccctaattgaataccctttatttccttctcctgcctaattgccctggccagaacttccaacactatgttggatgggagtggtgagagatggcatccctgtcttgtgccagttttcaaagggaatgcttccagtttttgcccattcagtatgatattggctgtgggtttgtcatagatagctcttattattttgaaatacctcccatcagtacctaatttattgagagtttttagcatgaagggttgttgaattttgtcaaaggccttttctgcatctattgagataatcatgtggtttttgtctttggctctgtttatatgctggattacatttattgatttgcatatattgaaccagccttgcatcccagggatgaagcccacttgatcatggtggataagctttttgatgtgctgctggattcattttgccagtattttattgaggatttttgcatcaatgttcatcaaggatattggtctaaaattctcttttttggttgtgtctctgcccggatttggtaccagaatgatgctggcctcataaaatgagttagggaggattccctctttttctactgattggaatagtttcagaaggaatggtaccagttcctccttgtacctctggtagaattcggctgtgaatccatctggtcctggactctttttggttggtaaactattgattattgccacaatttcagatcctgttattggtctattcagagattcaacttcttcctggtttagtcttgggagagtgtatgtgtcaaggaatttatccatttcttctagattttctagtttatttgcatagaggtgtttgtagtattctctgatggtagtttgtatttctgtgggatcagtggtgatatcccctttatcattttttattgcgtctatttgattcttctctcttttttttttattagtcttgctagcggtctatctattttgtcgatcctttcaaaaaaccagctcctggattcattaattttttgaagggttttttgtgtctctatttccttcagttctgctctgattttagttatttcttgccttctgctagcttttgaatgtgtttgctcttgcttttctagttcttttaattgtgatgttagggtgtcaattttggatctttcctgctttctcttgtgggcatttagtgctataaatttccctccacacactgctttgaatgcgtcccagagattctggtatgttgtgtctttgttctcgttggtttcaaagaacatctttatttctgccttcatttcgttatgtacccagtagtcattcaggagcaggttgttcagtttccatgtagttgagcggttttgagtgagattcttaatcctgagttctagtttgattgcactgtggtctgagagatagtttgttataatttctgttcttttacatttgctgaggagtgctttacttccaagtatgtggtcaattttggaataggtgtggtgtggtgctgaaaaaaatgtatattctgttgatttggggtggagagttctgtagatgtctattaggtccacttggtgcagagctgagttcaattcctgggtatccttgttgactttctgtctcattgatctgtctaatgttgacagtggggtgttaaagtctcccattattaatgtgtgggagtctaagtctctttgtatgtcactcaggacttgctttatgaatctgggtgctcctgtattgggtgcctatatatttaggatagttagctcttcttgttgaattgatccctttaccagtatgtaatggccttctttgtctcttttgatctttgttggtttaaagtctgttttatcagagactaggagtgcaacccctgcctttttttgttttccatttgcttggtagatcttcctccatccttttattttgaacctatgtgtgtctctgcacatgagatgggtttcctgaatacagcacactgatgggtcttgactctttatccaacttgccagtctgtgtcttttaattggagcatttagtccatttacatttaaagttaatattgttatgtgttaatttgatcctatcatgatgatgttagctggttattttgctcgttagttgatgcagtttcttcctagtctcgatggtctttacattttggcatgattttgcagcggctggtaccggttgttcctttccatgtttagtgcttcctttaggaactcttttagggcaggcctggtggtgacaaaatctctcagcatttgcttgtctgtaaagtatttttttctccttcacttatgaagcttagtttggctggatatgaaattctgggttgaaaattcttttctttaagaatgttgaatattgacccccactcttttctggcttgtagggtttctgccgagagatccgctgttagtctgatgggcttccctttgagggtaacccgacctttctctctggctgcccttaacattttttccttcatttcaactttggtgaatctgacaattatgtgtcttggagttgctcttctcgaggagtatctttgtggcattctctgtatttcctgaatctgaatgttggcctgccttgctagattggggaagttctcctggataatatcctgcagagtgttttccaacttggttccattctccccgtcactttcaggtacaccaatcagacgtagatttggtcttttcacatagtcccatatttcttggaggctttgctcatttctttttattcttttttctctaaacttcccttctcacttcatttcattcatttcaccttccattgccgataccctttcttccagttgatcgcattggctcctgaggcttctgcattcttcacgtagttctcgagccttggttttcagctccatcagctcctttaagcacttctctgtattggttattctagttatacattcttctaaatttttttcaaagttttcaacttgtttgcctttggtttgaatgtcctcccgtagctcagagtaatttgatcgtctgaagccttcttctctcagctcgtcaaagtcgttctccctctagctttgttccgttgctggtgaggagctgcgttcctttggaggaggagaggcgctctgctttttagagtttccagtttttctgctctgttttttccccatctttgtggttttatctacttttggtctttgatgatggtgatgtacagatgggtttttggcatggatgtcctttctgtttgttagttttccttctaacagacaggaccctcagctgcatgtctgttggagtaccctgccgtgtgaggtgtcagtgtgcccctgctggggggtgcctcccagttaggctgctcgtgggtcaggggtcagggacccacttgaggaggcagtctgcccgttctcagatctccagctgcgtgctgggagaaccactgctctcttcaaagctgtcagacagggacatttaagtctgcagaggttactgctgtctttttgtttttctgtgccctgcccccagaggtggagcctacagaggcaggcaggcctccttgagctgtggtgggctccaaccagttcgagcttcccggctgctttgtttac

SEQ ID NO: 10631 - DNA, 6543 bp, Homo sapiens
tttttttattttttattttttcttgagttttttttttaatttatttatttattattattatactttaaggtttagggtacatgtgcacaatgtgcaggttagttacatatgtatacatgtgccatgctggtgggctgcacccactaactcgtcatctagcattagttatatctcccaatgctatccctcccccctcccccaaacccaccacagtccccagagtgtgatgttccccttcctgtgtccatgtgttctcattgtttaattcccacctatgagtgagaatatgcggtgtttggttttttgttcttgcgatagtttactgagaatgatgatttccaatttcatccatgtcactacaaaggacatgaactcatcattttttatggctgcatagtattccatggtgtatatgtgccacattttcttaatccagtctatcattgttggacatttgggttggttccaagtctttgctattgtgaataatgccgcaataaacatacgtgtgcatgtgtctttatagcagcatgatttatagtcctttaggttatatacccagtaatgggatggctgggtcaaatggtatttctagttctagatccctgaggaatcgccacactgacttccacaatggttgaactagtttacagtcccgccaacagtgtaaaagtgttcctatttctccacatcctctccagcacctgttgtttcctgactttttaatgattgccattctaactggtgtgagatagtatctcattgtggttttgatgtgcatttctctgatggccagtgatggtgagcattttttcatgtgttttttggctgcataaatgtcttcttttgagaaatgtctgttcatgtccttcgcccactttttgatggggttgtttggttttttcttgtaaatttgtttgagttcattgtagattctggatattagccctttgtcagatgagtaggttgcgaaaattttctcccattttgtaggttgcctgttcactctgatggtagtttcttttgctgtgcagaagctgtttagtttaattagatcccatctgtcaattttggcttttgttgccattgcttttggtgttttagacatgaagtccttgccccatgcctatgtcctgaatggtaatgcctaggttttcttctagggtttttatggttttaggtcgaacgtttaagtctttaatccatcttgaattgatttttgtataaggtgtaaggaagggatccggtttcagctttctacatatggctagccagttttcccagaaccatttattaaatacagaatcctttccccactgcttgtttttctcaggtttgtcaaagatcagatagttgtagatatgcggcgttatttctgagggctctgttctgttccattggtctctatctctgttttggtaccagtaccatgctgttttggtgactgtagccttgtagcatagtttgaagtcaggtagcgtgatgcctccagctttgttcttttggcttaggattgacttggcgatgcgggctcttttttggttccatatgaactttaaagtagttttttccaattgcgtgaagaaagtcattggtagcttgatggggatggcattgaatctgtaaattaccttgggtagtatggccattttcacgatattgattcttcctacccatgagcatggaatgttcttccatttgtttgtatcctcttttatttccttgagaagtggtttgtagttctccttgaagaggtccttcacatcccttgtaagttggattcctaggtattttattctctttgaagcaattgtgaatgggagttcactcatgatttggctctctgtttgtctgttgttggtgtataagaatgcttgtgatttttgtacattgattttgtatcctgagactttgctgaagttgcttatcagcttaaggagattttgggatgagatgatggggttttctagatatacaatcatgtcatctgcaaacagggacaatttgacttcctcttttcctaattgaataccctttatttccttctcctgcctaattgccctggccagaacttccaacactatgttgaataggagtggtgagagagggcatccctgtcttgtgccagttttcaaagggaatgcttccagtttttgcccatttagtatgatattggctgtgggtttgtcatagatagctcttattattttgaaatacgtcccatcaatacctaatttattgagagtttttagcatgacgggttgttgaattttgtcaaaggccttttctgcatctattgagataatcatgtggtttttgtctttggttctgtttatatgctggattacatgtattgatttgcatatattgaaccagccttgcgtcccagggatgaagcccacttgatcatggtggataagctttttgatgtgctgctggattcggtttgccagtattttattgaggatttttgcatcaatgttcatcaaggatattggtctaaaattctcttttttggttgtgtctctgcccggctttggtatcaggatgatgctggcctcatcaaatgagttagggaggactccctctttttctattgattggaatagtttcagaaggaatggtaccagttcctccttgtacctctggtagaattcggctgtgaatctatctggtcctggactctttttggttggtaagctattgattattgccacaatttcagatcctgttattggtctattcagagattcaacttcttcctggtttagtctttggagggtgtatgtgtcaaggaatttatccatttcttctagattttctagtttatttgcatagaggtgtttttagtattctctgatggtagtttgtatttctgtgggatcggtggtgatatcccctttatcattttttattgcgtctatttgattcttctctctttttttctttattagtcttgctagcagtctatcaattttgttgatcctttcaaaaaaccagctcctggattcattaattttttgaagggttttttgtgtctctatttccttcagttctgctctgattttagttatttcttgccttctgctagcttttgaatgtgtttgctcttgcttttctagttcttttaattgtgatgttagggtgtcaattttggatctttcctgctttctcttgtgggcatttagtgctataaatttccctctacacactgctttgaatgtgtcccagagattctggtatgttgtgtctttgttctcgttggtttcaaagaacgtctttatttctgccttcatttcgttatgtacccagtagtcattcaggagcaggttgttcagtttccatgtagttgagtggttttgagtgagattcttaatcctgagttctagtttgattgtactgtggtctgagagatagtttgttataatttctgttcttttacatttgctgaggagagctttacttccaagtatgtggtcaattttggaataggtgtggtgtggtgctgaaaaaaatgtatattctgttgatttggggtggagagttctgtagatgtctattaggtctgcttggtgcagagctgagttcaattcctgggtatccttgttgacttgctgtctccttgatctgtctaatgttgacagtggggtgttaaagtctcccattattattgtgtgggagtctaagtctctttgtaggtcactcaggacttgctttatgaatctgggtgttcctgtattgggtgcatatatatttaggatagttagctcttcttgttgaattgatccctttaccattatgtaatggccttctttgtctcttttgatctttgttggttgaaagtctgttttatcagagactaggattgcaacccctgcctttttttgttttccatttgcttggtagattttcctccatccctttattttgagcctatgtgtgtctctgcacgtggatgggtttcctgaatacagcacactgatgggtcttgactctttatccaatttgccagtctgtgtcttttaattggagcatttagtccatttacatttaaagttaatatcgttatgtgtgaatttgatcctgtcattatgatgttagctggttattttgctcgttagttgatgcagtttcttcctagtctcgatggtctttacattttggcatgattttgcagcagctggtaccggttgttcctttccatgtttagcgcttccttcaggagctcttttagggcaagcctggtggtgacaaaatctctcagcatttgcttgtctgtaaagtattttatttctccttcacttttgaagcttagtttggctggatatgaaattctgggtcgaaaattcttttctttaagaatgttgaatattggcccccactctcttctggcttgtagagtttctgccaagagatctgctgttagtctgatgggcttccctttgagggtaacccgacctttctctctggctgcgcttaacatttttcccttcatttcaactttggtgaatctgacaattatgtgtcttagagttgctcttctcgaggagtatctttgtggcattctctgtatttcctgaatctgaatgttggcctgccttgctagattggggaagttctcctggatgatatcctgcagagtgttttccaacttggttccattctccccgtcagtttcaggtacaccaatcagacgtagatttggtcttttcacatagtcccgtatttcttggaggctttgtttgtttctttttattcttttttctctaaacttcccttcttgcttcatttcattcatttcatcttccatcgctgataccctttcttccagttgatcgcatcggctcctgaggcttctgcattcttcacgtagttctcgagccttggttttcagctccatcagctcctttaagcacttctctgtattggttattctagtaatacattcttcaaaatttttttcaaagttttcaacttctttgcctttggtttgaatgtcctcccgtagcttggagtaatttgatcgtctgaagccttattttctcagctcgtcaaagtcattctccgtccagctttgttctgttgttggtgaggagctgcgtttctttggaggaggagaggcactgcgttcctttggaggaggagaggcgctctgctttttagagtttccaggttttctgctctgttttttccccatctttgcagtttttatctacttttggtctttgatgatggtgatgtacagatgggtttttggtgtggatgtcctttctgtttgttagttttccttctaacagacaggaccttcagctgcaggtctgttgggttacccggccgtgtgaggtgtcagcctgcctctgctagggggtgcctcccagttacctcccagggggtgacctcccagggggtcaggggtcagggacccacttgaggaggcagtctgcccgttctcagatctccagctgtgtgctgggagaaccactgctctcttcaaactgtcagacagggacacttaagtctgcggaggttactgctgtctttttgtgtgtctgtgccctgcccccagaggtggagcctacagaggcaggcaggcttccttgagctgtggtgggctccacccagttggagcttcctggctgctttgtttacctaagcaagcctgggcaatggcgggcacccctcccccagcctcgctgccaccttgcagtttgatctcaggctgctttgctagcaatcagcgagactccgtgggcgtgggaccctccgagccaggtgtgggacacaatctcctggtgcgccgtttttcaagcccgtcggaaaagcgcagcattctggtgggagtgacccaatcttccaggtgccgtctgtcacccctttctttgactaggaaagggaactccctgacccccgtgcttcccaagtgagacaatgcctcgccctgcttcggctcgcggatggagcacgcacccactgacctgcgcccactgtctggcactccctagtgagatgaacccggtacctcagatggaaatggagaaatcgcctgtcttctgcgtctctaacgctgggagctgtataccggagctgttcctattcggccatcttggctcctctctcctctcttcactttaataatggattagttttctgccttctcctgtggggaatccttttggtaagggagggaagaaagattagttattcttgtgcatcggtatctttttctttttttattgtagtaagaacatctaacatgagatctaccctcttaacaattttttaagtgtacaatacagtattgctaactataggcatgaggatgtgcagcagatctctggaacgtttcactcttcataactgaagctttataccccttgaatcgcagtttcccatttccctgtcttcatagcccctggcatccaccattctacactctttctatggggttgactattttaattacctgacacaagtggaatcatgcattatttgtctttctgtgactggtttatttcatgtagcataaagtcatcaaggttcatc

SEQ ID NO: 10632 - DNA, 5707 bp, Homo sapiens
ttttttgtttgtttgtttgtttttgttttttgttttttgttttttttattatactttaagttttagggtacatgtgcacattgtgcaggttagttacatatgtatgtatacatgtgccatgctggtgcgctgcacccactaacttgtcatctagcattaggtatatctcccaatgctatccctcccccctccccccaccccaccacagtccccagagtgtgatattccccttcctgtgtccatgtgatctcattgttcaattcccacctatgagtgagaatatgccatgtttggttttttgttcttgtgatagtttactgagaatgatgatttccaatttcatccatgtccctacaaagaacacgaactcatcattttttatggctgcatagtattccatggtgtatatgtgccacattttcttaatccagtctatcattgttggacatttgggttggttccaagtctttgctattgtgaataatgccgcaataaacatacgtgtgcatgtgtctttatagcagcatgatttatagtcctttgggtatatacccagtaatgggatggctgggtcaaatggtatttctagttctagatccctgaggaatcgccacactgacttccacaatggttgaactagtttccagtcccaccaacagtgtaaaagtgttcctatttctccacatcctctccagcacctgttgtttcctgactttttaatgattgccattctaactggtgtgagatggtatctcattgtggttttgatttgcatttctctgatggccagtgatgatgagcattttttcatgtgttttttggctgcataaatgtcttcttttgagaagtgtctgttcatgtcctttgcccactttttgatggggttgtttgtttttttcttgtaaatttgtttgagttcattgtagattccggatattagccctttgtcagatgagtaggttgcgaaaattttctcccattttgtaggttgcctgttcactctgatggtagtttcttttgctgtgcagaagctctttagtttaattagatcccatttgtcaattttgtcttttgttgccattgcttttggtgttttggacatgaagtccttgcccatgcctatgtcctgaatggtagtgcctaggttttcttctagggtttttatggttttaggtctaacgtttaaatctttaatccatcttgaattgatttttgtataaggtgtaaggaagggatccagtttcagctttctacatatggctagccagttttcccagcaccatttattaaatagggaatcctttccccattgcttgtttttctcaggtttgtcaaagatcagatagttgtaggtaggcggcgttatttctgagggctctgttctgttgcattgatctatatctctgttttggtaccagtaccatgctgttttggttactgtagccttgtagtatagtttgaagtcaggtagtgtgatgcctccagctttgttcttttggcttaggattgacttggcgatgcgggctcttttttggttccatatgaactttaaagtagttttttccaattctgtgaggaaagtcattggtagcttgatggggatggcattgaatctgtaaattaccttgggcagtatggccattttcacgatattgattcttcctacccatgagcatggaatgttcttccatttgtttgtatcctcttttatttccttgagcagtggtttgtagttctccttgaagaggtccttcacatcccttgtaagttggattcctaggtattttattctctttgaagcaattgtgaatgggagttcactcatgatttggctctctgtttgtctgttgttggtgtataagaatgcttgtgatttttgtacattgattttgtatcctgagactttgctgaagttgcttatcagcttaaggagattttgggctgagacaatggggttttctagatatacaatcatgtcatctgcaaacagggacaatttgacttcctcttttcctaattgaataccctttatttccttctcctgcctaattgccctggccagaacttccaacactatgttgaataggagtggtgagagagggcatccctgtcttgtgccagttttcaaagggaatgcttccagtttttgcccattcagtatgatattggctgtgggtttgtcatagatagctcttattattttgaaatacgtcccatcaatacctaatttattgagagtttttagcatgaagggttgttgaattttgtcaaaggctttttctgcgtctattgagataatcatgtggtttttgtctttggctctgtttatatgctggattacatttattgatttgcgtatattgaaccagccttgcatcccagggatgaagcccacttgatcatggtggataagctttttgatgtgctgctggattcgttttgccagtattttattgaggatttttgcatcaatgttcatcaaggatattggtctaaaattctcttttttggttgtgtctctgcccggctttggtatcagaatgatgctggcctcataaaatgagttagggaggattccctctttttctattgattggaatagtttcagaaggaatggtaccagttcctccttgtacctctggtagaattcggctgtgaatccatctggtcctggactctttttggttggtaaactatcgattattgccacaatttcagctccttttattggtctattcagagattcaacttcttcctggtttagtcttgggagagtgtatgtgtcgaggaatgtatccatttcttctagattttctagtttatttgcgcagaggtgtttgtggtattctctgatggtagtttgtatttctgtgggatcggtggtgatatcccctttatcattttttattgtgtctatttgattcttctctctttttttctttattagtcttgctagtggtctatcaattttgttgatcctttcaaaaaaccagctcctggattcattgagtttttgaagggttttttgtgtctctatttccttcagttctgctctgattttagttatttcttgccttctgctagcttttgaatgtgtttgctcttgcttttctagttcgtttaattgtgatgttagggtgtgaattttggatctttcctgctttctcttgtgggcatttagtgctataaatttccctctacacactgttttgaatgtgtcccagagattctggtatgttgtgtctttgttctcgttggttttaaagaacatctttatttctgccttcatttcgttacgtacccagtagtcattcaggagcaggttgttcagtttccatgtagttgagcagctttgagtgagattcttaatcctgagttctagtttgattgcactgtgatctgagagatagtttgttataatttctgttcttttacatttgctgaggagagctttacttccaactatgtggtcaattttggaataggtgtggtgtggtgctgaaaaaaatgtatattctgttgatttggggtggagagttctgtagatgtctattaggtccgcttggtgcagagctgagttcaattcctgggtatccttgttgactttctgtctcattgatctgtctaatgttgacagtggggtgttaaagtctcccattattaatgtgtgggagtctaagtctctttgtaggtcactcaggacttgctttataaatcttggtgctcctgtattgggtgcatatatatttaggatagttagctcttcttgttgaattgatccctttaccattatgtaatggccttctttgtctcttttgatctttgttggtttaaagtctgttttatcagatactaggattgcaacccctgcctttttttgttttccatttgcttggtagatcttcctccatccttttattttgaacctatgtgtgtctctgcacgtgagatgggtttcctgaatacagcacactgatgggtcttgactctttatccaatttgccagtctgtgtcttttaattggagaatttagtccatttacatttaaagttaatattgttatgtgtgaatttgatcctgtcattatgatgttagctggtgattttgctcgttagttgatgcagtttcttcctagcctcgatggtctttacattttggcatgattttgcagcagctggtaccggttgttcctttccatgtttagcgcttccttcaggagctcttatagggcagtcctggtggtgacaaaatctgtcagcatttgcttgtctgtaaagtattttatttctccttcacttatgaagcttagtttggctggacatgaaattctgggttgaaaattcttttctttaagaatgttgaatattggccccactctcttctggcttgtagggtttctgccgagagatccgctgttagtctgatgggcttccctttgagggtaacccgacctttctctctggctgcccttaacattttttccttcatttcaactttggtgaatctgacaattatgtgtcttggagttgctcttcttgaggagtatctttgtggcgttctctgtatttcctgaatctgaacgttggcctgccttgctagattgcggaagttctcctggataatatcctgcagagtgttttccaacttggttccattctccccatcactttcaggtacaccaatgagatgtagatttggtcttttcacatagtcccatatttcttggaggctttgctcatttctttttattcttttttctctaaccttcccttctcgcttcatttcattcatttcatcttccattgctgataccctttcttccagttgatcgcatcggctcctgaggcttctgcattcttcacgtagttctcgagccttggttttcagctccatcagctcctttaagcacttctctgtattggttattctagttatacattcttctaaatttttttcaaagttttcaacttctttgccttggtttgaatgtcctcccgtagctcagagtaatttgatcgtctgaagccttcttctctcagctcatcaaagtcattctccatccactttgtccgttgctggtgaggaactgcgttcctttggtaggaggagaggcgctctgcgttttagagtttccagtttttctgttctgttttttccccatctttgtggttttatctacttttggtctttgatgatggtgatgtacagatgggttttcggtgtggatgtcctttctgtttgttagttttccttctaacagacaggaccctcagctgcaggtctgttggaataccctgccgtgtgaggtgtcagtgtgcccctgctggggggtgcctccagttaggctgctcgggggtcaggggtcaagggacccacttgaggaggcagtctgcccgttctcagatctccagctgtgtgctgggagaaccactgctctcttcaaagctgtcagacagggacacttaagtctgcagaggtttctgctgtctctttgtttgtctgtgccctgcccccagaggtggagcctacagaggcaggcaggcctccttgagctgtggtgggctccacccagttggagcttcccggctgctttgtttacctaagcaagcctgggcaatggcgggcgcccctcccccagcctcgctgccgccttgcagtttgatctcagactgctgtgctagaaatcagcgagactccgtgggcgtag

SEQ ID NO: 10633 - DNA, 5881 bp, Homo sapiens
acctccccccaccccacaacaggccccagagtgtgatgttccccttcctgtgtccatgtgatctcattgttcaattcccacctatgagtgagaatatgcggtgtttggttttttgttcttgtgatagtttactgagaatgatgatttccaatttcatccatgtccctacaaaggacatgaactcatcattatttatggctgcatagtattccatggtgtatatgtgccacattttcttaatccagtctatcattgttagacatttgggttggttccaagtctttgctatcgtgaataatgccacaataaacatatgtgtgcatgtgtctttatagcagcatgatttatagtcctttgggtatatacccagtaatgggatggctgggtcaaatggtatttctagttctagatccctgaggaatcgccacactgacttccacaatggttgaactagtttacactcccaccaacagtgtaaaagtgttcctatttctccacatcctctccagcacctgttgtttcctgactttttaatgatcgccattctaactggtgtgagatggtatctcattgtggttttgatttgcatttctctgatggccagtgatggtgagcattttttcatgtgttttttggctgcataaatgtcttcttttgagaagtgtctgttcatgtcctttgcccactttttgatggggttgtttgtttttttcttgtaaatttgtttgagttcattgtagattctggatattagccctttgtcagatgagtaggttgcgaatattttctcccatgttgtaggttgcctgttcactctgatggtagtttcttttgctgtgcagaagctctttagtttaattagatcccatttgtcaattttgtcttttgttgccattgcttttggtgttttagacatgaagtccttgcccatgcgtatgtcctgaatggtattgcctaggttttcttctagggtttttatggttttaggtctaacgtttaagtctttaatccatcttgaattgatttttgtataaggtgtaaggaagggatccagtttcagctttctacatatggctagccagttttcccagcaccatttattaaatagggaatcctttccccattgcttgtttttctcaggtttgtgaaagatcagatagttgtagatatgcggcgttatttctgagggctctattctgttccattgatctatatctctgttttggtaccagtaccatgctgttttggttactgtagccttgtagtatagtttgaagtcaggtagcgtgatgcctccagctttgttcttttggcttaggattgacttggcgatgcgggctcttttttggttccatatgaactttaaagtagttttttccaattctgtgaagaaagtcattggtagctttatggggatagcattgaatctataaattaccttgggcagtatggccattttcacaatattgattcttcctacccatgagcatggaatgctcttccatttgtttgtatcctctttgatttccttgagcagtggtttgtagttctccttgaagaggtccttcacatcccttgtaagttggattcctaggtattttattctctttgaagcaattgtgaatgggagttcactcatgatttggctctctgtttgtctgttgttggtgtataggaatgcttgtgatttttgcacattgattttgtatcctgagactttgctgaagttgcttatcagctaaaggagatttggggctgagacaatggggttttctagatatacaatcatgtcatctgcaaacagggacaatttgacttcctcttttcctaactgaatgccctttatttccttctcctgcctaattgccctggccagaacttccaacactatgttgaataggagtggtgagagaggtcatccctgtcttgtgccagttttcaaagggaatgcttccagtttttgcccattcagtatgatattggctgtgggtttctcatagatagctcttattattttgaagtatgtcccatcaatacctaatttattgagagtttttagcatgaagggttgttgaattttgtcaaaggccttttctgcatctattgagataatcatgtggtttttgtctttggctctgtttatatgctggattacatttattgatttgtgtatattgaaccagccttgcatcccagggatgaagcccacttgatcatggtggataagcattttgatgtgctgctggatttggtttggcagtattttattgaggatttttgcatcaatgttcatcaaggatattggtctaaaattctcttttttggttgtgtctctgcctggctttggtatcagaatgatgctggcctcataaaatgagttagggaggattccctctttttctattgattggaatagtttcagaaggaatggtaccagttcctccttgtacctctggtagaattcggctgtgaatccatctggtcctggactctttttggttggtaagctattgattattgccacaatctcagatcctgttattggtctattcagagattgaacttcttcctggtttagtcttgggagagtgtatgtgtcaaggaatttacccatttcttctaggttttctagtttatttgcatagaggtgtttgtagtattctctgatggtagtttgtatttctgtgggatcggtggtgatatcccctttatcattttttattgcgtctatttgattcttctctctttttttctttattattcttgctagcggtctatcaattttgttgatcctttcagaaaaccagctcctggattcagtaattttttgaagggttttttgtgtctctatttccttcagttctgctctgattttagttatttcttgccttctgctagcttttgaatgtgtttgctcttgcttttcttgttcttttaattgtgatgttagggtgtcaattttggatctttcctgctttctcttgtgggcatttagtgctataaatttccctctacacactgctttgaatgtgtcccagagattctggtatgttgtgtctttgttctcgttggtttcaaagaacatctttatttctgccttcatttcgttacgtacccagtagtcattcaggaggaggttgttcagtttccatgtagttgagtggttttgagtgagattcttaatcctgagttctagtttgattgcactgtggtctgagagatagtttgttataatttctgttcttttacatttgctgaggagagctttacttccaagtatgtggtcaattttggaataggtgtggtgtggtgctgaaaaaaatgtatattctgttgatttggggtggagagttctgtagatgtctattgggtccgcttggtgcagagctgagttcaattcctgggtatccttgttgactttctgtctcgttgatctgtctaatgttgacagtggggtgttaaagtctcccattattaatgtgtgggagtctaagtctctttgtaggtcactcaggacttgctttatgaatctgggtgctcctgtattgagtgcatatatatttaggatagttagctcttcttgttgaattgatccctttaccattatgttatggccttctttgtctcttttgatctttgctggtttaaagtctgttttatcagagactaggatcacaacccctgcctttttttgttttccctttgcttggtagatcttcctccatccttttatttttggcctatgtgtgtctctgcacgtgagattggtatcctgaatacagcacactgatgggtcttgactctttatccaatttgccagtctgtgtcttttaactggagcctttagtccatttacatttaaagttaatcgtgttatgtgtgaatttgatcctgtcattatgatgttagctggttattttgctccttagttgatgcagtttcttcgtagtctcgatggtcattacattttggcatgattttgcagcggctggtaccggttgttcctttccatgtttactgcttccttcaggagctcttttagggcaggcctggtggtgacaaaatctctcagcatttgcttgtctgtaaagtattttatttctccttcacttatgaagcttagtttggctggatatgaaattctaggttgaaaattcttttctttaagaatgttgaatattggcccccactctcttctggcttgtagggtttctgccgagagatccgctgttagtctgatgggcttccctttgagggtaacccgacctttctctctggctgcccttaacattttttccttcatttcaactttggtgaatctgactattatgtgtcttggagttgctcttctcaaagagtatctttgtggcattctctgtatttcctgaatctgaacgttggcctgccttgctagattggggaaattctcctggataatatcctgcagagtgttttccaacttggttccattctccccatcactttcaggtacaccaatcagacgtagatttggtcttttcacatagtcccatattgcttggaggctttgctcgtttctttttattcttttttctctaaactttccttctcacttcatttcattcatttcatcttccattgctgataccctttcttccagttgatcgcatcggctcctgacgcttctgcattcttcacatagttctcgagccttggttttcagctccatcagctcctttaagcacttctctgtattggttattctagttatacattcttctaaatttttttcaaagttttcaacttctttgcctttggtttgaatgtcctcccgtagctcagagtaatttgatcgtctgaagccttctctcagctcgtcaaagtcattctccgtccagctgtgttccgttgctggtgaggagccgcgttcctttggaggaggagaggcgctctgatttttagagtttccagtttttctgttctgttttttccccatctttgtggttttatctacttttggtctttgatgattgtgatgtacagatgggtttttggtgtggatgtcctttctgtttgttagttttccttctaacagacaggaccctcagctgcaggtctgttggagtaccctgccgtgtgaggtgtcagtgtgcccctgctggagggtgcctcccagttaggctgctcgggggtcaggggtcagggacccacttgagggggcagtctgctggttctcagacctccagctgcatgctgggagaaccactgctctcttcaaagctgtcagacagagacatttaagtctgcagaggttactgctgtctttttgtttgtctgtgccctgcccccagaggtggagcctacagaggcacgcaggcctccttgagctgtggtaggctccacccagttcgagcttccgggctgctttgtttacctaagcaagcctgggcaatggtgggcgcccctcccccagcctcgctgccgccttgcagtttgatctcagactgctgtgctagcaatcagggagactccgtggggtaggaccctctgagccaggtgcaggatataatctcgtggtgtgccgttttttaagcccgtcggaaaagcgcagtattcgggtgggagtgacccgattgtccaggtgccgtccgtcacccctttctttgattaggaaagggaactccctgaccccttgcgcttcccgagtgaggcaatgcctcgccctgctttggctcgcgcacggtgcgcgcacccacttgcctgcgcccactgtctgtcactccctagtgagatgaacccggtacctcaaatggaaatgcagaaatcacctgtcttctgcgtcgctcaggctgggagctgtagacctgagctgttcctattcggccatcttggttcctccccc

SEQ ID NO: 10634 - DNA, 5661 bp, Homo sapiens
gggtatatacccagtaatgggattgttgggtcaaatggtatttctggttctagatctctgaggaatcataaaaggccattctttttttcttttttttttaaattttattattattatactttaagttttagggtacatgtgcacaatgtgcaagtttcttacatatgtatacatgtgccatgctggtgtgctgcacccattaactcatcatttagcattaggtatatctcctaatgctatccctcccccctccccccaccccacaacagtccccagtgtgtgatgttccccttcctgtgtccatgtgttctcactgttcaattcccacctatgagtgagaacatgtggtgtttggtttttggtccttgcaatagtttgctgagaatgatggtttccagtttcatccatgtccctacaaaggacatgaactcatcattttttatggctgcatagtattccatggtgtatatgtgccacattttcttaatacagtctatcgttcttggacatttaggttggttccaagtctttgctattgtgaatagtgccactataaacatacgtgtgcatgtgtctttatagcagcatgatttataatcctttgggtatatagccagtaatgggatgtctgggtcaaatggtatttctagttctagatccctgaggaattgccacactgacttccacaatggttgaactagtttacagtcccaagaacagtgtaaaagtgttcctatttctccacatcctctccagcacctgttgtttcctgactttttaatgattgccattccaactggtgtgagatggtatctcattgtggttttgatttgcatttctctgatggccagtgatgatgagcattttttcatgtgtttttttggctgcataaatgtcttcttttgagaagtgtctgttcatatccttcgcccacttgttgatggggttgtttttttcttgtaaatttgtttgagttcattgtagattctggatattagccctttgtcagatgagtaggttgcaaaaattttctcccattttgtaggttgcctgttcactctgatggtagtttcttttgctgtacagaagctctttagtttcattagatcccatttgtcaattttggcttttgttgccattgcttttggtgttttagacatgaagtccttgcccatgcctatgtcctgaatggtattgcctaggttttcttctagggtttttatggttttaggtctaacatttaagtctttaatccatcttgaattaatttttgtaaaaggtgtaaggaagggatccagtttcagctttccacatatggctagccagttttcccagcaccatttattaaatagggaatcctttccccattgcttgtttttctcaggtttgtcaaagatcagatagttgtagatatgcggcattatttctgagggctctgctctgttccattgatctatatctctgttttggtacccgtaccatgctgctttggttactgtagccttgtagtatagtttgaagtcaggtagcgtgatgcctccagctttgttcttttggcttaggattgactcggcgatgcaggctctttttctggttccatataaactttaaagtagttttttccaattctgtgaagaaagtcattggttgcttgatggggatggcattgaatctataaattaccttgggcagtatggccattttcacgatattgattcttcctacccatgagcatggaatgttcttccatttgtttgtatcttcttttatttcattgagcagtggtttgtagttctccttgaagaggcccttcacatcccttgtaagttggattcctaggtattttattctctttgaagcaattgtgaatgggagttcactcatgatttggctttctgtttgtctgttactggtgtaaaagaatgcttgtgatttttgcacatcgattttgtatcctgagactttgctgaagttgcttatcagcttaaggagattttgggctgagatgatggggttttctagatagacaatcatgttgtctgcaaacagggacaatttgacttcctcttttcctaattgaataccctttatttccttctcctgcctgattgccctggccagaacttccaacactatgttgaataggagtcgtgagagagggcatccctgtcttgtgcctgttttcaaagggaatgcttccagtttttgcccattcagtatgatattggctgtgggttgtcatagatagctcttattattttgagatacgtcccatcaacacctaatttatagagagtttttggcatgaagggctgctgaattttgtcaaaggccttttctgcatctattgagataatcatgtggtttttgtctttggttctgtttatgttggattacatttattgatttgtgtatgttgaaccagccttgcatcccagggatgaagcccacttgatcatagtggataagctttttgacgtgctgctggatttggtttgccagtattttattgaggatttttgcatcgatgttcatcaaggatattggtctaaaattctctttttttggttgtgtctctgccaggctttggtatcaggatgatgctggcctcataaaaagagttagggaggataccctctttttctactgattggaatagtttcagaaggaatggtaccagctcctccttgtacctacctctggtagaatttggctgtgaatccatctggtcctggactttttttggttagtaagctattgattattgcctcaatttcagagcctgttattggtctattcagagattcaacttcttcctggtttagtcttgggaggatgtatgtgtcaaggaatttatccgtttcttctagattttctagtttatttgcgtagaggtgtttatagtatctctgatggtagtttgtatttctgtgggatcggtggtgatatcccctttatcattttttattgcgcctatttgattcttcttttcttctttactagtcttgctagcggtctgtcaattttgttgatcttttcaaaaaaccaggtcctggattcattaattttttgaagggtttttttggtctctatttcctccagttctgctctgatcttagttatttcttgccttctgctagcttttgaatgtgtttgctcttgcttttctagttcttttaattgtgacgttagggtgtcaattttagatctttcctgctttctcttgtggacatttagtgctataaatttccctgtacacactgctttgaatgtgtcccagagattctggtatgttgtgtctttgttctccttggtttcaaggaacatctttatttctgccttcatttcattatttacccagtagtcattcaggagcaggttgttcagtttccatgtagttgagtgtttttgagtgagtctcttaatcctgagtcctagtttgattgcactgtggtctgagagacagtttgttataatttctgttcttttacatttgttgaggagtgctttacttccaactatgtagtcaattttggagtaggtgtggtgtggtgctgcaaagaatgtatattctgttgatttggggtggagagttctgtagatgtctattaggtccacttggtgcagagctgagttcaattcctgggtatccttgttaactttctgtgtcattgatctgtctaatgttgacagtgaggtgttaaagtctcccattattattgtgtgggagtctaagtcactttgtaggtcactaaggacttgctttatgaatctgggtgctcctgtattgggtgcatatatatttaggatagttaactcttcttgttgaattgatccctttaccattatgtaatggccttctttgtctcttttgatctttgttggtttaaagtttgttttatcagagactaggattgcaacccctgcctttttttgttttccatttgcttggtagatcttcctccatccctttattttgagcctatgtatgtctctgcacgtgagatgggtttcctgaatacagcacactgatgggtcttgactctttatccaatttgccagtctgtgtcttttaattggagcatttagcccatttacatttaaagttaatattgttatgtgtgaatttgatcctgtcattatgatgttagatggttattttgcttgttagttgatgcagtttcttcctagccttgatggtctttacaatttggcatgtttttgcagtggctggtaccggttgttcctttccatgtttagtgcttccttcaggagctcttttagggcaggcctggtggtgacaaaatctctcagcatttacttgtctgtaaagtattttatttctccttcacttatgaagcttagtttggctggatatgatattctgggttgaaaattcttttctttaagaatgttgaatattggcccccactctcttctggcttgtagaatttctgccaagagatccgctgttagtctgatgggcttccctttgtgggtaacccgacctttctctctggctgcccttaacattttttccttcatttcaactttggtgaatctgacaattatgtgtcttggagttgctctctcgaggagtatctttgtcgcgtcctctgtatttcctgaatttgaatgttggcctgccttgctagattggggaagttttcctatatcctgcagagtgttttccaacttggttccattctccccgtcactttcacgtacaccaatcagatgtagatttggtcttttcacatagtcccatatttcttggaggttttgttcacttctttttattctttttgctctaaacttctcttctcgcttcacttcattcatttcgtcttccatcactgataccctttctgccagttgatcacatcggctactgaggcttctgcattcgtcacgtagctctcgtgccttggttttcagctccatcaggtcctttaaggacttctctgcattggttattctagttatccattcatctaattttttttcaaagcttttaacttctttgccattggtttgaacttcctcctgtagctcagagtagtttgatcatctgaagccttcttctctcaactcgtcagtcattctttgtccagctttgttccgttgctggtgaggagctgcgttcctttggaggaggagaggcactctgatttttagagtttccagtttttctgctgtttttttcccatctttgtggttttatctacctttggactttgatgatggtgacgtacagatgggtttttggtgtggatgtcctttctgtttgctagttttccttctaacagacaggaccctcagctgcaggtctgttggagtttgctggaggtccactccagaccctgtttgcctgggtatcagcagcagtggctgcagaacagcggatattggtgaaccgcagatgctgctgcctgatcgttcttctggaagttttgtctcagaggagtacctggccatgtgaggtgtcagtccacccctactggggggtgcctcccagttaggctactcgggggtcagggacccacttgaggaggcagtctgcccgttctcagatctcaagctgcatgctgggagaaccactactctcttcaaagctgtcagagagggacatttaagtctgcagaggttactgctgtcttt

SEQ ID NO: 10635 - DNA, 7380 bp, Homo sapiens
tttttgtattttaagtagagacagggtttcaccatgttatccaggctggtctcaaactcctgacctcgtgatccacccacctcggcctcccaaagtgctgggattacaggcgtgagccaccgcgcccggccagacacagttttcttcatgtgaggtagaaataacacatgcctttaaggactgcagaatgatgagtggtgatgttcttgaactcttccaatactccacatatatacattatttctatccctggaaaatttgcattaatgaaataaagcattcttagtataataagtctgagcagatgagaatttaagtgaaggttctatacacacctgatgcacgacaggcagacccccaaattgaggcttagcccgagagggttcttagcttcacccacgaaacaatttcaaaggcaagccagtggtgttaaacaacgacttttattgaagcagtagcctacagcagccgcagaggtactgcttcttgcagagcagggctaccccctaggcagcgtgcccagcttaggtagcttagagggagttctgcagtcatacttagacccacttttaattatatgcaaattaaggggcaacttatgcagaaatttctaggatgaaggttgtaacttccgggttgtccaggttgttgccgtgaaaaagggcagtaatttatgggtattgccatggcaatgataaaccaagatggcacattggtgggagtgtcttatgcggaggtgtttccaccctgacctgtttgagctagtccatcatttggtcaggtatccaagcccgacccccaaagcctagtcctgcctcctaccacacacccagaaatatggatttattcccatgtccggtgcaaatgtaggaaaagcattattttcttattataagggaggtattatgaagaccaaccaacttaaagagtttctgtgttggaaattgagagacctcatttccttctgtgtttaccccacaaatgcccgcaggggctctgaagttttgtagcagcaacctcatcttacatccttgtcattacaagtaaacagtgccacacaattaataactaataatagttacaagaaatatcacttattgaaggtctccagtctattaagtattttataattattaacatattgatggatgctatattttgttttcaagttagtttgagtttcttttcagctttactgacatataattgacagttaaaatttgtatatattcaacatgtaccacaagatgatttgatatatgtatacattgtggaatgtttaccacaatctaaataattagcacatctattgccacacatagttaccattgtgtgtgtgtgtgggtgtgtgtgtgtgtatggtgaggacactaagattttctctcttggcaaatttcaagtaaccagtgctgtattattaactatagtcaccatgttgtacattcgatctgaagggtactacattgttatggttaagagtgtagtcccgcatgttgtcaccataagtgggagctgaacaatgataacacatggacacagggaggggagcatcacacacccacacaccggggcctgtttgggagtgaggggctggggtagggatagcgttaggagaaatacctaatgtaaatgatgagttgatgggtgtagcaaactaacatggcacatgtatacctatgtaacaaacttgcatattgtgcacatgtaccttagaacttaaagtataataatagtaaaagaaaacagtatagtttctcaagctcaataattctgggttggaatctcacttccattatgtcttaattgagtgacttctggtccattgtttatgcttcatattcctcatgattttttttctgtaaaaaaatactaatgaattattgtctgatatatagaatatttgttgaatgaacacctgcttaggcgagatggtaaatgtgatgtttagcactgtgttacatatatcattactctgttaattcttgcagtaatttaactggtcagtaacaataataataataataataataataaacagtttaataaaatgcttaggatgtcctaagcactttgtatatataattcatttaatctatactacactattttatatagatattatcttccaagtttttttttcagaggacattgaggatcagcaagattgagtactttgcttaacccgtgaactcaggtcagaattactccaaacataatttttaactacaaaatgtctatcattctacctctgaatttgttgttgtttttaacttccatacatctgatttgaaattcctttatatatttggggaccttttcactttatgagtcttgttgagggacagtgcctttctcccactgtttaaactgaaaataccagacacatttacatgtaaacaatgtgaaggaaagttgactctctttatttttttttttagaagtaaagtttaaagtctttttattttattttattattattatgctttaagttttagggtacatgtgcacaatgtgcaggttagtcacatatgtatacatgtgccatgctggtgtgctgcacccattaacttgtcatttagcattaggtatatctcctaatgctatccctccccccttcccccaccccacaacagtccacagagtgtgatgttccccttcctgtgtccatgtgttctcattgttcaattcccacctatgagtgagaatatgcagtgcttggttttttgttcttgcgatagtttactgagaatgatgatttccaatttcatccatgtccctacaaaggacatgaactcatcattttttatggctgcatagtattccatggtgtatatatgccacattttcttaatccagtctatcattgctggacatttgggttggttccaagtctttgctattgtgaagagtgctgcaataaacatacgtgtgcatgtgtttttatagcagcaggatttatagtcctttgggtatataccccgtactgggatggctgggtcaaatggtatttctagttctagatccttgaggaatggccacactgtcttccacaatggttgaactaatttatacttgcgccaacaatgtaaaagcattcctatttctccacatcctctccagcacctgttgtttcctgactttttaatgattgccattctaactggtgtgagatagtatctcattgtggttttggtttgcatttctcttatggccagtgatggtgagcattttttcatgtgttttttggctgcataaatgtcttctgttgagaagtgtctgttcatgtcccttgcccacttttggatggggttgtttgtttttttcttgtaaatttgttggagttcattgtagattctggatattagccctttgtcagatgagtaggttgcgaaaattttctcccattttgtaggttgcctgttcactctgatggtagtttcttttgctgtgcagaagctctttagtttaattagatcccatttgtcaattttgtcttttgttgccattgcttttggtgttttagacatgaagtccttgcccatgcctatgacctgaatggtaatgcttaggttttcttctagggtttttatggttttatgtctaacgtttaagtctttaatccatcttgaattaatttttgtataaggtgtaaggaagggatccagtttcagctttctacatatggctggccagttttcccagcaccatttattaaatagggaatcctttccccattgcttgtttttctcaggtttgtcaaagatcagatagctatagatatgcagcgttatttctgagggctctgttctgttccattgatctatatctctgttttggtaccagtaccatgctgttttggttactgtagccttgtagtatagtttgaagtcaggtagcatgatgcctccagctttgttcttttggcttaggattgacttggcgatgcgggctgttttttggttccatatgaactttaaagtagttttttccaattctgtgaagaaaatcattggtagcttgatggggatggcattgaatctataaattaccttgggcagtacggccattttcatgatattgattcttcctacccatgagcatggaatgttcttctatttgtttgtatcctctttatttcattgagcagtggtttgtagttctccttgaagaggtccttcacatcccttgtaagttggattcctaggtattttattctctttgaagcaattgtgaatgggagttcactcatgatttggctctctgtttgtctgttatttgtgtataagaatgcttgtgatttttgtacattgattttgtatcctgagactttgctgaagttgcttgtcagcttaaggagattttgggctgagacaatggggttttctagatatacaatcatgtcacctgcaaacagggacaatttgacttcctcttttcctaattgaatgccctttatttccttctcctgcctgattgacctggccagaacttccaacactatattgaataggagtgatgagagagggcatccctttcttgtgccagttttcaaagggaatgcttccagttttcgtccattcagtatgatattggctgtgggtttgtcatagatagctcttattattttgagatacatcccatcaatacctaatttattgagagtttttagcatgaagcgttgttgaattttgtcaaaggccttttctgcatctattgagataatcatgtggtttttgtctttggttctgtttatatgctggattacatttattgatttgcatatattgaaccagccttgcatcccagggatgaagcccacttaatcatcgtggataacctttttgatgtgctgctggatttggtttgccagtattttattgaggatttttgcatcaatgttcatcaaggatattggtctaaaattctcttttttggttgtgtctctgcctggctttggtatcagaatgatgctggcctcagcaaatgagttagggaggattccctctttttctattgattggaatagtttcagaaggaatggtaccagttcctccttgtacttctggtagaattcggctgtgaatccatctggtcctggactctttttggttggtaagctattaattattgccacaatttcagagcctgttattggtttattcagagattcaacttcttcctggtttagtcttgggagggtgtacgtgtcgaggaatttatccatttcttctagattttctagtttatttgcgtagaggtgtttgtagtattctctgatggtagtttgtatttctgtgggatcagtggtgatatcccctttatcattttttattgcgtctatttgattcttctctcttttttctttattagtcttggtagcggtctatcaattttgttgatcctttcaaaaaaccagctcctagattcattaattttttgaagggttttttgtgtctctatttccttcagttctgctctgattttagttattccttgccttctgctagcttttgaatgtgtttgctcttgcttttctagttcttgtaattgtgatgttagggtgtcaattttggatctttcgtgctttctcttgagggcatttaatgctataaatttctctctacacactgctttgaatgtgtcccagagattctggtatgttgtgtctttgttctcgttggtttcaaagatcatctttatttctgtcttcattccgttatgtagccagtagtcatttagtagcaggttgttcagtttgcatgtagttgagcggttttgagtgagtttcttaatcctgagttctagtttgattgcactgtggtctgagagacagtttgttgtaatttctgatcttttacatttgctgaggagagctttacttccaagtatgtggtcaattttggaataggtgtggtgtggtgctgaaaaaaatgtatattctgttgatttggggtggagagttctgtagatgtctattaggtctgcttggtgtagagctgagttcaattcctgggtatccttgttaaatttctgtctcgttgatctgtctaatgttgacagtggggtgttaaagtctcccattattattgtgtgggagtctaagtgtctttgtaggtcactcaggacttgctttatgaacctgggtgctcctgtattgggtgtatatatatttaggatagttagctcttcttattgaattgatccctttaccattatgtaatggccttctttgtgtcttttgatctttgttggtttaaagtctgttttatcagaggctaggattgcaacccctgccattttttgttttccatttgcttggtagatcttcctccatccttttattttgagcctatatgtgtctctgcacgtgagatgggtttcctgaatacagcacactgatgggtcttgactctttatccaatttgccagtctgtgtcttttaattggagcatttagtccatttacatttaaagttaatattgttatgtgtgaatttgatcctgtcattatgatattagctggttattttgctcattagttgatgcagtttcttcctggcctcgatggtctttacaatttggcatgattttgcagtggctggtaccggttgttgctttccgcgtttagtgcttccttcaggagctcttttagagcaggcctggtggtaacaaaatctctcagcatttgcttgtctgtaaagtattttatttctccttcacttatgaggcttagtttggctggatatgaaaatctgggttgaaaattcttttctttaggaatgttgaatattggcccccactctcttctggcttgtagagtttctgccgagagatccactgttagtctgatgggcttccctttgtgggtaacccgacctttctctctggctgcccttaacattttttccttcatttcaactttggcaaatctgacaattatgtgtgttggagttgctcttctcgaggagtatctttgtggcgttctctgtatttcctgaatctgaatgttggcctgccttgctagattggggaagttctcctttataatatcctgcagagtgttttccaacttggttctattctccccgtcactttcaggtaggccaatcagacatagatttggtcttttcacatagtcccatatttcttggatgctttgttcatttctttttattcttttttctgtaaacttcccttctcgcttcatttcattcatttcatcttccatcactgataccctttcttccagttggttgcatcggctcctgaggcttctgcattcttcacgtagttctcgagccttggctttcagctccatcagctcctttaagcacttctctgtattggttattctagttatacattcgtctaaatttttttc

SEQ ID NO: 10636 - DNA, 4928 bp, Homo sapiens
ttatttattttttataattatactttaagttctagggtacatatgcatagcgtgcaggtttgttgcatatgtatacatgtgccatgctggtgtgctgcactagttaactcatcatttacattaggtatatctcctaatgctatccctcccccgtacccccaccccaagacaggccccagtgtgtgatatttcccaccctgtgtccaagtgttctcattgttcaattcccaccaagaatgagaacatgacgtgtttgattttctgtccttgcaatagtttgctcagaatgatggtttccagcttcatccatgtccctacaaaggacatgaactcatcattttttatggctgcatagtattccatggtgtatatgtgccatattttcttaatccagtctatcattgatggacatttgggttggttccaagtctttgctagtgtgaatagtgccgcaataaacatacgtttgcatgtgtctttatagcagcatgatttataatcctttgggtatatacccagtaatgggatggctgggtcaaatggtatttctagttctagattgttgaggaatcaacacactgtcttccataatggttgaactagtttacagtcccaccaacagtgtaaaagtgttcctatttctccacatcctctccagcacctgttgtttcctgactttttaatgattgccattctaactggtgtgagatggtatctcattgtggttttgatttgcatttctctgatggccagtgatgatgagcattttttcatgtgtctgttggctggataaatgtcttcttttgagaagtgtctgttcatatccttcatccactttttgatggggttgtttgatttttttcttgtaaatttgtttaagttctttgtagattctggatattagccctttgtcagatgggtggattgcaaaaattttctcccattctgtaggttgcctgttcactctgatggtagtttcttctgccatgcagaagctcttgagttgaattagatcccatttgtcaattttggcttttgttgccattgcttttggtgttttagtcatgaagtcctttcccgtgcctatgtcctgaatggtactgcctaggttttcttctagggtttttattgttttaggtctaacatttaagtctttaatccatcttgaattaatttttgtataaggtgtaaggaagggatccagtttcagctttctacatatggctagccagttttcccagcaccatttattaaatagggaatcctttccccatttcttatttttgtcaggttcgccaaagatcagatggttgtagatgtatggtgttatttctgagggctctgttctgttccattgatctacatctctgttttggcaccagtaccatgctgttttggttactgtagccttgaggtacagtttgacgtcagggagtaatgcctccggctttgttcttttggcttaggattgtcttggcaatacgggctcttttttggttccatataaactttaaagtagtttttccaattctgtgaagaaagtcattggtagcttgatggggatggcattgtgtctataattaccttgggcagtattgccattttcatgatattgattcttcctatccatcagcatggaatgttcttccatttgtttgtgtcctcctttatttcgttaggcagtggtttgtagttctccttgaagaggtccttcccatctcttgtaagttggattcctaggtattttattctctttgaagcaattgtgaatgggagttcactcatgatttggctctctgtttgtctgttattggtgtataggaatgcttgtgatttttgtacattgattttgtatcttgagactttgctgaaggtgcttatcagcttaaggagattttgggctgagacaatggggttttctaaatatacaatcatatcatctgcaaacagggacaatttgacttcctcttttcctaattgaatatcctttatttatttctcctgactgattgccctggccagaacttccaacactatgttgaataggagtggtgagagagggcatccctgtcttctgccagttttcaaagggaatgctcccagtttttgcccattcagtatgatattggctgtgggtttgtcataaatagctcttgttattttgagatacatcccatcaatacctaatttattgagagtttttagcatgaagggctgttgaactttgttgaaggccttttctgcatctattgagataatcatgtggtttttgtctttggttctgtttatacgatggattacatttattgatttgcatatgttgaaccagccttgcatcctaggaatgaagctcacttgatcacggtggataagctttttgatgtgctgatggatttgggttgcagtattttattgaggatttttgcattgatgttcatcagggatattggtctaaaattctctttttttttgttgtatctctgccaggctttggtatcaggatggtgctggcctcataaaatgagttagggaggattccctctttttctattgattggaatattttcagaaggaatggtaccagctcctccttgtacctctggtagaattctgctgtgaatccgtctggtcctggactttttttggttggtagtctattaattattgcctcaatttcagagcctgttattgatctattcagggattcaacttcttcctggtttagtcttgggagggtgtatgtgtccacgaatttatccatttcttctagattttcaagtttatttgcatagaggtgtttatagtattctctgatggtagtttgtatttctatgggattggtggtgatatcccctttatcattttttattgcatctatttgattgttctctcttttcttctttattagtcttgctagtggtctatcaattttgtagatcttttcaaaaaaaccagctccaggattcattgatttttttgaaggggtttttttgtgtctctgtcttcttcagttctgctctgatcttagttattccttgctttctgctagcttttgtgttttctcttgcttctctagttcttttaattgtgatgttagggtgtcaattttagatctttcctgctttctcttgtgggcatttagtgctataattttccctctacacactgctttaaatgtgtcccagagattctggtatgttgtgtgtttgttctcattggtttcaaagaacatctttatttctgccttcatttcgttatgtacccagtagtcattctggagcaggttgttcagtttccatgtagttcagcggttttgagtgagtttctcaatcctgagttctagtttgattgtactgtggtctgagagacagtttgttataatttctgttcttttacatttgctgaggagagctttacttccaactatgtggtcaattttggaataagggcgatgtggtgctgagaagaatgtatattctgttgatttggggtggagagttctgtagatgtcccttaggtccacttggtacagagctgagttcaattcctggatagcctttttaattttctgtctcattgatctgtctaatgttgacagtggggtgttaaagtctcccatgattactgtgtgggagtctaagtctctttgtaggtgtctaaggacttgctttatgaatctgggtgctcctgtattgggtgcatatatatttaggatagttagctcttcttgttgaattgatccctttactattatgtaatggccttctttgtctcttttgatctttgttggtttaaagtctgttttatcagagactaggattgcaacctctgctttttttgctttccatttgcttggtagatcttcctccatccctttattttgagcctatgtgtgtgtctctgcacgtgggctgggtctcctgaatacagcacactgatgggtcttgactctttatccaatttgccagtctgtgtcttttaattggagcatttagcccatttacatttaaggttgatattgttatgtgtgaatttgatcctgtcattatgatgtgagctggttattttgctcattagttgatgcagtttcttcctagcctggatggtctttacaatttggcatggttttgcagtggctggaactcgtttttcctttccatgtttagtgcttccttcaggagctcttgtaaggcaggcctggtggcgacaaaatctctcagcatttgcttgtctgtaaaggcttttatttctccttcacttatgagcttagtttggctggatgtgaaattctgggttgaaaattctttctttaagaatgttgaatattggcccccactctcttctggcttgtagagtttctgtcgagagagccgctgttagtctgatgggcttgccattgtggtttacctgacgtttctctctggctgcctttaacatttttcccttcatttcaactttggtgaatctgacaactatgtgtcttggagttgttcttctcgaggagtatctttgtggcgttcactgtatttcctgaatttgaatgttggcctgccttgctaggttggggaaattctcctggttaatatcctgaagagtgttttccaacttggttccattctccccgtcactttcaggtacaccaatcagatgtagatttggtcttttcacatagtcccatatttcttggagactttgttcatttctttttactcttttttctctaaacttctcttcttgcttcatttcattcatttgatattcaatcactgataccctttcttccacttgattgaattggttactgaagcttgtgcatgtgtcacatattgctcttgccatggttttcagctccatcaggtcatttaaggtcttctctacactgtttattctggtcagccattcatctaatcttttttcaaggtttttag

SEQ ID NO: 10637 - DNA, 6129 bp, Homo sapiens
ttttttctttttttttttttttattatactttaagttttagggtacatgtgcacattgtgcaggttagttacatatgtatacatgtgccgtgctggtgcgctgcacccattaactcgtcatctagcattaggtatatctcccaatgctatccctcccccctccccccaccccacaacagtccccagagtgtgatgttccccttcctgtgtccatgtgatctcattgttcaattcccacctatgagtgacaatatgcggtgtttggttttttgttcttgcgatagtttactgagaatgatgatttccaatttcatccatgtccctacaaaggacgtgaactcatcattttttatggctgcatagtattccatggtgtatatgtgccacattttcttaatccagtctatcattgttggacatttgggttggttccaagtctttgctattgtgaataatgccgcaataaacatacatgtgcatgtgtctttatagcagcatgattcatagtcatttgggtatatacccagtaatgggatggctgggtcaaatggtatttctagttctagatccctgaggaatcgccacactgacttccacaatggttgaactagtttacagtcccaccaacagtgtaaaagtgttcctgtttctccacatcctctccagcacccgttgtttcctgactttttaatgattgccattctaactggtgtgagatggtatctcatagtggttttgatttgcatttctctgatggccagtgatgatgagcattttttcatgtgttttttggctgcataaatgtcttcttttgagaagtgtctgttcatgtcctttgcccactttttgatggggttgtttgtttttttcttgtaaatttgttggagttcattgtagattctggatattagccctttgtcagatgagtgggttgcgaaaattttctcccattttgtaggttgcctgttcactctgatggtagtttcttttgctgtgcagaagctctttagtttaattagatcccatttgtcaattttggcttttgttgccattgcttttggtgttttggacatgaagtccttgcccatgcctatgtcctgaatggtaatgcctaggttttcttctagggtttttatggttttaggtctaacgtttaaatctttaatccatcttgaattgatttttgtataaggtgtaaggaagggatccagtttcagctttctacatatggctagccagttttcccagcaccatttattaaatagggaatcctttccccattgcttgtttttctcaggtttgtcaaagatcagatagttgtaggtatgtggcgttatttctgagggctctgttctgttccattgatctatatctctgttttggtaccagtaccatgctgttttggttactgtagccttgtagtatagtttgaagtcaggtagtgtgatgcctccagctttgttcttttggcttaggattgacttggcgacgcgggctcttttttggttccataatgaactttaaagtagttttttccaattctgtgaagaaagtcattggtagcttgatggagatggcattgaatctgtaaattaccttgggcagtatggccattttcacgatattgattcttcctacccatgagcatggaatgttcttccatttgtttgtatcctcttttatttctttgagcagtggtttgtagttctccttgaagaggtccttcacatcccttgtaagttggattcctaggtattttattctctttgaagcaattgtgaatgggagttcactcatgatttggctctctgtttgtctgttgttggtgtataagaatgcttgtgatttttgcacattgattttgtatcctgagactttgctgaagttgcttatcagcttaaggagattttgggctgagacaatggggttttctagatatacaatcatgttgtctgcaaacagggacaatttgacttcctcttttcctaattgaataccctttatttccttctcctgcctaattgccctggccagaacttccaacactatgttgaataggagtggtgagagagggcatccctgtcttgtgccagttttcaaagggaatgcttccagtttttgcccattcagtatgatattggctgtgggtttgtcatagatagctcttatcattttgaaatacgtcccatcaatacctaatttattgagagtttttagcatgaagggttgttgaattttgtcaaaggctttttctgcatctattgagataatcatgtggtttttgtcttttgctctgtttatatgctggattacatttattgatttgcgtatatggaaccagccttgcatcccagggatgaagcccacttgatcatagtggataagctttttgatgtgctgctggattcggtttgccagtattttattgaggatttttgcatcaatgttcatcaaggatattggtctaaaattctcttttttggttgtgtctctgcccggctttggtatcagaatgatgctggcctcataaaatgagttagggaggattccctctttttctattgattggaatagtttcagaaggaatggtaccagttcctccttgtacctctggtagaattcggctgtgaatccatctggtcctggactctttttggttggtaaactattgattattgccacaatttcagctcctgttattggtctattcagagatgcaacttcttcctggtttagtcttgggagagtgtatgtgtcgaggaatttatccatttcttctagattttccagtttatttgcgtagaggtgtttgtagtattctctgatggtagtttgtatttctgtgggatcggtggtgatatcccctttatcattttttattgtgtctatttgattcttctctctttttttctttattagtcttgctagcggtctatcaattttgttgatcctttcaaaaaaccagctcctggattcattgatttttttgaatggttttttgtgtctctatttccttcagttctgctctgattttagttatttcttgccttctgctagcttttgaatgtgtttgctcttgcttttctagttcttttaattgtgatgttagggtgtcaattttggatctttcctgctttctcttgtgggcatttagtgctataaatttccctctacacactgctttgaatgcatcccagagattctggtatgtcatgtctttgttctcgttggtttcaaagaacatcttcatttctgccttcattttgttatgtacccaatagtcattcaggagcaggttgttcagtttccatgtagttgagcggctttgagtgagattcttaatcctgagttctagtttgattgcactgtggtctgagagatagtttgttataatttctgttcttttacatttgctgaggagagctttacttccaactgtgtggtcaattttggaacaggtgtggtgtggtgctgaaaaaaatgtatattctgttgatttggggtggagagttctgtagatgtctattaggtccgcttggtgcagagctgaattcaattcctgggtatccttgttgactttgtgtctcgttgatctgtctaatgttgacagtggggtgttaaagtctcccattattaatgtgtgggagtctaagtctctttgtaggtcactcaggacttgctttatgaagctgggtgctcctgtattgggtgcatatatatttaggatagttagcccttcttgttgaattgatccctttaccattatgtaatggccttctttgtctcttttgatctttgttggtttaaagtctgttttatcagagactaggattgcaacccctgcctttttttgttttccatttgcttggtagatcttcctccatccttttattttgagcctatgtgtgtctctgcacgtgagatgggtttcctgaatacagcacactgatgggtcttgactctttatccaatttgccagtctgtgtcttttaattggagcatttcgtccatttacatttaaagttaatattgttatgtgtgaatttgatcctgtcattatgatgttagctggtgattttgctcgttagttgacgcagtttcttcctagtctcgatggtctttacattttggcatgatttttcagcagctggtactggttgttcctttccatgtttagcgcttccttcaggagctcttttagggcaggcctggtggtgacaaaatctctcagcatttgcttgtctgtaaagtatttaatttctccttcacttatgaagcttagtttggctggatatgaaattctgggttgaaaattcttttctttaagaatgttgaatattggcccccactctcttctggcttgtagggtttctgccgagagatccgctgttagtctgatgggcttccctttgagggtaacccgacctttctctctggctgcccttaacattttttccttcctttcaactttggtaaatctgacaattatgtgtcttggagttgctcttctcgaggagtatctttgtggcgttctctgtatttcctgaatctgaacgttggcctgccttgctagattggggaagttctcctggataatatcctgcagagtgttttccaacttggttccattctcctcattactttcaggtacaccaatcagacgcagatttggtcttttcacatagtcccatatttcttggaggctttgctcatttctttttaatcttttttctctaaacttcccttctcacttcatttcattcatttcatcttcccttgctgataccctttcttccagttgattgcatcggctcctgaggcttctgcattcttcacgtagttctcgagccttggttttcagctccatcagctcctttaagcacttctctgtattggttattctagttatacattcttctaaattttcttcaaagttttcaacttctttgcctttggtttgaatgtcctcccatagctcagagtaattggatcgtctgaagccttcttctctcagctcgtcaaagtcattctccatccagctttgttccattgctggtgaggaactgcgttcctttggaggacgagaggcgctctgcgttttagagtttccagtttttctgttctgttttttccccatctttgtggttttatctacttttggtctttgatgatggtgatgtacagatgggttttcggtgtggatgtcctttctgtttgttagttttccttctaacagacaggaccctcaactgcaggtctgttgaaataccctgccttgtgaggtgtcagtgtgcccctgctgggaggtgcctcccagttaggctgctcgggggtcaggggtcagggacccacttgaggaggcagtctgccggttctcagatctccagctgcgtgctgggagaaccactgctctcttcaaagctgtcagacagggtcatttaagtctgcagaggttactgctgtctttttgtttgtctgtgccctgcccccagaggtggagcctacagtggcaggcaggcctccttgaactgtggtgggctccacccagttcgagcttcccggctgctttgtttacctaagcaagcctgggcaatggcgggcgcccctcccccagactcgctgccgccttgcagtttgatctcagactgctgtgctagcaatcagcgagattccgtgggcgtaggaccctccgagccaggtgtgggatatagtctcgtggtgcgccgttttttaagccggtctgaaaagcgcaatattcgggtgggagtgccccgattttccaggtgcgtccgtcacccctttctttgactcggaaagggaactccctgaccccttgcgcttcccaggtgaggcaatgcctcgccctgcttcggctcgcgcagggtgcgcgcacacactggcctgcgcccactgtctggcactccctagtgagatgaacccggtacctcagatggaaatgcagaaatcacccgtcttctgcgtcgctcacgctgggagctgtagaccggagctgtagaccagagctgttcctattcggccatcttggctcctcccaaatctccttttttcttatcttaatggggaaaattgcattttatatattaaacaataacatgtgtcttagataaa

SEQ ID NO: 10638 - DNA, 5391 bp, Homo sapiens
tttttttttcttttttttaaattttattattattatacttttagggtacatgtgcacaatgtgcagatttgttacatatgtatacatgtgccatgttggtatgctgcacccattaactcgtcatttagcattaggtatatctcctaatgctatccctccccccgccccccaccccataacagtccccggagtgtgatgttccccttcctgtgtccatatgttctcattgttcaattcccacacctatgagtgagaacatgtggtgtttggttttttgtctttgcgatagtttgctgagaatgatggtttccagtttcatccatgtccctacaaaggacatgaactcttcattttttatggctgcagtattccatggtgtatatgtgccacattttcttaatccagtctatcgttattggacatttgggttggttccaagtctttgctgttgtgaatagtgccgcaataaatatatgtgtgcatctgtctttatagcagcatgatttataatcctttgggtatatacccagtaatgggatggctgggtcaaatggtatttctagttctagatccctgaggaatctccacactgacttccacaatggttgaactagtttacagtcccaccaacagtgtcaaagtgttcctatttctccacatcctctccagcacctgttgtttcctgactttttaatgatcgccattctaactggtgtgagatggtatctcattgtggttttgatttgcatttctctgatggccagtgatgatgagcattttctcatgtgttttttggctgcataaatgtcttcttttgacaggtgtctgttcacatccttcgcccactttttgatggggttggtttttttttcttgtaaatttgtttgagttcattgtagattctggatattagccctttgtcagatgagtaggttgcaaaaattttctcccattttgtaggttgcctgttcactctgatggtagtttcttttgctgtgcagaggctctttagtttaattagatcccatttgccaattttggcttttgttgccattgcttttgctgttttagacatgaagtccttccccatgcctatgtcatgaatgatattgcctaggttttcttctagggtttttatggttttaggtctaacatttaagtctttaatccatcttgaattaatttttgtataaggtgtaaggaagggatccagtttcagctttctacatatggctagccagttttccaagcaccatttgttaaatagggaatccttttcccattgcttgtttttgtcaggtttgtcaaatatcagatggttgtagatatgcggcattatttctgagggctctgttctgttccattgatctatatctctgttttggtaccagtaccatgctgttttggttactgtggccttgtagtgtagtttgaagtcaggtagcgtgatgcctccggctttgttcttttggcttaggattgacttggcgatgcgggctctttttggttccatatgaactttaaagtagttctttccaattctgtgaagaaagtcattggtagcttgatggggatggcactgaatctataaattaccttgggcagtatggccattttcacaatattgattcttcctacccgtgagcatggaatgttcttccatttctttgtatcctctttaatttcattgagcagtggtttgtagttctccttgaagaggtccttcacatcccttgtaagttggattcctaggtattttattctctttgaagcaattgtgaatgggggcgttcactcatgatttggctctctggttgtctgttattggtgtgtaagaatgcttgtgatttttgtacattgattttgtatcctgagactttgctgaagttgcttatcagcttaaggatatttggggctgagacaatggggttttctagatatacaaccttgtcatctgcaaaccaggacaatttgacttcctcttttcccaattgaataccctttatttccttctcctgcctaattgccctggccagaacttccaacactatgttgaataggagtggtgagagagggcatccctgtcttgtgccagttttcaaagggaatgcttccagtttttgcccattcagtatgatattggctgtgggtttgtcttagatagctcttattattttgagatacgtcccatcaatacctaatttattgagaggttttagcacgaaggttgctgaattttgtcaaaggccttttctgcatctattgagataatcatgtggtttttgtctttggttctgtttatatgctggattacatttattgatttgcgtatgttgaaccagccttgcattccagggatgaagcccacttgatcatggtggataagctttttgatgtgctgctggattcgctttgcaagtattttattgagcatttttgcatcaatgttcatcaaggatattggtctaaaattctctttttttgttgttgtatctctgcccggctttggtatcaggatgatgctggccttatcaaatgagttagggaggattccctctttttctattgattggagtagtttcagaaggaatggtaccagttcctccttgtacctctggtagaattcggctgtgaatccatctggtcgttgactttttttgttagtaagctattgattattgccacaatttcagagcctgttattgttctattcagagattcaacttcttcctggtttagtcttgggagggtgtatgtgtccaggaatttatccatttcttctagattttctagtttatttgcgtagaggtgtttgtagtattctctgatggtagtttgtatttctgtgggatcggtggtgacatcccctttatcattttttactgtgtctatctgattcttctctcttttcttctttattagtcttgctagcggtctatcaattttgttgatcttttcaaaaaaacagctcctggattcattaatttttgaagggttttttgtgtctctatttccttcagttctgccctgatgttagttatatcttgccttctgctagcttttgaatgtgtttgctcttgcttttctagttcttttaattgtgatgttagggtgtcaattttggatctttcctgctttctcttgtgggcatttggtgctataaatttccctctacacactgctttgaatgtgtcccagagattctggtatgttgtgtctttgttctcgttggtttcaaagaacatctttatttctgccttcattttgttatgtacccagtagtcattcaggagcaggttgttcagtttccacgtagttgagcggttttgagtgagtttcttaatcctgagttctagtttgattgcactgtggtctgagagacagtttgttataatttctgttcttttacatttgctgaggagtgctttacttccaaccatgtggtcaattttggaataggtttggtgtggtgctgaaaaaaatgtatattctgttgatttggggtggagagttctgtagatgtctattaggtccgcttggtgcagagctgagttgaattcctggatatccttgttaactttctgtctcgttgatctgtctaatgttgacagtggggtgttaaagtctcccattattattgtgtgggagtctaagtctctttgtaggtcactcaggacttgctttatgaatctgggtgctcctgtattgggtgcatatatatttaggatagttagctcttcttgttgaattgatcccttcaccactatgtaatggtcttctttgtctcttttgatttttgttggtttaaagtctgttttatcagagactaggattgcaacccctgccttcttttgttttccgtttgcttggtagatattcctccatccctttattttgagcctatgtgtgcctctgcacgtgagatgggtttcctgtatacagcacactgatgtgtcttgactctttatccaattttccagtttgtgtcttttaattggaggatttagcccatttacatttaaggttaatattgttatgtgtgaatttgatcctgtcattatgatgttagctggttattttgctcggtagttgatgcagtttcttcctagccttgatggtctttacattttggcgtgtttttgcagtggctggtaccggttgttcctatccatgtttagtgcttccttgaggagctcttttagggcaggcctggtggtgacaaaatctctcagcatttgcttgtctgtaaagtattttatttctccttcacttatgaagcttagtttggctggatatgaaattctaggttgaaaattgttttctttatgaatgttgaatgttggcccccactctcttctggcttgtagagtttctgcagagagatctgctgtaagtctgatggacttccctttgtgggtaacctgatctttctctctggctgcccttaacattttttccttcatttcaactttggtgaatctgacagttatgtgtcttggagttgctcttctcgaggagtatctttgtagcattctctgtatttcttgaatctgaatgttggcctgccttgctaggttggggaagttctcctggataatatcctgcagagtgttttccaacttggttccattctccccgtcactttcaggtacaccaatcaaatgtagatttggtcttttcacatagtcccatatttcttggagtctttgttcatttctttttattattctttctctaaacttcccttcttgcttcatttcattcatttagtcttccatcactgataccctttcttccagctgatcgcatcggctcctgaggcttctacattcttcacgtagttctcaagccttggctttcagctccatcagctcctttaaggacttctctgcattggttattctagttatccaatcatctaattttttttcaatgtttttaacttctttgccattggtttgaatttcctcctgtagcttggagtagtttgatcgtctgaagccttcttctctcaacttgtcattctccatccagctttgttccattgctggtgaggagctgcattccttcggaggaggagaggcactgtgctttttagagtttccagtttttcttctctgttttttccccatctttgtggttttatctacttttggtctttgatgatggtgatgtacagatgggtttttggtgtggatgtcctttctgtttgttagttttccttctaccagacaggaccctcagctgcaggtctgttggagtttgctagaggtccactccagaccctgtttgcctgggtatcagcagtggtggctgcagaacagcggtggttgtagaacagcggatattggtgaaccgcaaatgctgctgcctgatcattcctctggaagt

SEQ ID NO: 10639 - DNA, 20704 bp, Homo sapiens
gtttttttttattatactttaagttttagggtacatgtgcacaacgtgcaggtttgttacatatgtatacatgtgccatgttggtgtgctgcacccttaaatcgtcatttacattaggtatatctcctaatgctatccctcccccctcccccaaccccacaacaggccccggggtgtgatgttccccttcctgtgtccaagtgttctcattgttcagttcccacctatgagtaagaacatgcagtgtttggttttttgtccttgcgatagtttgctgagaatgatggtttccagcttcatccatgtccctacaaaggacatgaactcatcattttttatggctgcatggtattccatggtgtataagtttttttttttttaattttttttttttattatactctaagttttagggtacatgtgcacattgtgcaggttagttacatatgtatacatgtgccatgctggtgcgctgcacccactaacgtgtcatctagcattaggtatatctcccaatgctatccctcccccctcccccgaccccaccacagtccccagagtgtgatattcgccttcctgtgtccatgtgatctcattgttcaattcccacctatgagtgagaatatgcggtgtttggttttttgttcttgcgatagtttactgagaatgatggtttccaatttcatccatgtccctacaaaggacatgaactcatcattttttatggctgcatagtattccatggtgtatatgtgccacattttcttaatccagtctatcattgttggacatttgggttggttccaagtctttgctattgtgaatagtgccgcaataaacatacgtgtgcatgtgtctttatagcagcatgatttatagtcctttgggtatatacccagtaatgggatggctgggtcaaatggtatttctagttctacatccctgaggaatcgccacactgacttccacaatggttgaactagtttacagtcccaccaacagtgtaaaagtgttcctatttctccacatcctctccagcacctgttgtttcctgactttttaatgattgccattctaactggtgtgagatgatatctcatagtggttttgatttgcatttctctgatggccagtgatgatgagcatttcttcatgtgttttttggctgcataaatgtcttcttttgagaagtgtctgttcatgtccttcgcccactttttgatggggttgtttgtttttttcttgtaaatttgtttgagttcattgtagattctggatattagccctttgtcagatgagtaggttgcgaaaattttctcccatgttgtaggttgcctgttcactctgatggtagtttcttttgctgtgcagaagctcttgagtttaattagatcccatttgtcaattttggcttttgttgccattgcttttggtgttttggacatgaagtccttgcccacacctatgtcctgagtggtaatgcctaggttttcttctagggtatttatggttttaggtctaacgtttaaatctttaatccatcttgaattgatttttgtataaggtgtaaggaagggatccagtttcagctttctacatatggctagccagttttcccagcaccatttattaaatagggaatcctttccccattgcttgtttttctcaggtttgtcaaagatcagatagttgtagatatgcggcattatttctgagggctctgttctgttccattgatctatatctctgttttggtaccagtaccatgctgttttggttactgtagccttgtagtatagtttgaagtcaggtagtgtgatgcctccagctttgttcttttggcttaggattgacttggcgatgcgggctcttttttggttccatatgaactttagagtagttttttccaattctgtgaagaaagtcattggtagcttgatggggatggcattgaatctgtaaattaccttgggcagtatggccattttcacgatattgattcttcccacccatgagcatggaatgttcttccatttgtttgtgtcctcttttatttccttgagcagtggtttgtagttctccttgaagaggtccttcacatcccttgtaagttggattcctaggtattttattctctttgaagcaattgtgaatgggagttcactcatgatttggctctctgtttgtctgttgttgttgtataagaatgcttgtgatttttgtacattgattttgtatcctgagactttgctgaagttgcttatcagcttaaggagattttgggctgagacgatggggttttctagataaacaatcatgtcgtctgcaaacagggacaatttgacttcctcttttcctaattgaataccctttatttccttctcctgcctgattgccctggccagaacttccaacactatgttgaatagtagcggtgagagagggcatccctgtcttgtgccagttttcaaagggaatgcttccagtttttgcccattcagtatgatattggctgtgggtttgtcatagatagctcttattattttgaaatacatcccatcaatacctaatttattgagagtttttagcatgaagggttgttgaattttgtcaaaggctttttctgcatctattgagataatcatgtggtttttgtgtttggctctgtttatatgctggattacatttattgatttgcgtatattgaaccagccttgcatcccagggatgaagcacacttgatcatggtggataagctttttgatgtgctgctggattcggtttgccagtattttattgaggatttttgcatcaatgttcatcaaggatattggtctaaaattctcttttttggttgtgtctctgcccggctttggtatcagaatgatgctggcctcataaaatgagttagggaggattccctctttttctattgattggaatagtttcagaaggaatggtaccagttcctccttgtacctctggtagaattcggctgtgaatccatctggtcctggactctttttggttggtaaactattgattattgccacaatttcagagcctgttattggtctattcagagattcaacttcttcctggtttagtcttgggagagtgtatgtgtcgaggaatgtatccatttcttctagattttctagtttatttgcgtagaggtgtttgtagtattctctgatggtagtttgtatttctgtgggatcggtggtgatatcccctttatcattttttattgtgtctatttgattcttctctctttttttctttattagtcttgctagcggtctatcaattttgttgatcctttcaaaaaaccagctcctggattcattgattttttgaagggttttttgtgtctctatttccttcagttctgctctgattttagttatttcttgccttctgctagcttttgaatgtgtttgctcttgcttttctagttcttttaattgtgatgttagggtgtcaattttggatctttcctgctttctcttgtaggcatttagtgctataaatttccctctacacactgctttgaatgcgtcccagagattctggtatgtggtgtctttgttctcgttggtttcaaagaacacctttatttctgccttcatttcgttatgtacccagtagtcattcaggagcaggttgttcagtttccatgtagttgagcagctttgagtgagattcttaatcctgagttctagtttgattgcactgtggtctgagagatagtttgttataatttctgttcttttacatttgctgaggagagctttacttccaactatgtggtcaattttggaataggtgtggtgtggtgctgaaaaaaatgtatattctgttgatttggggtggagagttctgtagatgtctattaggtctgcttggtgcagagctgagttcaattcctgcgtatccttgttgactttctgtctcgttgatctgtctaatgttgacagtggggtgttaaagtctcccattattaatgtgtgggagtctaagtctctttgtaggtcactcaggacttgctttatgaatctgggtgctcctgtattgggtgcataaatatttaggatagttagctcctcttgttgaattgatccctttaccattatgtaatgtccttctttgtctcttttgatctttgttggtttaaagtctgttttatcagagactaggattgcaacccctgcctttttttgttttccatttgcttggtagatcttcctccatccttttattttgagcctatgtgtgtctctgcacgtgagatgggtttcctgaatacagcacactgctgggtcttgactctttatccaacttgccagtctgtgtcttttaattgcagaatttagtccatttatatttaaagttaatattgttatgtgtgaatttgatcctgtcattatgatgttagctggtgattttgctcattagttgatgcagtttcttcctagtctcgatggtctttacattttggcatgattttgcagcggctggtacccgttgttcctttccatgtttagcgcttccttcaggagctcttttagggcaggcctggtggtgacaaaatctctcagcatttgcttgtctataaagtattttatttctccttcacttatgaagcttagtttggctggatatgaaattctgggttgaaaattcttttctttaagaacgttgaatattggcccccactctcttctggcttgtaaggtttctgccgagagatccgctgttagtctgatgggctttcctttgagggtaacccgaccattctctctggctgcccttaacattttttccttcatttcaactttggtgaatctgacaattatgtgtcttggagttgctcttctcgaggagtatctttgtggcgttctctgtatttcctgaatctgaacgttggcctgccttgctagattggggaagttctcctggataatatcctgcagagtgttttccaacttggttccattctccccatcactttcaggtacaccaatcagacgtagatgtggtcttttcacatagtcccatatttcttggaggctttgctcatttctttttattcttttttctctaaacttcccttctcgcttcatttcattcatttcatcttccattgctgataccctttcttccagttgatcgcatcggctcctgaggcttctgcattcttcacgtagttctcgagccttggtgttcagctccatcagctcctttaagcacttctctgtattggttattctagttatacattcttctaaatttttttcaaagttttcaacttctttgcctttggtttgaatgtcctcccgtagctcagagtaatttgatcgtctgaagccttcttctctcagctcgtcaaaatcattctccatccagctttgttccgttgctggtgaggaactgcgttcctttggaggaggagaggcgctctgtgtttttgagtttccagtttttctgttctgtttttccccatctttgtggttttatctacttttggtctttgatgatggtgatgtacagatgggttttcggtgtggatgtcctttctgtttgttagttttccttctaacagacaggaccctcagctgcaggtctgttggaataccctgccgtgtgaggtgtcagtgtgcccctgctggggggtgcctcccagttaggctgctcgggggtcaggggtcagggacccacttgaggaggcagtctgcccgttctcagatctccagctgtgtgctgggagaaccactgctctcttcaaagctgtcagacagggacacttaagtctgcagaggttactgctgtctttttgtttgtctgtgccctgcccccagaggtggagcctacagaggcaggcaggcctccttgagctgtggtgggctccacccagttcgagcttcctggctgctttgtttacctaagcaagcctgggcaatggcgggcgcccctcccccagcctcgttgccgccttgcagtttgatctcagactgctgtgctagcaatcagcgagactccgtgggcgtaggaccctccgagccaggtgtgggatatagtctcgtggtgcgccgtttcttaagctggtctgaaaagcgcaatattcgggtgggagtgacccgattttccaggtgcttccgtcacccctttctttgactcggaaagggaactccctgaccccttgcgcttcccaggtgaggcaatgcctcgccctgcttcggctcgcgcacggtgcgcgcacacactggcctgcgcccactgtctagcactccctagtgagatgaacccggtacctcagatggaaatgcagaaatcacccgtcttctgcgtcgctcacgctgggagctgtagaccggagctgttcctattcggccatcttggctcctagtatttttaattaaggtatgtacattgctttcttggacatattgctattgcacatctaattgatgacaatatagtgtaaacataacttttgtgtgcactgggaaaccaaaaaatgtttgtgacttactttattgtggtggtatgaaaccaaaaccacaatatttccaaggcatgccagtacaactttaaaaagttagcaaaatatcctacctttttttatggacatcataaatcagagtaatattttgttgacctgttgaaagaagcctctcatctggccttccataattattctgtctctagttttgttttcttctttatttggctaactatataattaggacagcattctctggaattgccaatcttagtttgattatgtgacctttgagccatgtttactgggttttggagaagactgtcatctgtacttagagatttgaacctcatctctaaatgaatgttacatgcaattaattttcaatagaatgaatctgcagctaggatgaaagccagttcctttgcttgttttcagaatgaatgtctttctgaatctgatactagagaaatttaatcagagaaacttcaagatgttcaatctcatttattgtctcccaattcatttagtgaacaagatattgatattagtagacacttcaataaaattcagttgtgtttatgtctgttttaacattaatggtgctacttaattttgtataatatgtatttacttatttaaaatgatctgaatttcaacatgtaggcaatgttgggactcctaattgtaaattaggcaaatgcgtttgtaataatgggcatttattacttttaatgataaaatctactgtaaatatttactgagcaactactatgcacaagacagtgggtttcagtgagaggactgacacatggttaaatggagttaactgagtacttgccctttgacccattagattttacagggatattagcagtgaaagatgaattgtatgctcatcagcatgccctaaatggtagaaaatgtctatttgttagatagagatgagggagagaaatgactacatccttgcactgaagtgttgtttgatgacttaccctcatttcctatagtaggaatgggagtgttgatatagttcagtttactcttgaagttctaggtacacagatattatttcctgagaatgtgctgctatgtaagagaggcaaggctgttagtggaaagagtcagacagagctgatttcaagttgtgacccatggtcacttacaccctcaacctcagtttcccagcccagggtataaagtgcatgcatttcatggaatgatagctccagcccttccttccataagacacttctcagatagggagggccgggggagggcagcagtggggaaggagatcttgggagaggaggagtctgagaggccttgcttgggtcagttgccctcccttgttgaaagtgggagaggatcccgtgattgacagttccaacatggcaagcaatagcagagggagagggaggcgctaaagagaggaagaagggatatcagggcagcagaggaccaatgcttgtgagcataaatgtgcttctcaaactgaagaaggagcaattactcttgtcccccatatcctttgcatattaatacttttaaaagatatataaaatacaaatctattttaaattgttaattacatatccaattgctgtaaaactctctcgaagtttgctctccttctctgtgctgatcttgtcacagatgacactcgcagaggtttcactaggctcctctctcacttgctgagaaaaatccctccacatgcacctctaggatccttctacttcttaccttacagtctgttctcagtcctcttttcatttggtgtcaccgtcaccatgctgtgcaaacttcaaggtcctcctttaaaaaattcaatcacaccttatcaggagatctcatcctcaagttcttccaaagcatttcccattccttcatgaccctctgaactcagccacatccttcacaatgccacagttcccctgttcttctgcaaagcctggcacttctttttctttctctaggttaaccttctaatggaggtactttcctaagattctggcctagctgtcaggctcagtacacttcaaaaaggtgaacttcagtgtctgaagtggagttaggggattttcatgaagattgcattttcttcctgtatgagaatgggctaattgtaagatcactgtatgtgtatatttcgaatagtgtctgggagaaggtagcaaatggaatacttgttgaacatagaccatactagccaatttgctaagagaagaaaggcaatcatcacttacatgcaaaatgaagagatgagcaacttctttatttttattcttctcactctatctcccttccttgcaactggagcttaggcaggcaggaggtgaggagctgtagaatgaggaagtcaatagatacatttcttttccagtgacgggtaccttaacttctctgaccctctccgtcctcttcaggtacatgaggttaggcaccatgatctgggaagtcacttccaactcaaaaattctgtaattttttttccattgcctctaatcgtgttgtgtaacctattgatgttctttttcccagggtcttggttatttgttaatcccatatttttgtttgtttgtttgttcttttctagcacttgtgttctgattagtggccaaataaatgacagtcagaacttcagctaaggtacaataaggtaagatcctttttctagttgagctatttccttgaaaagggggattgatggcccaatctgtgagaacagattaacaaggaataagaatgtataagttggtgttttcaacatgatgtacaattgttaccattagtcatgctcaattttttgtgtcttaataaagctaagtgtgttcattttctcatcagtttaaaaatagaaataaagggatgttgattgagatttgaaataagttaactttatttcaaatgcacatttgtatttaactgtagcaatgtggaattttttgaaatattgcaaaatgtttgaattattagtacatatataggatcttatagcttgtctaattcttagaagcttaagaattatccctggatttagattgcccttcttcagaatgctgtacaaaatatgattgtgaacataaacagaaacattgtggaaaagctcaatctttcttagatgttatccttaataatgttttatctatccagcaaacactgctaacatcttaccctaaatccaatccccctgtattagtcccttctcatacagctataaaaacactacctgagactgggtaatttataaacaaaagaagtttaattgtctcacagttctacatggccgggaaggcctcaggaaacttataatcatgacagaaggcgaaggggaagcaagccatgtcttttttgtttgtttttgagacggagtctcgctctgtcacccaggctggagtgcagtggcgccatctcagctcactgcaagctccgcctcccgggttcacaccattctcctgcctcagcctcccgagtagctgggactacaagcgctgccaccatgcctggctaattttttgtattttcagtagagatggggtttcaccgtgttagccaggatggtctcgatctcctgacctcatgatctgcccacctcagcctcccagagtgctgggattacaggcgtgagccaccgcacccagctaggcatgacttacatagcggcaggagagcggggagagggtgcggaggaaactgccacttttaaaaccatcagatctcaagagaactccctcactatcatgataacagcatgggggaaaccaccttcatgatccaatcacctcccacaaggcccctccctcaacagatagagattacggttcgagatgatatttgggtggggacacagagccaaaccttatcactaccctcttcgttcctaacaaaatcttgctgttgtaaggacagcaaagtgcccagctaaaaaatattctcatcttcccagactcttttttctgtggccatgtgacccagctacagccaatgagctctcagtcatggtccctggggagagactttcaagaggagattcctcttagaatgtttttctttgttcttatcccatcattctatcaggaagtcacacccctcccccacccaccccttcttgcaatcacagcaacaaaagccgaactggggatactggagcaggaagataaaatgagcttgagctctggcaagcccatcatcagatttcttgttgcatgagacacatacagtccctaatttagaagagcttattaggttttctgacactcagagccaaatgtagacttagctgattcagtaacattcatatctggatatcatgctggacacattaccctatcttacttaaacactgcagcagtgctattaagtcgagtatttttatttccattttatgtatgaggaaacaggctctgagatgttaagaactttgtcctgtgaactttgtcctatggtagtaagtggcacaggtgagattcgaacttggacctgtcagatgctgatccctgtacacagctgcctcgatgctggtcctgacagcctggttccaggagcctgtgctattgctgattacattttatagttagtcaggggacattgtcagctcagtaaccctttgaatacaatactcttcaatagcacagactttctattatattttgcatttgtaaaactaagtgaactgagtctattcctgtataacagaaacgagagagagagagaaaggaataaagatagagagcaaaagcaagaacaaacgaaagaaagaaagaaagaaagaaagaaaggaaagaaagaagaaaagaaaagagaaaaaaaagaacagaaaagaaaaagagaaaaacagatctgatttgggaaaatcagtttatattggaattgcctatgaaagctggtaaaggaaatattaattctgagcatcttcttttctttttttttttgaaataaaagtttagaactaatggtcaaaatatggtcaccaaaactcagcttttacccaacaatcatagaattaagtattctccgcctaacaatcttcattaattcactcttgttgacttggttcagaaaaaaaaatacaggttaaaaactaagtcatataatgaaatttctttccgaagaaagttatacaaggcattgagtaaggcacggagctgacttgggggatgggggagctggataatggaaaaatcttttggctggaaaataagagactggaaatgcaggggatagcctagcaatttttggcattataaaaagccatttcacctctctggacctttgctgcttatttgtaaattgaaggtataagttattctgatatgctgttagtacaaaataatagcttacctccttgggtctccattgctaatgcagggaaatactctgatatctattcaaagctacagtttttatttctggccattgaaactaagagtgaccagttattttccttttccttctatttcttccaaatacatcctgaatcccttgtctcttttgttatgactctactccaagtcatcatcttgtcttgcctggacaatggcattagcttcatgttagtcaacatggctttcattcttaccatacaaaattacattctgtcacagccagcgtctgctttgggaaacctccatcagatcttgttattctcctatttgagaccttctcaaaatccttcaactccctcccctacatttagaatcaaatccaaatgcattaacatgacttataaatctgatatgatctggtttctacttgtacttttctctcttgcttcctacactccaagcctccctgtctttatttattgaatatttctctttgttctttgccctcaggggcctggcactgatcccctggctcttgtttactacttgacccttccagtcaaatctcaactgccaagacctctcctaaccgctctctaaataaccactgtcctggacacccaggtttaattccctttaaagactggaagttttatttcttaaggcatacgaaaataaccacttatggacaaaatacttacatatgtaacttaagggacttaggtaagacatgacgaattctgtcgcacctgtttatattttgtcgtttatctcccattataatatcatctaagccccatgagggcagggccttgtctgtttccttcactgccaaaaccaccatacttataatgatgcctgccccctgcaagaggcttagtaaatgtttgttgagtaaatgaatatagagtcagaaaatgccctacgttaaatatcttaaaagaaattaagcaattcttatagatgtccccaacgtgtcttttgcttagatgggaagaaaaagaaaaagaaaacagagaaaaagatgaagaaacaatctaggaagaagaacagaaggacagacagtggtataaatagaaaatagtggtaaatccttgggtgggactgtttcagggatctttactcagtggcatttctgatctataatattgggcgacagggctccgttctttggatcttacatagatttattggctaaacctggcgcatgcacaatgagaaatgtttgttgaatgaaggcccgaaagaatgaaataataaattattgaactgcaaagagcaaaattttccctgtttttatgggcatgataatattcccttgatgccagtatttaatccatgttagtaacaaacattccagataacaatgactgtgaaaaatatcccgtgaaacaaaagtcagtcactgtgccaggcatttcccttagcacatttcagagtttattctgtcttcaagggaattgtcacagtgactatccagaatggcacagggtgttaatgtattaaaaatactgacaggaaaatgaaaactagaaaaacgtcttatctgtcaattaaatgatatagcctcgtggttacattacagcaattctggggctttatctttgctgccgattgagatttgacagctgtttgtaaaatatttacattctgatttctgtcacattgacagcacttttgggtctttggaagatgataattatatgtttggaaaatgttaaaaaaatggaagctgatctgttgaggagaaaaatctgtttttaaaattgtgcaaaggaagggcacccactttattaatgaatgtgcgtctaataaaagtcagaagcagtagattcttgtgatccaaaaacatgctacatgtaatgtgcagtagtatccctcccaaccctgcctgctttgggtacctcagcttttcttcatcagctgtgtgtgtggctggccacatacttgttatgcttttccactttattatgcacataaaatggcaatatttggatggcacattggataggattttggagtatctatatgaaattttgtgaaagaagttcagtttgtatcctcggtattaaaggaagagaaaataaaaagtattgggaggaatagtaagtattgaatttatatagaacttccaaataaagtcttttcaaagattttaatgagaagtatacatttatatatacatttatattatcaggtatacagaaatgatgacctgtaattcttgatcaatggtcttatcaaagtcttttgtttggttttgtaaatttattttctgctctaacatgttactacatcactaaatattctttttaaacaccattatgtttatatgcgtagaaaatgtgcataatattctatagcatacataaatattcctgatcatttccagtatttcacgttaaaaattttaatattgatgaagatcattgttaataactttctacacatatcactgaatatcttccttagaatatagtcccagaaatgaaattccttgatcaaatggtacacaaatttttaaggcttttgatatttactgtatggttttcctttcatcaaagtcttttttttttttttttttttttttggtgaaatgctcttttattacttgctaacagcatttgttattaccaagagtagtgagtctgaaagcctttgctcttcactcgtcccaaggtcaaccccacacaacaccgtggggttgccaaatcccatcatagcagcacctgactgctcctgtgagcttcacatttttcttttttttttttttggggaatttgtatttctttgtgaattttcttttttttaatttaattttattattattatactttaagttttagggtacatgtgcacaatgtggttagttacatatgtatacatgtgccatgctggtgtgctgcacccattaactcgtcatttagcattaggtatatctcctatgctatccctcccccctccccccaccccacaacagtccccagagtgtgatgttccccttcctgtgtccacgtgttctcattgttcaattcccacctatgagtgagaacgtgcagtgtttggttttttgttcttgcaatagtttactgagaatgatgatttccaatttcatccatgtccctacaaaggacatgaactcaccattttttatggctgcatagtattccatggtgtatatgtgccacattttcttaatccagtctatcattgttggacatttgggttggttccaagtctttgctattgtgaatagtgccgcaataaacatacgtgtgcatgtgtctttatagcagcatgatttatagtcctttgggtatatacccagtaatgggatggctgggtcaaatggtatttctagttctacatccctgaggaatcgccacactgacttccacaatggttgaactagtttacagtcccaccagcagtgtaaaattgttcctgtttctccacatcctctccagcacctgttgtttcctgactttttaatgattgccattctaactggtgtgagatgttatctcattgtggttttgatttgcatttctctgatggccagtgatgatgagcattttttcatgtgttttttggctgcatgaatgtcttcttttgagaagtgtctgttcatgtccttcgcccactttttgatggggttgtttggttttttcttgtaaattggtttgagttcactgtagattctggatattagccctttgtcagatgagtaggttgcgaaaattttctcccattttgtaggttgctggttcactctgatggtagtttcttttgctgtgcagaagctcgttagtttaattagatcccatttgtcaattttggcttttgttgccattgcttttggtgttttagacatgaagtccttgcccatgtctatgtcctgaatggtaatgcctaggttttcttctagggtttttatggttttaggtctaacatttaagtctttaatccatcttgaattaattttcatataaggtataaggaagggatccagtttcagctttctacatatggctagccagttttcccagcaccatttattaaatagggaatcctttccccattgcttgtttttctcaggtttgtcaaagatcagatagttgtagatatgcggcattatttctgagggctctgttctgttccattgatctatatctctgttttggtaccagtaccatgctgttttggttactgtagccttgtagtatagtttgaagtcaggtagtatgatgcctccagctttgttcttttggcttaggattgacttggtgatgtaggctctattttggttccatatgaactttaaagtagttttttccaattctgtgaagaaagtcattggtagcttgatagggatggcattgaatctataaattaccttggacagtatggccatttttacgatattgattcttcctacccatgagcatggaatgttcttccatttctttgtatcctcttttatttcattgagcagtggtttgtagttcttcttgaagaggtccttcacatccctagtaagttggattcttggtattttattgtctttgaatcaattgtgaataggagttcactcatgatttggctctctgtttgtctgttattggtgtataagaatgcttgtgatttttgtacattgattttgtatcctgagactttgctgaagttgcttatcagcttaaggagattttgggctgagacaatggggttttctagatatacaatcatgttgtctgcaaacagggacaatttgacttcctcttctcctaattgaataccctttatttccttctcctgcctaattgccctggccagaacttccaacactatgttgaataggagtggtgagagagggcatccctgtcttgtgccagttttcaaagggaatgcttccagtttttgcccattcagtatgatattggctgtgggtttgtcatagatagctcttattattttgagatatgtcccatcaatacctaatttattgagattttgtagcatgaagggttgttgaattttgtcaaaggccttttctgcatctattgagataatcatgtggtttttgtctttggtttctgtttatatgctggattaccttgattgatttgcatatattgaaccagccttgcatcccagggatgaagcccacttgatcatggtggataagctttttgatgtgctgctggattcggtttgccagtattttattgaggatttttgcatcaatgttcatcaaggatattggtctaaaattctcttttttggtagtgtctctgcccggctttggtatcaggatgatgctggcatcataaaatgagttagggaggattctctctttttctattgattggaatagtttcagaaggaatggtaccagttcctccttttacctctagtagaattcggctgtgaatccatctggtcctggactctttttggttggtaagctattgattattgccacaatttcagatcctgttattggtctattcagagattcaacttcttcgtggtttagtcttgggagggtgtatgtgtcgaggaatttatccatttcttgtagattttctagtttatttgtgtagaggtgtttgtagtattctctgatggtagtttgtatttctgtgggatcagtggtgatatcccctttatcattttttattgtgtctatttgatccttctctctttttttctttattagtcttgctagcagtctatcaattttgttgatcctttcaaaaaaccagctcctggattcattaattttttgaagggctttttgtgtctctatttccttcagttctgctctgattttagttatttcttgccttctgctagcttttgaatgtgtttgctcttgcttttctagttcttttaattgtgatgttagggtgtcaattttggatctttcctgctttctcttgtgggcatttagtgctataaatttccctctacacactgctttgaatgtgtcccagagattctggtatgttgtgtctttgttctcattggtttcaaagaacatctttatttctgccttcatttcgttatgtacccagtagtcattcaggagcaggttgttcagtttaatgtaggtgagcggttttgcgtgagtttcttaatcctgacttctagtttgattgcactgtggtctgagagacagtttgttataatttctgttcttttacatttgctgaggagtgctttacttccaactatgtggtcaattttggaatcggtgtggtgcggtgctgaaaaaaatgtatattctgttgatttggggtggagagttctgtagatgtctattaggtccgcttggtgcagagctgagttcaattcctggatatccttgttaactttctgtctcattgatctgtctaatgttgacagtggggtgttaaagtctcccattattattgtgtgggagtctaagtctctttgtaggtcactcaggacttgctttatgaatctgggtgctcctgtattgggtgcatatatatttaggatagttagctcttcttgttgaattgatccctttaccattatgtaatggccttctttgtctcttttgatctttgttggtttaaagtctgttttatcagaggctaggattgcaacccctgcctttttttgttttccatttgcttggtagatcttcctccatccttttattttgagcctatgtgtgtctctgcacgtgagatgggtttcctgaatacagcacactgctgggtcttgactctttatccaatttgccagtctgtgtcttttaattggagcatttagtccatttatatttaaagttaatattgttatgtgtgaatttgatcctgtcattatgatgttagctggttattttgctcgttagttgatgcagtttcttcctagtcttgatggtctttacaatttggcgtgattttgcagtggctggtaccggttgttcctttccgtgtttagtgcttccttcaggagctcttttagggcaggcctggtggtgacaaaatctctcagcatttgcttgtctgtaaagaattttatttctcctccacttatgaagcttagtttggctggatatgaaattctgggttgaaaattcttttctttaagaatgttgaatattggcccccactctcttctggcttgtagagtttctgccgagagaccctctgttagtctgatgggcttccctttgtgggtaacccgacctttctctctggctgcccttaacattttttccttcatttcaactttggtgaatctgacaattatgtgtcttggagttgctcttctcgaggagtatctttgtggcattctctgtatttcctgaatttgaatgttggcctgccttgctagattggggaagttctcctggataatatccggcagagtgttttccaacttggttccattctccccgtcactttcaggtacaccaatcagatgtagatttggtcttttgacatagtcccatatttcttggaggctttgttcgtttctttatattcttttttatctaaacttcccttctcgcttcatttcattcatttcatcttccatcactgatacctcttcttccagttgatcgcatcggctcctgaggcttctgcattcttcacatagttctcgagccttggctttcagctccatcagctcctttaagcacttctctgtattggttattctagttatacattcttctaaatttttttcaaagtttttaacttctttgcctttggtttgaatttcctcctgtagctcggagtactttgatcatctgaagccttcttctctcaactcgtcaaagtcattctccatccagctttgttccattgctggtgaggagctgcgttcctttggaggaggagaggcgctctgtttttagagtttccagtttttctgctctgttttttccccatctttgtggttttatctacttttggtctttgatgatggtgatgtacagatgggtttttggtgtggatgtcctttctgttttttagttttctttctaacagacaggaccctcagctgcaggtctgttggagtttgctagaggtccactccagaccctgtttgcctgggtatcagcagcagtgtctgcagaacagtggatgttcgtgatccgcgaatcctgctgtctgatcgttcctctggaagttttgtctcagaggagtacctggcagtgtgaggtgtcagtctgcccctactggggggtgcctcccagttaggctgcttgggggtcaagggtcagggacccactggaggaggcagtctgcccattctcagatctccagctgcatgctgggagaaccactgctctcttcaaagctgtcagacagggacatttaagtctgcagtggttactgctatctttttatttgtctgtgccctgcccccagaggtggagcctacagaggcaggcaggcctccttgagctgtggtgggctccacccagttcgagcttcccagctgctttgtttacctaagcaagcctgggcaatggtgggcgcccctcccccagccgcgctgccgccttgcagtttgatctcagactgctgtgctagtaatcagcgagactccgtgggcgtaggaccctccgagccaggtgcgggatataatctcctgctgtgcccttttttaaacccgtcggaaaagtgcagtattcgggtgggagtgacccgattttccagatgccgtctgtcacccctttctttgactagaaaagggaactccctgactccttgcgcttcccaagtgaggcaatgcctcaacctgctttggctcatgcacggtgcgctgcacccactgtcctgcgcccactgtctggcactccctagtgagatgaacccgg

SEQ ID NO: 10640 - DNA, 6178 bp, Homo sapiens
tgattttttttatttttttattttattttattattattatactttaagttttagggtacatgtgcacaatgtgcagcttagttacatatgtatacatgtgccatgctggtgtgctgcacccattaacttgtcatttagcattaggtatatctcctaatgctatccctccaccctcccccccccacaacagtccccagagtgtgatgttccccttcctgtgtccatgtgttctcattgttcaattcccacctatgagtgacaacatgtggtgtttggttttttgtccttgcgatagtttactgagaatgatgatttccagtttcatccatgtccctacaaaggacatgaactcatcattttttatgactgcatagtattccatggtgtatatgtgccacattttgttaatccagtctatcattgttggacatctgggttggttccaagtctttgctattgtgaatagtgccacaataaacatacatgtgcatgtgtctttaaagcagcatgatttatagttctttcggtatatacccagtaatgggatagctgggtcaaatggtatttctagttctagatccctgtggaatcaccacactgacttccacaatggttgaactagtttacagtcccaccaacagtgtaaaagtgttcctatttctccatatcctctccagcacctgttgtttcctgactttttaatgattgccattctaactggtgtgagatcgtatctcattgtggttttgatttgcatttctctgatggccagtgatggtgagcattttttcatgtgttttttggctgcataaatgtcttcttttgagaagtgtctgttcatgtccttcgcccactttttgatggggttgtttgttttttttctcgtaaatttgtttgagttcattgtagattctggatattagccctttgtcagatgagtaggttgcgaaaattttctcccattttgtaggttgcctgttcactctgatggtagtttcttttgctgtgcagaagctctttagtttaatgagatcccatttgtcaattttggcttttgttgccattgcttttggtgttttagacatgaagtccttgcccacgcctatgtcctgaatggtaatgcctaggttttcttctagggtttttatggttttaggtctaacgtttaagtctgtaatccatcttgaattaatttttgtataaggtgtaaggaagggatccagtttcagctttctacatatggctagtcagttttcccagcgccatttattaaatagggaatcctttccccattgcttgtttttctcatgtttgtcaaagatcagatagttgtagatacacagcattatttctgaaggctctgttctgttccattgatctatatctctgttttggtaccagtaccttgctgttttggttactgtagccttgtagtatagtttgaagtcaggtagcgtgatgcctccagctttgttcttttggcttaggattgacttggcgatgcaggctcttttttggttccatatgaactttaaagtagttttttccaattctgtgaagaaagtcattggtagcttgatggggatggcattgaatctataaattaccttgggcagtatggccatgttcacgatattcattcttcctacccatgagcatggaatgttctttcatttctttgtatcctcttttatttcattgagcagtggtttgtagttctccttgaagaggcccttcacgtcccttgtaagttggattcctaggtattttattctctttgaagcaattgtaaatgggagttcactcatgatttggctctctgtttgtctgttattggtgtataagaatgcttgtgatttttgtacattgattttgtatcctgagactttgctgaagttgcttatcagcttaaggggatttttggctgagacaatgggattttctagatatacagtcatgtcatctgcaaacagggacaatttgacttcctcttttcctaattgaataccctttatttccttctcctgcctaattgccctggccagaacttccaacactatgttgaaaaggagtggtgagagagggcatccctgtcttgtgccagttttcaaagggaatgcttccagtttttgcccattcagtatgatattggttgtgggtttgtcatagatatctcttattattttgagatacgtcccatcaatacctaatttattgagagtttttggcatgaagggttgttgaattttctcaaaggccttttctgcatctattgagataatcatgtgatttttgtctttggctctgtttatatgctggattacatttatttatttgcgtattttgaaccaaccttgcatcccagggatgaagcccacttgatcatggtggataagctttttgatgtgctgctggattccatttgccagtgttttattgaggatttttgcatcaatgttcatcaaggatattggtctaaaattctcttttttggttgtgtctctgcccagctttggtatcaggatgatgctggcctcataaaatgagttagggaggattccctctttttctattgattggaatagtttcagaaggaatggtaccagttcctccttgtaccgctggtagaattcggctgtgaatccatctggtcctggactctttttggttggtaagctattgattattgccacaatttcagagcctgttattggtctattcagagattcaacttcttcctgctttagtcttgggagagtgtatgtgtcgaggaatttatccatttcttctaggttttctagtttatttgcgtagaggtgtttgtagtattctctgatggtagtttgtatttctgtaggatcagtggtgatatcccctttatcattttttattgtgtctatttgattcttctctctttttttctttattagtcttgctagcggtctatcaattttgttgatcctttcaaaaaaccagctcctggattcattaattttttgaagggttttttgtgtctctatttccttcagttctgctctgattttagttatttcttgccttctgctagcttttgaatgtgtttgctcttgcttttctagttcttttaattgtgatgttagggtgtcaattttggatctttgctgctttctcttgtgggcatttagtgctataaatttccctctacacactgctttgactgtgtcccagagattctggtatgttgtgtctttgttctcgttggtttcaaagaacatctttatttctgccttcatttcattatgtacccaatagtcattcaggagcaggttgttcagtttccatgtagttgagcggttttgagtgagtttcttaatactgagttctagtttgattgcactgtggtctgagagacagtttgttataatttctgttcttttacatttgccgaggagagctttacttcaaactatgtggtcaattttggaataggtgtggtgtggtgctgaaaaaatgtatattctgttgatttggggtggagagttctgtagatgtctattaggtccgcttggtgcagagctgagttcaattcctgggtatcctttttaattttctgtctcattgatctgtctaatgttgacagtggggtgttaaggtctcccattattattgtgtgggagtctaagtctcttggtaggtcactcaggacttgctttatgaatctgggtgctcctgtattgagtgcatatatatgtaggatagttagctcttgttggtgaattgatccctttaccattatataatggccttcttcgtctcttttgatctttgttggtttaaagtctgttttatcagagactaggattgcaacccctgcctttttttgttttccatttgcttggtagatcttcttccatccttttattttgagcctatgtgtgtctctgcatgtgagatgggtttcctgaatacagcacactgatggttcttgactctttatccaatttgccagtctgtgtcttttaattggagcatttagtccatttacatttaaagttaatattgttatgtgtgaatttgatcctgtcattatgatgttagctggtgattttgctcattagttgatgcagtttcttcctagtgtcgatggtctttacatttttgcatgattttgcagcggctggtaccggttgttcctttccatgtttagtgcttccttcaggagctcttttagggcaggcctggtggtgacaaaatctctcagcatttgcttgtctgtaaagtattttatttctccttcacttatgaagcttagtttggctggatatgaaattctgggttgaaaattcttttctttaagaatgttgaatattggcccccactctcttctggcttgtagagtttctgctgagagatccgctgttagtctgttgggcttccctttgtgggtaacccaacctttctctctggctgcccttaacattttttccttcatttcaactttggtgaatctgacaattatgtgtcttggagttgctcttctcaaggagtatctttgtggcgttctctgtatttcctgaatctgaatgttggcctgccttgctaggttggggaagtgatcctggataatatcctgcagagtgttttccaacttggttccattctccccgtcactttcaggtacaccaatcagatgtagatttggtctgttcacatagtcccatatttcttggaggctttgttcatttctttttattcttttttctctaaacttcccttctcacttcatttcattcatttcatcttccatcctgataccctttcttccagttgatcgcatcagctcctgaggcttctgcattcttcacgtagttctcgagccttgtctttcaggtccatcagctcctttaagcacttctctgtatttggttattctagttatacatttgtctaaatttttttcaaagtttttaacttctttgcctttggtttgaatttcctcctgtagcttggagtagtttgatcgtctgaagccttcttctctcaactcgtcaaagtcattctccatccagctttgttccattgctggtgaggaactgcgttcctttggaggaggagaggcactctgctttttagagtttccagtttttctgctctgttttttccccatctttgtggttttatctacttttggtctttgatgatggtgatgtacagatgggtttttggtgtggatgtcctttctgtttgttagttttccttctaacagacaggaccctcagctgcaggtctgttggagtttgctagaggtccactccagaccctgtttgcctggatatcagcagcggtggctgcagaatagcggattttcgtgaaccgcgaatgctgctgtctgattgttcctctggaagttttgtctcagaggagtacccggccttatgaggtgtcagtctgtccctactggggggtgcctcccagttaggctgctcgggtgtcaggggtcagggacccacttgaggaggcagtctgccagttctcagatctccagctgcgtgctgggagaaccactgctctcttcaaagctgtcagacagggacatttaagtctgcagagcttactgctgtctttttgtttgtctgtgccctgcccccagaggtggagcctacagaggcaggctggcctccttgagctgtggtgggctccacccagttcgagcttcctggctgctttgtttacctaagcaagcctgggcaatggcggccgcccctcccccagcctcgctgttgccttgcagtttaatctcagactgctgtgctagcaatcagtgagactccgtgggcataggatcccccgagccaggtgcgggatataatctcctggtgcaccattttttaagcccgtcggaaaagagcagtattcgggtgggagtaatccgattttccaggtgctgtctgtcacccctttctttgactaggaaagggaactccctgaccccttgcacttcccaagtgaggcaatgcctcgccctgcttcagctcacgcactgtgcgctgcacccactgtcctgcgcccactgtctggcactccctagtgagatgaacccagtacctcagatggaaatgcagaaatcactcgtcttctgtgttgctcgcgctgggagctgtagaccagagctgttcctatttggccatctttgctgccc

SEQ ID NO: 10641 - DNA, 39295 bp, Homo sapiens
  SITE (15686): n equals a,t,g, or c
ttatttattttttttattatactttaagttttagggtacatgtgcacattgtgcaggttagttacatatgtatacatgtgccatgctggtgcgctgcactcactaactcgtcatctagcattaggtatatctcccaatgctatccctcccccctccccccaccccaccacagtccagagtgtgatattccccttcctgtgtccatgtgatctcattgttcaattcccagctatgagtgagaatatgcggtgtttggttttttgttcttgcgataggaaaacagttattttaaattgtcattaagtaatataatgaattatagtacagttttctgtttagcaagggagactgaataatccaggcataaagggaaacttggcccatgtattaggaccatgtgcgtgcagtgtgtgtatgcatgaatgtttcgtgcattaaaattattccagatgagccttaaatagcagtcttttttgttccaccttactctctccgttgagactgctgtacaaatgctgcctgggtggattgggaaatttctaggcagtctgctagcaagaaaggctgcaaaatcaataaataaagagatggcttatactctgtagatagactatgtttgaggaagaagcacaaagggcaactatggctgtctcactttgttgcccaggctggaatgcaatggtgcgatcacaattcactgcagcttgatttcatggggtcaagtgagtgattctacattagcttcctgagtagctgggagtacaggcaagcaccaccatgcttggctattttttaaattttttgtagagacagggactcaatatgttgcccaggcttgtctcgaactcctggccttgaactatctttccaccctggcctcacaaagagctggaattggaagtgtgaggccacctggccaccctaagtaatttggcccttcctcagctatctcactgtgtgcaacttcttggaaagtacgctccagttgccttttttcactgcctccaattcagtggtttcttcttccaattggtccctgggcttttctttgattgaaagttttaaattactgattcagtctccttatttgttattgatctgttcaggctttctatttcttcttgattcaatcttggtagcttgtatgtttctaggaatttactcatttcttctaggttgtccaatgtgttaacatgtaattgttcatattagttccttttaaaaatttctttggcattggttatatctcctatttctgattttatcttattttttcctagtttagttaagggtttgttgattttgattatcttttttaaaaaacttttcagtttgtcgatttttcttttgttttctggtcttcatttatttctgctctagtctttattatttccttctttctgctagttttgggcttatttctttttctagttccttcaggtatgatgttaggttgtttgagatcttttttaatgtagacatttatacacttttttaatgtagacatttatacacttccatttcagcactgcttttgccgcctcccataagttttggcatgttatgtttttgtttgtctcacaatatcttctaatttttaaaatttcttctttgacccaatggttgaatatattgtttagtttccatgtatttgtgaatttttccagttttcttttattgatttctagtttcatttctttgtagtcaaaaaagataattgaaattatttcagtcttcttaaatttgtcagaacttgttttgtgaccttgcatgtaatctatcttggagaatctttcatgtgcagttgagaggaatttttattctgctgccgttaggtagaaggttccgtacatgtctgttagctccatttggcctatagtgttattcaaaaccactgtttctttatttctctaatgtctggatgaactattattgaaagtggggtattgaagtctcctaatacattctactcctatttctcccttcatatttatcaatgtgtgctttatatatataggcgctctgatgttgggtgcatatataattgttacgtcttcctgttgaattgacccttttatcattatgtaatgaccttctttgtctcttgtgacagtttttgacttgaagtctttttgtctaatataagaaaagctgcttacgctctgttttggtgaccatttgcatgatatatcttgtttcatcccttcactttcagcctacgtgtgtccttaaagctaaagtgagtcttttgtagacaccctataattagatcttgctttttaatccattcagctactctgtatctttgattggggaatttaatacatttacatttaaagaaattattgattggtaagaactgactactgccattttgttcattggtttctgttttgtggttcttttgttcctctcttcccctcttgctgtctttgtgatttgataattttttatggttatatactcggattcttttccctttcttgtatctgctgaagattttttctttgtagttactgtgaagcttgcataaccctccttagaattgtaccagtctattttgagctgataacttcaatcacatacaaaaactacacttttactctcccattccccagtttgttattgatgtcagaatttgctttttatgttgtgtatccattaaccaatattttgtggttatattcttaatacttttgtcttttatgctggggttaaaagtgatttatgcaccaccattacaatattacattattctgtatttgtctatgtatttacccttagcagtgagatttatactttcatatgcttttgtgttgctatttagcaagaagctgatttttttattaatacaaattatgtacttttttcaaaataaagaatttgttgtatgtatgtattacacacagatttccaaaccagataacccagtgttggccaatcgcagtaatcaaaactacaaatttaatttcataatttttagctccttgcagctgctgctgtcagacaaccctcagctgggtggtgtcaggattggtagcattttcaaataaaacaagaaatttaacatcaataggtaccagcaagaagtgtttatttcttcatgagggtgttgtgtacttcgggggaataagaccaattttcattttggtagttaaatgggttgcatttgaaacctttgctgtgaggcaccatatttccaatgagtgaagttttagactctttacatttggtaccacaagtaccattaatggggttgtggctgggcagtatagtcaagtgattctctgaaggcagaaataaataagcagatcgtttactttttcagtataactccacttgttaggcttttagcctcttctttcaacataggtttaataaatagggaataatcttaactagccaccactgccaggtggtgctacttccctttctgctgtttcatgatcccaccacactgtgttaatcctcaccagtggttgtcctgtgattggctgctgtattataggctgcggtaagcagaatagtgactcccgaaccacgacccccaaacacgcaaagatgtctacgtcctaatccttggaaactgtaaaaatgtaactttacatggcaaaggggaattaagattccagatagaattcagtttgctaatcagctgatcttaaaacagggagagtatcctgggttatctacatgcacccaatgtaatcatggagtttcttaaaagtgggagagggaggcagaagagaaggctggagtgacaagatttgaggactgagtccattattgctgattttgaagacggaggaagggcacggtgagccaacaaatgcaggcagcctttagaagctggaaaaggcaaggaaacagtctcctagagtctccaggatgaaatgtcgacctaccaacaccttcattttagcccagtgagacccatctaggactgctgacctctagaactgtaagacgatacatttgtaggttgtaagccattacgttagtggtaatttgttacagcaacaatagaaagtaaatatacagactggtggaggacagatgcaggagaattctcatctttgaagactgaagtattgattaatattttgggctggacatttaaatttctaaatcaagattatgttttacaaatattaagtgattttgaggcttgtttcctaagcatgatcagaaaatcctcaggtctgctagggattgttatctaaaagcagagaaaaactttttccagtggataaaatttaaagagagaatagaaaacaaaaataaatttgcattttgattacatcccttaggctgtgattgtttaatgtacttcttataatagtatctaaacaaatgtaaaatattataaatgtaatattttcatttatcaaatatctctttaatcattcagcaaatatcctgacagtttctgagccttgtttgtaagatttccttttagttctgtgagaacctaggatcctttcattgagttccttttctacttaaattagctagagctggctgctgttgcttacaatgaacgtagaacgctaactgaggtaggagacacactagcactttgcatctagagagatgtgtgactgcggataaattattctttgcttgtgatatccagcctcccagatggccccctgtgattcttgctatctcttgactaattccctcacattgttctatggttggactatgagtttagaagcatgcaggagaagttatgggatgtcacttccaagattaggttatgaaaaactgatttccttcttgggtgctttatctgatactatttgctctaatgtcatgggtcataagccatgtcatgaacagctttgtggagaggcctacatcatttggaactgaagcctccttccagtagacatatgagtcaacatggaagtagatgcttcaacccttgacaagtcttcataaacttagccctggcttgactaccacctcatgaaggctctgagtcataattgcccaactaagtcactgctggattcctgactctcagaaactgtcagataattattgttttgagctgctaaatttggggaccatttgttatgctagtatggataactaatacacgttcataaacccactttgagaggagataaggcagggtaaaggatggagcatttttttcttttttatgtttctaaagaggaattttttatgcactgtgaagcttgagaaagctggtcagattatctgtatctatgtaaggcttaactatgactgcagaaatttgggaattagcccttctgacaatttaagaaagggatttgaaattaattagacacctattattaaacaggcatttcattatgtactgtttcagtcacttttgctgcataacaaatcaccccaaaatttgcgggcttaaaaaaaagtaattttcccccttccctgttctgtggattgatcaggtgtttttttttttttttttggcattgtcagggttcactcccacagctgcatttagctgcttgattgcctggggctgggctcatctgagtcaactaggcccctctctccatgtagtcattcatcctcaaggagaaagaccaaagtttttcacatgatgacggccacttcacaagacagtgtaaatagaagctgcctgacttgttatggtctagcctttgaagtcacagtatcatttaggttgcattcaattttttttttttttttttgagatagggtctctgtcacctaggctgaagtgcagtggcgtgatcacagctcactgcaacctctgcctcccaggctcaagtgatcctcctacctcagcctcccaagtagctgggactacaggcacatggcaccatgccaggctaactttttgtgttttttgtaaagatggggtttcaccatgttgcccaggctggtcttgaactcctgggctcaagtgatccacatgccttggcctcccaagttgctgcgattacaagcgtgagctactgtgcctggcctaggctaaattctattataataaaacaagttcagctcagattaaaggggtagagaagtagattctacctcttgatgggtggggtggcaaagtcactttgcaaaagcaggtggacacaggatattgtagttcattgggagccattatagtaaaaatataccacaatctgcattctctcccagtaattcaagtcccttcccaagactcccaaagtctcatccagttatggcatcatactcaaaatccattattttataatctgtctgcattaggtccaaaagcagtatgtgttcttcttgacgcagacaccagagaactaaaagaagtttgctgccctcctcacttccatccaacacacaaaggtgaggcagagagagaatattcacatagatattctcattttaaaaatgtgaggaatggaaggtacttagcaatgattagcctgtatgaattttgaaatctatctggacacacattgccaggacccattcctttggtgacagggaatacttgatgagaactcactttgcttccttggagtgattgtctagtcctgttttttttttttcccagcttttggctctgctgtgatatttgggttctgcccttccgagatgtttttccttttcaataaaaatggcccatctttgtagctgagtagacttcccagcttgtttaccacctataaaaaatttagcaccaaactctcttcattgtgaatggtctttgtcccttctaattcaaaccagtggtgctctcaccaatataataatctcagaaactgtgtgggtttgctgcgtgtcttattggggtttactccataccccaaagccataattctttttgagacaaacctctctaatttgtcccacaggtgagacaatgttttaaggttcttagaaatccttttaccttgctgagaaatgtctgctacgtgttcccttaaatctgatgtcttaacaaaagatcttggccgggcatggtggctcatgcctgtaatctcagcactgtggaggctgaggcgggtggatcacaaggtcaggagatcgagaccatcctggctaacacagtgaaaccccgtctctactaaaaatacaaaaattagctgggcgtgatggtgggcacctgtagtcccagctactcaggaggctgaggcaggagaatgacgtgaacccaggaggcggagcttgcagggagccgagattgcgccactgcactccagcctgggcgacagagcgagactctgtctcaaaaaaaaacaaaaaacaaaaaacaacaaaagatcttaccaccagccacatctttaattcaacactaaggtcatctcttattttgatgatgttttgctgattggagatattagaaatactgaacagttttctttcctgatctagaacaccctagctcttttttctctaaatttgacttgcaaactgaacaattcttttgtttatctttttctttccatgctgcatcatacacagcttaaaaaaaaaaaagccaactgattctcccaaattttgcttttaaatcccctttgccagactcacaagtttattaggtggatttcttaaccttctgagttaccatgggcaacagttttaccgatttttcctctcctacagaatgtgggccatcctctctccagtttctaatagttacctgataccatatgtttagtttttttgtttggtataatagcaccccacccctatttcagcctttattgcataactactccaaaatttatggcttaaaacaacgatttattatttcttagggttttgtgggttggttggatactgctgctgggcttgcctgtggtcactcatgtggctgcagtcacctggcaagttgatggaggactgggcttagcttgcatgctgggcctctctatttgaacattcgtcttcaaggaagctaggctggactccttcacccggcaatgactgtgttccaagaaagcagacatggatgcttgtagggggcttctccatagcccagcttcaacagtcacacaatgccacttaggcatcctgttggccaagatgagtcacaaggccatcccaaattcaaaaggaggggacacagaccacctctcgataagagagagcatcttttttttttctttttggcagagtctcactctgttgcccaggctggagtgcagtggtgtgatcttagctcactgcaacttccgcctcctgggttcaagctattctcctgccttagcctcctgagtaactgggattacaggctcacaccaccatgcctggctaatttttgtatttttagtagagaaagggttttgccatgttggcccgctggtcttggacacctgagctcaagtgatctttctgccttggtgtcccaaattgctggggttacaggtgcgagccaccatgctgggcctgagatagcatcttcctgagcagcctgggaagatagagtttacagtcttctaaaatcatacatcttgtgggtatagaaatcgtctcggagtcagatgtttcaatcagctcatgaaaaacagctttttaatttcccctctcttttctttttttttttgagacagtgtctcactctgtagcccaagctggagtgcagtggcacgatctcggttcatgcaacctttgcttctgggggctcaagtgattctctggcctcagcctcccaagtagctgggaatagaggcatgcaccaccacacttggttaattttttttgcatttttagtagagacggggtttcaccatgttgccctgggtggtctcaaactcttgagctcaggccatccaccttcctcgacctcccaaagtgctgagattacaggtttgagccaccgcacccggcctgcttcccatctcttttctaagggagaagtctgtcggcaaataaaagttgacatgccttctaacatcatttctatctcttgttgctgtttatctttggaagtggcctgcttaaagatacatattccattttaaaaagctattatttggggtaaaatatcacacaaagctcagaaagctccaatatttagtaacttgtgaaaatgtagaaactatgagaaatattggggtaaaagcatagtgaagaagagagcaagggaaagatcattaaaaatagaaattgaacagaaaacaaaggataaacatgatttccagcatgagtgtgaaaacactgatttctcattttgacaagtgaggcagaagcctttacttctgtttatttgggggctacagaatggagtgtttgtgttatctgaaatagtgtctttcttctaacctagggtcccatacactctcctatgctttgcaatataaataaaggcaacgcacactgaactgctaggagaacaatcaggccttgtccatacaagaacacaggagaggcaatgcagacatctcatatgaagcagaactaggcaatctccaagaccgctcctcaccccaaaattcaatgatagggtgaaattcaaaagtgaatatgataactgagttttcctaaaatggtctcagttgtctgctttcaaactaagctacatttaaaaacagatatgacaatctgtagcttagattcagtttgcatctgtttacagatgttatgcctttgttctcagggattatcatttttatttttagccagctttatttttttaatatgtaaaactttctacaaatgaaaaggcatgatctaatttataggttatatttatatggtcataaaaccccatttgcagctgtggctgaatgaatttctcacatattcaggcattatcttgagttatacttgttaatatgctcatttgtagtaacggatgtgtctgttactcagtgggtcagctctactaagtcacgcaactgagacggttcaatagatcagtttaaagttcatgataaacttgcactgccgcaaagctttctcagaatcatttgggagtattcataagcctggcatgccttctgcccttgggttcgatttttgccatctcatgtttatattcaacttagaaatctgcttttcagagacttctgggtttagaattcactgtgggctttaaagacaagaagagaattgctcatataataacacaggcttttggctcctcagatcttctgttgagctgtggcttggcaatggtgacactgttaattttattctgccatgcagagaaccagtaaattagagtaatgggttgtgctgtcaatcaggtttaacagaacctctaagagattttgcaagggaatgaaatcaacatggtccagttgtactatatcatgattaacagtatatcttaaggaaacatgttttttaaatgctgtaaagtgcatttctttatggtgaatatattttccactgcatgctttctacacaattgtaaatatggtccttggggtattaatttatggcccttttaaagcaaagtttaagtatagaatttaaaaacatatatatatgaaagagaatgtcttaaaaatggagtgaattgcctttgcataatttcctcttttgagagctgtagaaatgtgcagaagtcaccagagatcgagaagaaaggacgtctaaaagtcaccacagaagaatatgaccgtgagcagggccgtggccagcttctgccttggctgtgcacactgggcaagcaggggagggggactgggctgtttgtcttcagccgggggccaccttcattctctgttactaattctggacagaccaattcttgtctcctgtatttcaaaaagtaattttttttttttttttttttgagacggagtcttgctctgtcgcccaggctggagtgcagtggcgtgatcttgactcactgcaagctccgcctcccgggttcatgccattctcctgcctcagcctcccgagtagctgggactacaggcgcccgccaccacgcttggctaattttttggatttttagtagagacagggtttcaccgtgttacgaggtcaggagatcgagaccatcaaaaagtatttttgcccatacacatttcttgatactctgtaaaacattctggaattttaaacccttggtatgttgtttcttgcctttaaaaagagcatttatgaaccaacataccttttaaaggtcattgataccatttttaacaaggttttgtactttatcattctcatttatcttccattttctaatttttctttcagtatctctttatttccttttactcctatctgaaaatttaatttatattagaaacatactagctatacatgctaaacttattaaatatctactagaattttagagatggaatagttcttagtctggttcaccctgagtattttgactatctgatataaaagaagcaacagatagaaggagaagagtagatgaggaaacagcagataatggcataagtcatgttgtcatcattgggaaggctgggaacaagtcaaatccttctgctgaaaaactctcctaacctacacactcccgaaggctttgtgtgtatgtgcatattgggaggtaggggtggtggtcactgtggtggggctgatgccggagatgccatatttttcctttgcgcttctccccacccacccttgccccagggctctgctttgtgctgaacacacagtaggtgggacttgtgagcacttgtagtcagcacttgttattttcggacttgattatctatcacttttctcagtaactatagaacatagccaataggagatcatccttacagccccaaagggcagaaaatgaagttgacttaatcatccacttgttagcgcaccttactctatgaactcaaaatgcagtggagagaaaagggatggaagaaatttgttcataatgagcaagctaggaagactgctgcaaggtgacttgaattttttaatttaaatattttagacataaaaaagtatttgaggggttgatagctttggaagttaaaggctgctatcagcctgacagagcagttcaaaaaaacagcttgaggataccaatcatttgcttatctttattttagtttccaaaatttcagatggactttgtgaattgagactcttagaaaactgccagtttctatgttttgattttcgtgaaaatcagaaccaaagaggaaaaggtaagtgataatatttttggtttaagaaattaaaccaaagtgtcatggtgctactgaggtgcagtttcacattcttttttcagaagatgagccaataacaaaatgactctgttttatagaatattattttcagtattagatattactaattaagtattacacaaagctgtttagcagaaaaaatgtgatttttcagacagcagaagttgaggaagtctgagtttctgcgttttgacactgactgggtaggagtttctttgtctatagaacagggatttgtagaggaagacctggctgccttggtgagttacaccctctaatcgtgagcatgacgttgtgtaaaaggaaaattgtctttattcttaggattttttttttcttttttaccttgtaatttagcattaaaaacagggagagaacatgccagtcggaatggctattattaaaatgtcaaaaaacaacagatgctggcgaggttgcagagaaaaaggaacgcttttacactggtggtgggagcgtaaattagttcagccattgtggaagacagtgtggcaattcctcaaagacctaaagacagaaataccaatgggatcaacccagcaataccattactgggtatatacctcaaggaacataaatcattctttataaagatacatgcacgcatatgctcattgcagcactattcacaatagcaaagacatggaatcaacccaaatacccatcagtgatagactggataaagaaaatgtggtacatatacaccatggaatactatgcagccataaaaacgaataagatcatgtcctttgcagggacgtggatggagttggaagccgttatcctcagcaaactaatgcaggaacagaaaactaacactgcatgttatcacttataagtgggagttgaatgatgagggaggcaacaacacacactggggcctgtcggagggaggggtcggggagggagagcatcaggaagaatggctgatggatgctgggcttaatacctaggtgacgggatgatctgtgcaggaaaccaccatggccctggtttacctgtgtaagaaacctgcacacctggcacatgtactcctgaacttaaaagttgaaaaaaaaaaaaaaaaaacagggagagaagaaaaagagggtggttatgcaaaaattattttacttaattttttaacccaagctatgttattttatattcataaaaatgctctattcttcaaagggagctttgttcttgaaaaatagtgcagctgtgcctcaggctatgctataacattttcagaaaaccacaatcaagaaggaattgaaaaagagggcacttagaactctcctcaatgggtaaaggaaagttaaaaactttgaaactagttgcctgggaaactgctgacaggggtggggatgggattttggactaggcttcttttttgtctctaagcctgtatcagttcctactgtgaatacaattttttttcccttctgctaggctatgagggaaagcagtttagaagggcaaagtgggtcttgtccctgggaggtgggaatctacaagtggccagcactcctggtagttcagggtggtgcaggataggatggaagctggcggtggggattcgggagctctgtcaactgccaaatgcttgtctgcatcctctgtccctatttccaagatgtatttagggaaaactctgcatagatctcctccttaacaacacccctttcccttttttaagatggggtctcattctgtcacccaggttgggagtgcagtgccataataatggctcactgcaacctcgaattcctgggctcaagtaatccttcctcctcagcctcctgagtagctgggattacaagcacacatgaccatgacaggctaattgtaacaagcccttttgtactgtttgtttttcttgggtactagtcacacagttcttatctttgcatgccagtaatttttcattcaatactggaaattgctcaaaaaaaaaaaaaaaagaggttcctgttgatgatgccattcaacagagaaagttcaagtttttctttgctaagaaatagagtagaagaaagggaaaactcattttaatccagtcagggactgagctgagttgaggttaaatggcagttttggaaagatttcatggctcatcctgtgtgtgctccaatacctagtgtgtgtcccttcagagtttttagttcagagataggtgggtctttgtggtctcagcgccaatggactgtgggaatttctgtcctgtctttcagaggttttcagcttaacactttaatctcccactgtgtacatctttggaattagctgaatgccttgagaagggagaccagctctcaggtttccaattttgtcaaaccaggttttaaatgaccacccaaagctgtgttagtttttatgtctctccagcagagaccctctgtccagaccaagaccagatcctctgactctagccagtgcccagaattggcaaatatctcctggagaaggcagctgcagattctcaactcatttataaaattagtccctggaatttcagtccctctagtatcatttacttttgcagttctctgatacattagaaaatatgattttaaaaaaatgtatcagggttttgtaattgttctcagtgtgagcagtttgctgctatgaattccagcatgtccagaagcagaaatatacctaatgtattatattgtttgtctttttatgtgtgttcttatttttgcccatttggtctgagttggactgagagaaatgaaataaagtctcctactgctgtttccatctgtctctccttgtgcctcccgtgatttctgtttcatcaacatcactgccacattgtttagtatagagatatttatcactgttatatcttcgttttggtttgtattcattagcattataaagtgcctttatatatttatggtatctttttagcttgaattctgccttctgtcatgctgtattataaacaccactttctttttgttttgcacttttctcatatgttttggttcatctttttatttttaacttttttgaataattttgctttcaaggtgccactctaaaaaacagcttcattgtgatataaatgatatacaaagaattgtacatatttaaatacaatttgatgagtttgtacatatgcatacacccatgaaaccaccaccacaatcaaggtaatagacatttctatcacctcaaagttcccttgtgcctatctcttttttttagtggattttgtatgaatgtttaacatgaaatctaccctcaacaaacttttaagtgcacaatacatcaacctgacttgtgaatagcataggaattgggtttgtgacatagatttgtgactcaatctgaaaatgtcttttcttttactaggtaaaagacttacctacattcattggtatggtcaattatagttctatagtcttacatgtgtaacatttaaaaagtctctcctttgtggtctctctctctcttttttgttctagtggctgcatattacaccatttttatcatcttcctcctcctcctcctcctcatcgtggncttcttcttcctcttctttcttctccttctcttcttcctcttcctcctcttccttcttccttccttcttcttctttctttctttttttttttttttttgagacagggtcttgctctgttgcccaggctgcagtgcagtggcacaatcttggctcactgcggccttgacctcgagggctcgagcgatcctcacacctcagccttctgagtagctaggaccacagatgcatgccaccatatccagcctattctcttctttctttagaattatctataatttggctgtgtgcggtggctcacacctgtaatcccagcactttgggaggctgagccgggcagatcatgaggtcaggagacggagaccatcctggccaacatggtgaagccccatctctactaaaaatacaaaaattaggtgggcatggtggcacgcactcgtaatcccagctacttgggaggccgaggcaggagaatcgcttaaaaccaggaggcggaggttgcagtgagccgagattgcaccattgcattccagcctggtgacagagtgagactccatctcaaaaaaaaaaaaaaaaaaaattatatctataattttcttaatgtaattagcattaaaattaacttatattcttttcttccctcttcatccctcccctcaaatatacaattttagttgataatactggctttcttagggtttacttttgtattgttaagtatgctatacttctaaagcttgatttttcaacttgatttatctcttgtttgccaggtataattgatgaagcaactagcgagcttattctttcctccaccttttctttcccccaatctttgctttttaaaaaagttttatgtcgtcaaatcttatatcactttcattctattctgtcacctttattttccccattgttttcatcttatagcttacaggtagatatatttgatgcccatgagaagtccttttgttgaggtttccctggtcattcatgattggttagtttttcccctagttttcttaagaagaattcacatcaacaacattctctgaattcttgaatattccaagtaattagatagtattaactgttgcaagaaatgagatcaaaagctctattgctaacaggagtgtcatttgacacaaccactgtaaaacaggtttgcaacaacttgaaaacttaaacagccattatcctataacctgtaaatttcactcctaccaagataaactcttgcacaggcataaaaggagtcacttacaagactctctattacagcactgtttttattgtgttttgttttttaactttttttttttttttgagacggagtctcgctctttcgcccattttggagtgcagtggcactatctcggctcactgcaagctccgcctcctgggttcacaccattctcctgcctcagcctcccgagtagctggggctacaggcgcccgccatcgcgcccagctaattttttgtatttttagtagagacggggtttcaccatgttagccaggatggtctcgatctcctgaccttgtgatccaccgacctcggcctcccaaagtgctgggattacaggcgtgagccaccgtgcccggcctgttttttaacttttattttaaatttaggggtatatgtgcaggttttgttgcataggtaaacttgtgtcatgtgggtttgttgcaccgattgtttcatcacccaggtattaagcctagtacccattagttatttttcccaatcctctccctcctcctaacctccactctcaactaggtcccagtgtgtgttgttcccctctcatgtgtccatgagttctcatcatttagctttcacttttaagtgagaacatgtggtgtttggttttctgttcctgtgttagtttgctaaggataatggcctccagctacatccatgtccctgcaaagagcatgaacttgttcctttttatggctgcatagtattccatggtgtgtatgtactacattttctttatccaatccatcattgataggcagttaagttgattccatgtctttactattgtgaatagtgctacagtgaacatacacatccatgtgtctttataatagaatggtttatattccctggggtatataaccagtaatggaattgctgggtccatcccattggtatttctgtctttaggcctttgaagaatcaccacaccatcttccgcaatggttgaagtaatttacatgcccactaacaatgtataaatcttcctttttctccacaacctcaccaacatcttttttgacttttgaataatggccattctgactggtgtgagatagtatcttattgtggttttgatttgcgtttctctaatgatcagtgatgttgagatttttttcatatgcttgtttcatatgcttgtttgtcacatttatatcttctattaagcagtgtctgttcatgtcctttgccaactttttaatgagattgttttcttttttcttgtaaatttaagttccttatagatgctagatattagacctttttcagatgcatagtttgcaaagatttgttcccatcctgtaggttgtctgtttactctgttgatagtttcttttgctgtgcagaagctctgtagtttaattagatctcatttgtcaatttttgtttttgttgaaattgcttttggcattaattcgcttaggattatggtctccagctctgttcatgttgctgcaaaggatgtgatttcattctttttatggctgtgtaatattctatggtgtatatgtactacattttctttgttcaatccactgttggtgggcacctagtttgattccatgtctttcctattatgaatactgctgtgatgaacatgtgagtgccttgttttcttttgaatatatatacccagtaataggattgctgaatcaaatggcagttctgttttaagttctttgagaaatctccaaacagctttccacagtggttgaactaatttacattcccaccaacagtgtatacgcattcccttttctccatggtcttgccagtatctgttgtttttgaacattttcataatagccattctgactggcgtgagatgttatctcactgtggttttcatttgcacttcacagataattagtgatgtgcaacattttttgtatatgtgttagctgcttgtatgtctgttttgagaagtgtctgttcatgtcttttgcccaattgttaacagggttgtttgtttttttgcttgttgggttgtttaagttccttatagattctggatattggatctttgtcagattttttttctgacaaatatttgtgactattttctcccattctgtaggttgtttattgtgttgacagtttctttttctttttcttttgttttgttttgtgtgtgtgtgtgtgtttaatattttaagttctggggtacatgtgcagaacatgcagttttgttacatatgtgtaaacgtgtcatggtggtttgctgcaggcatcaacccatcacctacattaggtatttatcataatgctatccctcccctagctccctaccccctgagagtccctggtgggtgatgttccctgccctgtgtccatgtgttctccttgttcaactcccacttatgagtgagaacatgtagtgtttggttttctgttcttgtgatagtttgttgagaatgatggtttccagcttcatcatgtccctgcaaaggacatgaactcatctttttttatggctgcataatattccaaggtgtatgtgtgccacattttctcaatccagtctatcattgatggacatttgggttggttccaagtctttgctattgtgaatagtgccacaataaacatacgtgtgcgtgtgtctttatagtagaatgatttataatcctttgggtatatacccagtaatcggattgctgagtcaaatggtatttctagttctagatccttaagaattccctcactgaattccacaatggttgaactaatttacactcccaccaacagtataaaagcattcctatttctccacatcctctccagcaactgttgtttcctgactttttaatgattgccattctaactggtgttagatggcatctcattgtagttttgatttgcatttctctaatgaccagtgatgatgagcattttttcgtatgtttgttggctgcataaatgtcttcttttgagaagtgtctgttcatatcctttgcccactttttaatggggttgtttgttttttttcttgtaaatgtgtttaagttctttgtagattctggatattagccctttctcatatggatagattgcaaaaattttctaccattttgtaggttgcctgttcactctaatgatagtttcttttgctgtgcagaagctctttagtttaattagatcccatttgtcaattttggattttgttgccattgcttttggtgttttagatatgaagtccttgcccatgcctatgtcctgaatggtattgcccaggttttcttctagggtttttgtggttttaggtcttatgtttaagtctttaatccatcttgagttgatttttgtttaaggtgtaaggaaggggtccagtttcagttttctgcatatggctagccagttttcccagcaccatttattaaatagggaatctttttcccattgcttatttgtatcagatttgtcaaagatcagatggttgtaaatgtgtggtgttatttctgaggcctctgttctgttccattggtctatatatctgttttggtaccagtaccatgctgttttggttactgtagccttgtagtatattttgaagtcaggtagtgtgatgcctccagctttgttctttttgcttaggattgtcttggctatgcgggctcttttttggttccatatgatgtttaaagtagctttttcaaattttgtgaaggaagtcaatggtagcttgatggggatagcattgaatctataaattacttttggcagtatggccattttgacaatactgattcttgctatccatgagtgtgaaatgtttttccatttgtttgtgtcctctcttattttgttgagcagtggtttgtagttctccttgaagaggttcttcacatcccttgtaagttgtattcctatgtatcttattctcttagtggcaagtgtgaatgggagttcactcatgatttggctattcgtctgttattggtgtataggaatgcttgtgatttttgcacattgattttgtatcctgagactttgctgaagttgtttatcagcttaatgagattttgggctgagataatggggttttctaaatatacaatcatgtcttctgcaaacagagacaacttgacctcctctcttcccgtctgaatatgctttctttctttctcttgctgattgccccgaccagaacttccaatactatgttgaataggagtggtgagagagggcatccttgttttgtgccagttttcaaagggaatgcttccagtttttgcccattcagtatgctattggctatgggtttgtcataaatagctcttattattttgagatacatctattgatacctagtttattgacagtttttagcatgaagggctgttgaattttgtcgaaggccttttctgcatctattgagataatcatgtggtttttgtcactggttctgtttatgtgatggattacatttattgatttgcatatgttgatttgcatctcaggtatgaagccaacctgattgtggtggataagctttttgatgtgctgctggattcagtttgccagtattttattgaggatttttgcatcaatgttcatcagggacactggcctgaaattttccttttttgttgtgtctgccaggttttggcatcaggatgatgctggcctcataaaatgagttagggaggattccctctttttctattgtttggaataatttcagaaggaatggtaccacctcctttttatacctctggtaaaatttacttgtgaatctgtctgttcctggactttttttgattggtaggctattaattactgcctcaatttcagaacttgttattggtctattgaaggattcgacttcttcctggtttagacttgggaagttgtatgtgtccaggaatttatccatttcttctaggttttctagtttatttgcgtagaggtgtttatagtattctctcatggtagtttgtatttctgtggaatcagtggtgatatcccctgtattattttttattgcatctatttgattcttctctcttttcttctttattagtctggctagcagtctatctattttgttgatctttaaaaaaaaaaaaaacagctcctggattcattgatttttcaaagggtttttcatgtctctatcgctttcagttctgctctgaccttagttatttcttgtcttctgctagcttttgaatttatttgctgttacttctctacttcttttaattgtgatgttagggtgtcaattttagatctttcctgctttctcttgtgggcttttagtgtttaaattttcctctacacactgctttaaatgtgtcccagagattctggtacgttgtgtcttcgttctcatcggtttcaaataatatctttatttctgccttcatttcattatttacctggtagtcattcaggagcaggttgttcagtttccatgtagttgtgcagttttgagtgagtttcttaatcctgagttctaattggattgctctgtggtctgagagactgttatgatttttcatttgctgaggagggttttacttccaattatgtggtcaattttagaataagtacgatgaggtgctgagaagaatgtatattctgttgatttggggtggagagttctattcctttctgtttattagttttccttctaacaggcctctgctgcaggtctgctggagtttgctggaggtgcactccagaccgtgtttgactgggtatcaccagcgaaggctgcagaacagccaagattgatgcctgtttttcctctggaagctttgtcccagaggggcacctgccagatgccagccagagctctcctgtacgaggtgtctgtcggcccctactgggagatgtctcccagtcaggatacacggggggtcagggacccacttgaggaggcagtctgacccttagcagagctcaaatgctgtgctgggaggtccgctgctctcttcagagctgtcaggcagggatgtttaagtctaatgaagctgcacccaaagctttcccttccaggtgctctgtcccagggagatgggggttttatctataaatccctgactggggctgctgcctttttttcagagatgccctgctcagacaggagaaatctggcagtctggccacagcagccttgctgagctgcagtgggctccacccagttcaaacttcctggcttctttgtttacagtgtgagcaaaaaactgcctactcaagcctcagcaatggcggacacccctccccccaccaagttcgagcatcccaggtcaatctcagactgctgctgtgctggcagcgagaatttccagccagtggatcttagtttgctgggctccatgggggtgggacccgccgatccagaccacttggcttcctggggcttcagcacccctttccaggggaatgaacggctctgtctcactggcgttccaggcaccactggggtatgggaaaaaaacaacaacaacaactcctgcagctacttctgtgtctgcccaaacggccgcccagttttgtgcttgaaacacagggccctggtggggtaggcaccgaagggaatctcctggtctgcaggttgcaaagaccgtgggacaagggcaatatctgggctggagtgtgcattgttccttggattcagttccgtaaggcttcccttgggtaggggagaaaaatcccccaaccccttgcacttcccggatgaggcaacgccccaccctgctttggcttgccctctgtggttgtccaaccagtcccagtgagatgaactaggtacctcagttggaaatgcagaaatcacctgccatctgcatcaatctcgttgggagctgcagaccggagctgttcctattcggccatcctgctagcaattgactgatagtttcttttactatgctctttagttttattagttcctgctttttaattttttggttgcagttgcttttgtggtcttagttgtaatttatttcccaagcctgatgtttcctaggttttcttctaggatttttatagtttgaggtcttacatttaaatctctaattaatcttgagttaacttttgtatatggtgacgggtagggatcatgttttattctcctgcatgtggccagccaactatcctgcacaatttattgaatagggagtcttttctcttttgcttgtttttgtcaactttgttgaagagcagatggctgtaggtgtgtggctttatttctgcattctttattctgttccattggtctaaggtgtctgtttttgtaccaataccatgctgttttggttactgtaaccttatagtatagtttgaaatcaggtaatgtgatacctctggctttgttccttctgcttaggattgctttggcaatttaaagaatgctaaaaataggcccccaatctctcctgacttataaggtttctgctaagatgtctgctgttagcctaatggagttccctttgtatgtgatctgacctttttttttgctagctgcctttaagattttttctttagtgttcactttggacagtctggtgactatatgccttggtgatgttgttttatatagtatcttgcagatgttctctggatttcttgtatctcgatgtctgtctctctagcaagattaggaaacttttcttgagttattccctcaaaaatatatttaccagattgtttactttttcttcctctcaagaatgttaataatttgtaggttttttcacttcacgtaattacaatttcttgaagactgttcgtttttttacattcactttcctttatttttgtttggctgggttagcttgaaagactggtcttcaagctctgtaatttcttctgcttggcccaatctattgataaaacttttaattgtactttgaaactccttaggtgagtttttcaattctagaaggtctgattgatttcttttttttttctttttctttttctttctgttttttttttttttgagacagagactcactctgtcacccaggctggagtacagtggcatgatctcgactcactgcaacctctgcctcctgggttcaagcaattctcctgcctcagccttctgagtagctgggattacaaatgtgtgccaccacgcccagctaatttttgtgtttttagtagagatggggtttcaccatgttggccaggttggcctcgaactcccaacctcaactgatctgcccacctcagcctcccaaagtgccgggattacaggcgtgagccaccgcacctagccctgattaatttctttttaggatgtttatctcttccttcatttcccagagattgctttagaagtttctttgtgttgatttttaaccctgtcttggatatcattgcgttttttttttttcctagtccatgctttgaatactttatctgtcatttcttagtttcaattttggttagcaacaattgctggagagctagtgcaatcctttgatggtatcactacattcatatttttcatggtaccagaattcttgccctggttccttctcatctgagatgctgacacttataattttgtatttattttctagcaggtagaaattttctttttatttctttctctatattattattattttttctttctctttccttttttccatctccccagcaggtataactatagagaatgttgagtagagttgtttggctttgcttctatagctgtatgcacttctgatggcaacttttatactgggctgtgcgcttcaaactctaagcctgtagatggcacttataggtatgagctggttgcagccaatttggggatatacttgacctttgtttactgggagaagctccctgttgcttcaggtaaatgggctgatccatggagtgcacagtggtctgagcttcctgtttagcccctggtgagtgggggacatgatggatggagctggaccaggcgagtctgcctacaggctccagggacaagcacaagtgctgagggagaatccagtgagcagccatcaagtacctagaggtgcacctaggcatggagctgggaaacctctttagccccaagttcactgcacagggatgggggatggcctaaactccttatccaggagagggggcactccaggtgcctggagatctgcctgggtgtggagtgaagaggtccctgcttcaccaggatctctatataggaagaatggcataggtcagaatgccaatccaggtgagtgggtactttgaatacctggagatctgcctattgtggagcagagaaagccccgtttcaccacaatctatactcaggaaggttgaggtggctcaagctgctgaactaagcaaatgggtcctccaaatgcctggagatctgcctgggcatggagcagaaaaggccccactatatcttgatctatgtctatgaagggtggggcagctcaggctgctggtccaggcaaacaggtactccaaatgcctggatttctgcctgtggctagagtggatagggccccactgcaccatgatctcaggggaacaggatggagcacccagaaatggcgtgcacagactggttccaagtcactaagctgaccctggctgcaagtcttgctgctcaggagaaactgcagtggtagcagctcccatcccatcctagtcttgcaatggggaataacaaaattccagtgcctactgctgaggtacttttcatagttctagctctggagacccctatgccactctagagcaggcactccagtctctgacctgagactaaaatgcctgcatggctacactgccaggttgctaaagaatggctgactttatgtccctgggttaaaacacatcctgcttttggtcccaggtctgggaaaatgcctgtagtgttccccagtgtcttttttctcatagcatctccaagctcctccccaggttggctgcaaggcttaggataaacaaggtgtcctcccttggcctgggttgctcggatccccagtggaaaggtaagtaacagagggaggctgtctgcctgtctcacatactggggtttcactcacttttctcagccagatgctttcatggggtccgtttgcccacattttcctctctgggatctgaggtgtccttcatgattctggtgaatccccattttccttcttgaattaatgccacagagttgatctttatgcactatcttgctatttccaagtgactgaggcatgctaaaagggtgtaatccaccatcttgtgaaaaaaagcgtgttaatcttattgtgggtcttgggtgaagaattgtttttttcttgctacatttagagttttctctttatcctttgtttgattttgatgtgcctaggtgtggatctgtttcagtttatcctacttagagattgttgagcttcttggatgttgagcttcttggacatgaagattaatgtttttcatcaaatgtaagttttcagtcattattcacatttttttctgctcctttgccttttttctctaagtatgtcacctttgtgtagcagaaaaagaaaaggcatacatgactggattaggggcctcatcacatgtcaggggccagctctgcaagtcttgtactttggaaaaagaaccaactagcctgttcagcgatacaaatgtcagaaagttgagaatgcctggatttcaaatatcctaatagactatagaggagatatgtttggtgaaggaaatcctttccggaatcctccaagtcataatgtaaatggttgcctactaattctcagcccttaaatctagtcctagtaagccctgataaactgactcatacaagatgggaatgcctaccatgaaatgctgagatgggatatgacagtgacaacaaaggctgctgctgtaatgtgatctctccagatgggttctttcatcttaggtaaaaaggtcagtcctatgatcgtttgcaaacactgcaatggttgactttattataaggattatgatctaagtgatgtaatggcaaaaatcctttcctaatcctgtattgagtcaacaactgttctctatttgctttgatacagttcagtgtgagggggtagtttatagaatcctgaatttcaacaacaataattgctatatttacggtgcagctgttgaactgttaatccttctttatgatggtgttacagaattgaattatattaaattactctgaatacagcaggcatgacttttcatttgtctgtactatattaaagattatgtatttttaaatcttgataacactcaacctttgagttacaaaccagatagtttcatgaaaaatcatgaaactttaaaatatagtaaataatataacccacaagtaatttttgtcagtttttaaaatatttctttcagaacctttataatcccttaatgataagtgatacctgcacatgaatgctgcctttgaaaggggttcagtgttatttaaaaaataacagcatgcatgtttttcttcccctactaaatttaaatcaacgtactctcaaagctgagaggatgaagtgaagaatagtgggtgggtgaggagaattaaaaataagtactgtaaaaatccaatggtgcctgaaaggatttaagacaaaaatgtgagagcgcatgaggtagtaggattacgttgtgccaaaggaaataacaagactgcatatttgttatttcaggaaagatagcacaatagcaggattacttttatcatccacgttgaagtcacaggccttccccactcaccactgcttaccacacctacaaccctcttctaaaaaagccacggaagccggatgtctttttcgggtattgggcagaactgccctgcataggaacaccacatgggatggtgacaaatttgtcaatttgatcctctttcttaataataaatatggattttgagatatacacataaatggaagttacactccaatattttctgagatatgtgcagtgttccatgagctctgaggtgtagccaaatctttgagaccaagagtgactgtattagtccattttcatgctgctgataaagatatacccaagactgggaagaaaagaggtttaattggacttacagttccacctggctggggaggccttagaatcatggtgggaggcgaaaggccattcctacctggtgactgcaagagaaaatgagagagaagcaaaagcggaaacccctgataaacccatcagatctcgtcagacttattcactatcatgagaatagcacgagaaaggccagcccccatgatttaattacctccccctgggtccctcccacaacatgtgggagttctgggcggtacaattcaaatttatattggtggggacacagtcagaccatatcagtgactgtctagccagaagggagatggatgacttgagacttaatatgctcttgaatttttgtgagatatccttgcactgaaagtaactgggcatgtctcttgtaatcctgaaaagccattttatacatcagacactgggcctcgacttctgggtctctgtcttgtgttatatgtttcttttcatgccagagagaagaaattgcagaacgaacaaagaaaacagactttggagttctcaagacttagattcagattgactcttgctgctgagctgaatgtcagccactgtcagatcatttagtttagataaaaatgaattggcctgtcctgtctactttagagttcctaagagggttcaataaaatcataatgtatcaagtacaccaatataatctggatatttgtccccacccaaatctcatgttgaaatgtaatccccaatgctggagccagggcctggtgggaggtgtttgggtcatgggggcagatgcctcatggcttggtgctatccttgtgatagtgagtgagtttttgtgagatctggtcatgtaaaagtgtatggcacccctcaccccccctctctctcccttgctccccctcttgctatgtgatgtgtctgctcctgcattgtcttctgccacaggtaaaagctccctgaggcctcccagaaactgagcagatgctggcaccttgcttcctatgcagcctgcagaactgtgagccaattaaatctcttttctttgtaaattacccagtctcaggtatttctttatagcaaagcaagaatggactaatacacatactaagattttgaaagtagttaatgactttacaaatgttattgattatgtttcatctcttacctaatcaagtgtctctagtattgtcttttatatatttttgtctcccctgtgtggccagtaaaatgtaggagcccaagaaagtgtttaatatgtgtttgttgcacttatgatcatcttgaagtcaagacttttatggttcattcagcagtggggccatattcaaagaatagtacaaacaggaattcagatcatatacaaatcaaatgtagaacttgaagacaagttttactaagatctcctttttctcatattctgtagcatctggcaaccctgaggcctgtcactctccttccacagaaggaccctctctcactctccttggcccacacccggtctctctccagcccactcctcatccagctctaaccgacttctcccagctctgccctgggctctccatagtctgcaggtgtaggatccttcttcactcaatgcctgctgggaagagaagcccctctttaccctcactgccagtttcacaagaataggtcattcattcctcagtgccttttcctcattctgcctcccaagaaccttaatcttgttcagaaggagaagaggggaaggaactaaacagttttcagaatcagaacctgatttatcagggttaagggttgggaaaacttataataataaatccatatttattattaagaaagaggatcaaattgaccaatttgtcaccatcccatgtggagttcctatgcagggcagttctgcccaataccccacaaagacagggaaaagggttgggaaaacttacctgtatgtttgtcatttttatcttatcccatagaatgattggatgcagaataataaagccagcaagtatgtattatgttcctattgggaagctggttctaggaatgagctgaaaggagtaaactacagccctgcccttaaagacttcgtgctggggaattttcacagtgcttagcacgtgaggctgggctactccagaaacccttgtagatgctgcagagagtgaaggatactgtagcactttaaaaatattgcagaataatttacttaaaatgaattctcctttttaagcgtatagttcaatgagttctggcaaatgtatcgtcatctaaccatcattactctcaagatacagaaatgtccatcacccccaagagttcctgtatactccttttcagtcattcccatccattaccaccactgcctgccaaccactagtctgttttctatgcttatagcactgtcttttctagaatgctatatagatggaatgtggaatatgtatatttttgcatacatgtgttagtaattcattctttttattgctgaggaatattccattgtacatatatagcattatttggttatctgttctccagttgggtatttgggttgtttcctatttttgactactcaatatagctgctatgaacgttcatgtagaggcctctgtgtaaacataggtatttgtttcttttgtgtaaacacctaggatttggattggtgtgttgtatggtagatgcattattacttttactagaaacttccatactgttttccaacgtgactgtatgagggtctagttgctccgtatccttgccaacacttggtgttgtcgatcattttgattttgtattgtattggtatgtagaggtaccttgcagtttcagtttgcattttcctgatgagtaatgattttgagcatcttttcacatgcttgctggccatttgtatatcgtctctgatgaggtgtccagatcttttgctcatttttcactaggttgtttgtcttaatatgagttgtatttttattattgagtcgttattattgggtaagagttttaaatatatattcaagatacaagctctttttttgtgtttggaaatatttttacctagtctaactgatttgtcttttcattttttttttttttacaaatatacaattttattctaagggaatatttctgtagtttctgcaaggggaaaacctaaaagaggttaaaaactgaaaaagaacagaaaggatgatttagatgtttctctttttgtttgatgtttttttctcccctggaaaaaaatgtaattttacacaattttcgtaaaattaaaaaagtaataatcagatgcacacatcaacagctacacttatgaggaatgaccaataattaatcaatattttctcttatgaataaatgtaggattctgggcaactctgtggactaacaagcaaatgaaatcctgatacagtcatttatctgtatgattaattccatctgtggttgtcatttctgactggaaaacttttcattttcttaagagtgtttttcaaatagtagtagtgtttaattttgatgatgaccagtttaacaattttcttcttttgtagtttgtgctttttatagtttgggagaaatctttgcgtaacacaaggtcaatgtgttatgggttgaattgtattccccctgccccccaattaatatgttgaagccctaacccccaataagccctaaggtaaggtaaggtaaaccctaccttagaatgtgaccttgtttggaaatagggtcttcacagagatgatcaagttaaaatggggttattgggggtgggttctaatccaataggactggtgtccttatgtaaagggtatatctgaggacagatacacacacagggagaatgccatgtaaacataaaagcagagttggggtgataatttacaagctgaggaatgccaaaagtgccaggagagtactagagaaggagagaagcatggaacagattctctctcacagcgctcagagggaacagccctgctgacactttgaccttggactttcagcccccagaactgtgagataatacatttctgtggtttaagtcctcagtttgtggtacttaattctagcagccttagcaaatagtcaccaaaccactaagattttctttttttttttttctagaagtcctgtggtactttttttttgtatttatctgcatttattttattattattatttttaaattttattattatcatactttaagttttcaggtacatgtgcacaatgtgcaggtttgttacatatgtatacacgtgccatgttggtgtgctgcacccattaactcatcatttagcattaggtatatctcctaatgctatccctccccctccccccaccccacaacagtccccggagtgtgatgttccccttcctgtgtccatgtgttctcattgttcaattcccatctatgagtgagaacatgcggtgtttggttttttgtccttgcgatagtttgctgagaatgatggtttccagtttcatccatgtccctacaaaggacgtgaacttatcattttttatggctgcatagtattccatggtgtatatgtgccacattttcttaatccagtctatcattgatggacatttggcttggttccaagtctttgctattgtgaatagtgccacagtaaacatatgtgtgcatgtgtctttatagcagcatgatttataatcctttgggtatatacccagtaatgggatggctgggtcaaatggtatttctagttctagatccctgaggaatcgccacactgacttccacaatggttgaactagtttacagtcccaccaacagtgtaaaagtgttcctatttctctacatcctctccagcacctgttgtttcctgactttttaatgattgccattctaattggtgtgagatggtatctcattgtggttttgatttgcatttctctgatggccagtgatgatgagcattttttcatgtgttttttgtctgcataaatgtcttcttttgagaagtgtttgttcatctcctttgcccactttttgatggggttgtttgtttgtttcttgtaaatttgtttgagttcattgtagattctggatattagccctttgtcagatgagtaggctgcgaaaattttctcccattttgtaggttgcctcttcactctgatggtagtttcttttgctgtgcagaagctctttagttgaattagaatccatttgtcaattttggcttttgttgccattgcttttggtgttttagacatgaagtccttgcccatgcctatctcctgaatggtattgcctaggttttcttctagggtttttatggttttaggtctaacatgtaagtctttaatccatcttgaattaatttttgtataaggtgtaaggaagggatccagtttcagctttctacatatggctagccagttttcccagcaccatttattaaatagggaatcctttcctcattgcttgtttttgtcaggtttgtcaaagatcagatggttgtagatatgcggcattatttctgagggctctgttctgttccattgatctgtatctctgttttggtaccagtaccatgctgttttggttactgtagccttgtagtatagtttgaagtcaggtagcgtgatgcctccagctttgttcttttggcttaggattgacttggtgatgcgggctctttttttggttccatatgaactttaaagtagttttttccaattctgtgaagaaagtcattggtagcttgatggggatggcattgaatctataaattaccttgggcaatatgtccattttcacgatattgattcttcctacccatgagcatggaatgttcttccatttgtttgtatccttttttatttcattgagcactggtttgcagttctccttgaagaggtccttcacatcccttgtaagttggattcctaggtattttattctctttgaagcaattgtgaatgggagttcactcatgatttggccctctgtttgtctgttattggtgtataagaatgcttgtgatttttgtacattgattttgtatcctgagactttgttgaagttgcctatcagcttaaggagattttggactgagacaatggggttttctagatatacaatcatgtcatctgcaaacagggacaacttgacttcctcttttcctaattgaatacccttcatttccttctcctgcctaattgccctggccagaacttccaacactatgttgaataggagtggtgagagagggcatccctgtcttgtgcctgttttcaaagggaatgcttccagtttttgcccattcagtatgatattggctgtgggtttgtcatagatagctcttattattttgagatacatctattgatacctagtttattgacagtttttagcatgaagggctgttgaattttgtcgaaggccttttctgcatctattgagataatcatgtggtttttgtctttggttctgtttatatgctggattacatttattgatttgcgtatgttgaaccagccttgcatcccagggatgaagcccacttgagcatggtggataagctttttgatgtgctgctggattcggtttgccaatattttattgaggatttttgcatcaatgttcatcaaggatattggtctaaaattctcttttttggttttgtctctgccaggctttggtatcatgatgatgctggcctcataaaatgaattagggaggattccctctttttctattgattggaatagtttcagaaggaatggtaccagctcctccttgtacctctggtagaattcggctgtgaatccatctggtcctggactttttttggttggtaagctattgattattgcctcaatttcagagcctgttattggtctattcagagatttgacttcttcctggtttagtcttgggaaggtgtatgtgtcgaggaatttatccatttcttctagattttctagtttatttgcgtagaggtgtttgtagtattctctggtggtagtttgtatttctgtgggatcggtggtgatatcccctttatcattttttattgcgtctatttgattcttctctcttttcttctgtattagtcttgctagcggtctatcaattttgttgatcttttcaaaaaaccagctcctggattcatgaatttttgaagggtttttttgtgtctctatgtcctttagttctgctctgatttttgttatttcttgccttctgctagcttttgaatgtgtttgctcttgcttttctagttcttttaattgtgatgttagggtgtcaattttggatctttcctgctttctcttgtgggcatttagtgctataaatttccctttatacactgctttgaatggatcccagagattctggtatgttgtatctttgttctcattggtttcaaagaacatctttatttctgccttcatttcattaggtacccagtagtcactcaggagcaggttgttcagtttccatgtagtggagcggttttgagtgggtttcttaatcctgagttctagtttgattgcactgtggtctgagagacagtttgttataatttctgttcttttacatttgctgaggagtgctttacttccaactatgtggtcagttttggaataggtgtgatgtggtgctgaaaaaaatgtatattctgttgatttggggtggagagttctgtagatgtctattaggtctgcttggtgcagagctgagttcaattcctggatatccttgttaactttctgtcttgttgatctgtctaatgatgacagtggagtgttaaagtcttcaattattattgtgtggaagtcaaagtctctttgtaggtcactaaggacttgctttatgaatctggatgctcctttattgggtgcatatgtatttaggatagttagttcttcttgttgaattgatccctttaccattatgtaatggccttctttgtctcttttgatctttgttggtttaaagtctgttttatcagagactaggattgcaacccctgcctttttttgttttccatttgcttggtagatcttcctgcatccctttattttgagcctatgtgtgtctccgcatgtgagatgggtttcctgaatacagcacactgatgggtcttgagtctttatccaatttgccagtctgtgtcttttaattggagcatttagcccatttacatttaaagttaacattattatgtgtgaatttggtcctgtcattatgatgatagctggtcattttgctcgttagttgatgcagtttcttcctagccttgatggtctttacattttggcatgtttttgcagtggctggtaccagttgttcctttccatgtttagtgcttccttcaggagctcttttagggcaggcctggtggtgacaaaatctctcagcatttgcttgtctgtaaagtattttatttctccttcacttatgaagcttagtttggctggatatgaaattctgggttgaaaattcttttctttaagaatgttgaatattggcccccactctcttctggcttatagagtttctgccgagagatctgctgttagtctgatgggcttccctttgtgggtaacccgacctttctctctggctgcccttaacattttttccttcatttcaactttggtgaatctgacaattatgtgtctgggagttgctcttctcgaggagtatctttgtggcgttctctgtatttcctgaatctgaatgttggcctgccttgctagattggggaagttctcctgcataatatcctgcagagtgttttccaacttggttccattctccccatcactttcaggtacaccaatgagacgtagatttggtcttttcacatagtcccatatttcttggaggctttgctcatttctttttattctcttttctctaaacttcccttctcctttcatttcattcattttgtcttccatcactgataccctttcttccagttgatcgcatcagctcctgaggcttgtgcattcgtcacatagttctcgaaccttggctttcagctccatcagctcctttaaggacttctctgcattggttattctagttatccattcgtctaattttttttcaaagtttttaacttctttgccattggtttgaatttcctcctgtagctcagagtagtttgatcgtctgaagccttcttctctcaactcgtcaaagtcattctccgtccagctttgttctgttactggtgaggagctgtgttcctttggaggaagagaggtgctctgctttctagggtttcctgtttttctgctctgttttttccccatctttgtggttttatctacttttggtctttgatgatggtgacatacagatgggtttttggtgtggatgtcctttctgtttgttagttttccttctaagagacaggacccttagctgcaggtctgttggagtttgctagaggtccactccagaccctgtttgcctgggtatcagcagcggtgtttgcagaacagtggtttttcgtgaaccgcaaatgctgctgtctgatcgttcctctggaagttttgtctcagaggagtacccggccgtgtgaagtgtcagtctgcccctactggggggtgcctcccagttaggctgcttaggggtcaggggtcagggacccacttgaggaggcagtctgcccgttctcagatctccagctgcatgctgggagaaccactgctctcttcaaagctgtcagacagggacatttaagtctgcagaggttactgctgtctttttgtttgtctgtgcgctgcccccagaggtggagcctacagaggcaggcaggcctccttgagctatgttgggctccacccagttcgagcttcccagctgctttgtttacctaagcaagcctgggcaatggcgggcgcccctcccccagcctggctgccgctttgcagtttgatctcagactgctatgctagcaattagggagactccgtgggcgtaggaccctctgtgccatgtgcgggatataatctcctggtgtgccgttttttaagcccgttggaaaagcgcagtattagggtgggagtgacccgattttccaggtgcagtctgtcacccctttctttgactaggaaagggaactccctgaccccttgaacttcccgagtgaggcaatgcctcatcctgcttcggctcacgcacggtgcgctgcacccactgtcctgcacccactgtctggcactccctagtgagatgaacctggtacctcagatggaaatgcagaaatcacccatcttctgcgtcgctcacgctgggagctgtagatcggagctgttcctatttggccatcttggctccaccct

SEQ ID NO: 10642 - DNA, 6918 bp, Homo sapiens
tttatttatttatttatttatttttttttttaattttttttttaaattatactttaagttttagggtacatgtgcacattgtgcaggttagttacatatgtatacatgtgccatgctggtgcgctgcacccactaacgtgtcatctagcattaggtatatctcccaatgctatccctcccccctcccccgaccccaccacagtccccagagtgtgatattccccttccagtgtccatgtgatctcattgttcaattcccacctatgagtgagaatatgaggtgtttggttttttgttcttgcgatagtttactgagaatgatggtttccaatttcatccatgtccctacaaaggacatgaactcatcattttttatggctgcatagtattccatggtgtatatgtgccacattttcttaatccagtctatcattgttggacttttgggttggttccaagtctttgctatcgtgaataatgccgcaataaacatacgtgtgcatgtgtctttatagcagcatgatttatagtcatttgggtatatacccagtaatgggatggctgggtcaaatggtatttctagttctagatccctgaggaatcgccacactgacttccacaatggttgaactagtttacagtcccaccaacagtgtaaaagtgttcctatttctccacatcctctccagcacctgttgtttcctgactttttaatgattgccattctaactggtgtgagatgatatctcatagtggttttgatttgcatttctctgatggccagtgatgatgagcattttttcatgtgttttttggctgcataaatgtcttcttttcagaagtgtctgttcatgtccttcgcccactttttgatggggttgtttgtttttttcttgtaagtttgtttgagttcattgtagattctggatattagctctttgtcagatgagtaggttgcaaaattttctcccatgttgtaggttgcctgttcactctgatggtagtttcttttgctgtgcagaagttctttagtttaattagatcccatttgtcaattttggcttttgttgccattgcttttggcgttttggacatgaagtccttgcccacgcctatgtcctgaatggtaatgcctaggttttcttctagggtttttatggttttaggtctaacgtttaaatctttaatccatcttgaattgatttttgtataaggtgtaaggaagggatccagtttcagctttctacatatggctagccagttttcccagcaccatttattaaatagggagtcctttccccattgcttgtttttctcaggtttgtcaaagatcagatagttgtagatatgtggcattatttctgagggctctgttctgttccattgatctatatctctgttttggtaccagtaccatgctgttttggttactgtagccttgtagtatagtttgaagtcaggtagtgtgatgcctccagctttgttcttttggcttaggattgacttggcgatgcgggctcttttttggttccatatgaactttaaagtagttttttccaattctgtgaagaaagtcattggtagcttgatggggatggcattgaatctgtaaattaccttgggcagtatggccattttcacgatattgattcttcctacccatgagcatggaatgttcttccatttgtttgcatcctcttttatttccttgagcagtggtttgtagttctccttgaagaggtccttcacatcccttgtaagttggattcctaggtattttattctctttgaagcaattgtgaatgggacttcactcgtgatttggctctctgtttgtctgttgttggtgtataagaatgcttgtgatttttgtacattgattttgtatcctgagactttgctgaagttgcttatcagcttaaggagattttgggctgagatgatggggttttctagataaacaatcatgtcgtctgcaaacagggacaatttgacttcctcttttcctaattgaataccctttatttccttctcctgcctgattgccctggccagaacttccaacactatgttgaataggagcggtgagggcatccctgtcttctgccagttttcaaagggaatgcttccagtttttgcccattcagtatgatattggctgtgggtttgtcatagatagctcttattattttgaaatacgtcccatcaatacctaatttattgagagtttttagcatgaagggttgttgaattttgtcaaaggctttttctgcatctattgagataatcatgtggtttttgtctttggctctgtttatatgctggattacatttattgatttgcgtatattgaaccagccttgcatcccagggatgaagcccacttgatcatggtggataagctttttgatgtgctgctggattcggtttgccagtattttattgaggatttttgcatcaatgttcatcaaggatattggtctaaaattctcttttttggttgtgtctctgcccggctttggtatcagaatgatgctggcctcataaaatgagttagggaggattccctctttttctattgattggaatagtttcagaaggaatggtaccagttcctccttgtacctctggtagaattcggctgtgaatccatctggtcctggactctttttggttggggaactattgattattgccacaatttcagagcctgttattggtgtattcagagattcaacttcttcctgggtttaatcttgggagagtgtatgtgtcgaggaatgtatccatttcttctaaattttctagtttatttgcatagaggtgtttgtagtattctctgatggtagtttgtatttctgtgggatcggtggtgatatcccctttaccattttttattgtgtctatttgattcttctctctttttttctttattagtcttgctagcggtctatcaattttgttgatcctttccaaaaaccagctcctggattcattgattttttgaagtgttttttgtgtctctattttcttcagttctgctctgattttagttatttcttgccttctgctagcttttgaatgtgtttgctcttgcttttctagttcttttaattgtgatgttagggtgtcaattttggatctttcctgctttctcttgtaggcatttagtgctataaatttccctctacacactgctttgaatgcgtcccagagattctggtatgtggtgtctttgttctcgttggtttcaaagaacatctttatttctgccttcatttcgttatgtacccagtagtcattcaggagcagattgttcagtttccatgtagttgagcggctttgagtgagattcttaatcctgagttctagtttgattgcactgtggtctgagagatagtttgttataatttctgttcttttacatttgctgaggagagctttacttccaactatgtggtcaattttggaataggtgtggtgtggtgctgaaaaaaatgtatattctgttgatttggggtggagagttctgtagatgtctattaagtccgcttggtgcagagctgagttcaattcctgggtatccttgttgactttctgtctcgttgatctgtctaatgttgacagtgggatgttaaagactcccattattaatgtgtgggagtctaagtctctttgtaggtcactcaggacttgctttatgaatcggggtgctcctgtattgggtgcataaatatttaggatagttagctcctcttgttgaattgattcctttaccatgacgtaatggccttctttgtctcttttgatctttgttggtttaaagtctgttttatcagagactaggattgcaacccctgcctttttttgttttccattggcttggtagatcttcctccatccttttatttcgagcctatgtgtgtctctgcacgtgagatgggtttcctgaatacagcacactgatgggtcttgactctttatccaacttgccagtctgtgtcttttaattgcagaatttagtccatttatatttaaagttaatattgttatgtgtgaatttgatcctgtcattatgatgttagctggtggttttgctcgttagttgatgcagtttcttcctagtctcgatggtctttacattttggcatgattttgcagcggctggtaccggttgttcctttccatgtttagcacttccttcaggagctcttttagggcaggcctggtggtgacaaaatctctcagcatttgcttgtctataaagtattttatttctccttcacttatgaagcttagtttggctggatatgaaattctggtttgaaaattcttttctttaagaatgttgaatattggcccccactctcttctggcttgtagggtttctgccgagagatccgctgttagtctgatgggctttcctttgagggtaacctgacctttctctctggctgcccttaacattttttccttcatttcaactttggtgaatctgacaattatgtgtcttggagttgctcttctcgaggagtatctttgtggcgttctctgtatttcctgaatctgaacgttggcctgccttgctagattggggaagttctcctggataatatcctgcagagtgttttccaacttggttccattctccacatcactttcaggtacaccaatcagacgtagatttggtcttttcacatagtcccatatttcttggaggcttttctcatttctttttattcttttttctctaaacttcccttctcgcttcatttcattcatttcatcttccattgctgataccctttcttccagttgatcgcatcggctcctgaggcttctgcattcttcacgtagttctcgagccttggttttcagctccatcagctcctttaagcacttctctgtattggttattctagttatacattcttctaaatttttttcaaagttttcaacttctttgcctttggtttgaatgtcctcccatagctcacagtaatttgatcgtctgaagccttcttctctcagctcgtcaaaatcattctccatccagctttgttccgttgctggtgaggaactgcgttcctttggaggaggagaggcgctctgcgttttagagtttccagtttttctgttctgttttttccccatctttgtggttttatctacttttggtctttgatgatggtgatgtacagatgggttttcggtgtagatgtcctttctggttgttagttttccttctaacagacaggaccctcagctgcaggtctgttggaataccctgccgtgtgaggtgtcagtgtgcccctgctggggggtgcctcccagttaggctgctcgggggtcaggggtcagggacccacttgaggaggcagtctgcccgttctcaggtctccagctgcatgctgggagaaccactgctctcttcaaagctgtcagacagggacacttaagtctgcagaggttactgctgtctttttgtttgtctgtgccctgcccccagaggtggagcctacagaggcaggcaggcctccttgagctatggtgggctccacccagttcgagcttcccggctgctttatttacctaagcaagcctgggcaatggcgggcgcccctcccccagcctcgttgccgccttgcagtttgatctcagactgctgtgccagcaatcagcgagattccgtgggcataggaccctctgagccaggtgtgggatatagtctcctggtgcgccgttttttaagccggtctgaaaagcgcaatattcgggtgggagtgacccgattttccaggtgcatccgtcacccctttctttgactcggaaagggaactccctgaccccttgcgcttcccaggtgagggaatgcctcgccctgcttcggctcgcgcacggtgcgcgcacacactggcctgcgcccactgtctggcactccctagtgagatgaacccggtacctcagatggaaatgcagaaatcacccgtcttctgcgtcgctcacgctgggagctgtagaccggagctgttcctattcggccatcttggctcctccccacagacattttttatttcaaaaacattagtagacatttttctatgttgaaaaaccatctgaaatttgtatagaacaataaaagactctgaatagtcaaagcaatcttgatcaaaaagaacaaagctagaggcattatacaactgacttcacaatacagtaaccaaaacagcatggtattggaataaaaacagccatataggctaatgaaacagaatacaaagcctagaaataaatctatgaatttacagtcaactgattttcaacatatgtatcaaaaacacatcttgagaaaaggacagtttcttcaataaatggggtcaggaaaactggatatccatgcacataaaaatgaaattagacccttatctctcaccacatacaaaaatcaactcaaaattgacagagacttaaatgtaagaccaaaactgtgaaacaattagaagaaaacatagggaaagtgcttcatgacattggtgtaggcaaggattttatggaaagccctgtaaagtatagacaacaaaagcggtgatagacaaatagaattacatcgaactaaaaagcatctgcacatcacaggaaacaatcaacagagtgaagagacaacccacagaatgggagaaaatatttgcaaactacacatccaacaaggggttaatatccaaaacagggaaataattcaaataactcaaaaaaaaaaaaaaagaaatgggcaaaagatctgcatggacatttctctgaagaagacatacaaatgggcaacaggtatacaaaataatactcaacatcactaatcatcagggaaatgcaaatcaaaaccacaataaaatatctcaccacagttagaaggatataatcaaa

SEQ ID NO: 10643 - DNA, 6078 bp, Homo sapiens
  SITE (100): n equals a,t,g, or c
  SITE (137): n equals a,t,g, or c
  SITE (142): n equals a,t,g, or c
  SITE (148): n equals a,t,g, or c
  SITE (151): n equals a,t,g, or c
ttatttttatttatttatttatttatttatttatttttaactttgtaaattttttttattatactttaagttttagggtacatgtgcacattgtgcaggntagttacatatggatacatgtgccatgctggtgcatngcacncactanctngtcatgtagcattagggatatcctccaatggctatcccttcccccctccccccaccccaccacagtccccagagtgtgatatttcccttcctgtgtccatgtgatctcattgttcaattcccacctatgagtgagaatacgcggtgtttggttttttgttcttgcggtagtttactgagaaagatgatttccaatttcatccatgtccctacaaaggacatgaactcatcattttttatggctgcatagtgttccatggtgtacatgtgccacattttcttaatccagtctatcattgttggacatttgggttggttccaagtctttgctattgtgaataatgccgcaataaacatacgtgtgcatgtgtctttatagcagcatgatttatagtcctttgggtatatacccagtaatgggatggctgggtcaaatggtatttctagttctagatccctgaggaatcgccacactgacttccacaatggttgaactagtttacagtcccaccaacagtgtaaaagtgttcctatttctccacatcctctccagcacctgttgtttcctgactttttaatgattgccattctaactggtgtgagatggtatctcattgtggttttgatttgcatttctctgatggccagtgatgatgagcattttttcatgtgttttttggctgcataaatgtcttcttttgagaagtgtctgttcatgtcctttgcccactttttgatggggttgtttttttttcttgtaaatttgtttgagttcattgtagattctggatattagccctttgtcagatgagtaggttgcaaaaattttctcccattttgtaggttgcctgttcactctgatggtagtttcttttgctgtgcagaagctctttagtttaattagatcccatttgtcaattttgtcttttgttgccattgcttttggtgttttggacatgaagtccttgcccatgcctatgtcctgaatggtaatgcctaggttttcttctagggtttttatggttttaggtctaaggtttaaggctttaatccatcttgaattgatttttgtataaggtgtaaggaagggatccagtttcagcttcctacatatggctagccagttttcccagcaccatttattaaatagggaatcctttccccattgcttgtttttctcaggtttgtcaaagatcagatagttgtagatatgcggcattatttctgagggctctgttctgttccattgatctatatctctgttttggtaccagtaccatgctgttttggttactgtagccttgtagtatagtttgaagtcaggtagtgtgatgcctccagctttgttcttttggcttaggattgacttggcaatgcgggctcttttttggttccatatgaactttaaaatagttttttccaattctgtgaagaaagtcattggtagctttatggggatggcattgaatctataaattaccttgggcagtatggccattttcatgatattgattcttcctacccatgagcatggaatgttcttccatttgtttgtatcctcttttatttccttgagcagtggtttgtagttctccttgaagaggtccttcacatcccttgtaagttggattcctaggtattttattctctttgaagcaattgtgaatgcgagttcactcatgatttggctctctgtttgtctgttattggtgtataagaatgcctgtgatttttgtacattgattttgtatcctgagactttgctgaagttgcttatcagcttaaggagatttggggctgagacaatggggttttctagatatgcaatcatgtcgtctgcaaacagggacaatttgacttcctcttttcctaattgaataccctttatttccttctccagcctaattgccctggccagaactgccaacactatgttgaataggagtggtgagagagggcatccctgtcttgtgccagttttcaaagggaatgcttccagtttttgcccattcagtatgatattggctgtgggtttgtcatagatagctcttattattttgaaatacgtcccatcaatacctaatttattgagagtttttagcatgaagggttgttgaattttgtcaaaggctttttctgcatctattgagataatcatgtggtttttgtctttggctctgtttatatgctggattacatttcttgatttgcgtatattgaaccagccttgcatcccagggatgaagcccacttgatcatggtggataagctttttgatgtgctgctggattcgttttgccagtattttattgaggatttttgcatcaatgttcatcaaggatattggtctaaaattctcttttttggttgtgtctctgcccggctttggtatcagaatgatgctggcctcataaaatgagttagggaggattccctctttttctattgattggaatagtttcagaaggaatggtaccagttcctccttgtacctctgatagaattcggctgtgaatccatctggtcctggactctttttggttggtaaactattgattattgccacaatttcagctcctgttattggtctattcagagattcaacttcttcctggtttagtcttgggagactgtatgtgtcgaggaatttatccatttcttctagattttctagtttatttgcgtagaggtgtttgtactattctctgatggtagtttgtatttctgtgggattggtgctgatatcccctttatcattttttattgtgtctatttgattcttctctttttttctttattagtcttgctagcggtctatcaattttgttgatcctttcaaaaaaccagctcctggattcattaattttttgaagggttttttgtgtctctatttccttcagttctgctctgattttagttatttcttgccttctgctagcttttgaatgtgttcgctcttgcttttctagttcttttaatggtgatgttagggtgtcaatgttggatctttcctgctttctcttgtgggcatttagtgctataaatttccctctacacactgctttgaatgtgtcccagagattctggtatgttgtgtctttgttctcgttggtttcaaagaacatctttatttctgccttcatttcgttatgtatccagtagtcattcaggagcaggttgttcagtttccatgtagttgagaggttttgagtgagattcttaatcctgagttctagtttgattgcactgtggtctgagagatagtttgttataatctctgttcttttacatttgctgaggagagctttacttccaactatgtggtcaattttggaataggtgtggtgtggtgctgaaaaaaatgtatattctgttgatttggggtggagagttctgtagatgtctattaggtctgcttggtgcagagctgagttcaattcctgggtatccttgttgactttctgtctcattgatctgtctaatgttgacagtggggtgttaaagtctgccattattaatgtgtgggagtctaagtctctttgtgggtcactcaggacttgctttatgaatctgggtgctcctgtattgggtgcatatatatttaggatagttagctcttcttgttgaattgatccctttaccattatgtaatggccttctttgtctcttttgatctttgttggtttaaagtctgttttatcagagactaggattgcaacccctgcctttttttgttttccatttgcttggtagatcttcctccatccttttattttgagcctatgtgtgtctctgcacgtgagatgggtttcctgaatacagcacactgatgggtcttgactctttatccaatttgccagtctgtgtcttttaattggagaatttagtccatttacatttaaagttaatattgttatgtgtgaatttgatcctgtcattatgatgttagctggtgattttgcttgttagttgatgcagtttcttcctagtctcggtggtctttacattttggcatgattttgcaacggctggtaccggttgttcctttccatgtttagcgcttccttcaggagctcttttagggcaggcctggtggtgacaaaatctctcagcatttgcttgtctgtaaagtattttatttctccttcacttatgaagcttagtttggctggatatgaaattctaggttgaaaattcttttctttaagaatgttgaatattggcccccactctcttatggcttgtagggtttctgccgagagatctgctgttagtctgatgggcttccctttgagggtaacccgacctttctctcaggctgcccttaacattttttccttcatttcaactttggtgaatctgacaattatgtgtcttggagttgctcttctcgaggagtatctttgtggcattctctgtatttcctgaatctgaacattggcctgccttgctagattggggaagttctcctggataatatcctgcagagtgttttccaacttggttccattctccccatcactttcaggtataccaatcagacgtagatttggtcttttcacatagtcccatatttcttggaggctttgctcatttctttttattcttttttctctaaacttcccttctcgcttcatttcattcatttcatcttccattgctgatactctttcttccagttgatcgcatcggctcctgaggcttctgcattcttcacctagttcttgagccttggttttcagctccattagctcctttaagcacttctctgtattggttattctagttatacgttcttctaaatttttttcaaagttttcaacttctttgcctttggtttgaatgtcctcccgtagctcagagtaatttgatcgtctgaagccttcttctctcagctcgtcaaagtcattctccatccagctttgttccgttgctggtgaggaactgcgttcctttggaggaggagaggcgctctgcgttttagagtttccagtttttctgttctgttttttccccatctttgtggttttatctacttttggtctttgatgatggtgatgtacagatgggtttttggtgtgaatgtcctttctgtttgttagttttccttctaacagacaggaccctcagctgcaggtctgttggaataccctgccttgtgagttgtcagtgtgcccctgctggggggtgcctcccagttaggctgctcgggggtcaggggtcagggacccacttgaggaggcagtctgcccattctcagatctccagctgcgtgctgggagaaccgctgctctcttcaaagctgtcagacagggacatttaagtctgcagaggttactgctgtctttttgtttgtctgtgccctgcccgcagaggtggagcctacagaggcaggcaggcctccttgagctgtggtgggctccacccagtttgagcttcctggctgctttgtttacctaagaaagcctgggcaatggcgggcgcccctcccccagcctcgctgccgccttgcagtttgatctcagactgctgtgctagcaatcagcgagactccgtgggcgtaggaccctccgagccaggtgcggaatataatctcgtggtgcgccgttttttaagccggtctgaaaagcgcaatattcgggtgggagtgacccgattttccaggtgcgtccgtcacccctttctttgactcagaaagggaactccctgaccccttgcgcttcccaagtgaggcaatgcctcgccctgcttcggctcgcgcacggtgcacgcacccactgacctgcgcccactgtctggcactccctagtgagatgaacccggtacctcagatggaaatgcagaaatcacccgtcttctgtgtcgctcacgctgggagctgtagaccggagctgttcctattcggccatcttggctcctcctcctcta

SEQ ID NO: 10644 - DNA, 6070 bp, Homo sapiens
ttatatttctttttttttttttggccaatttactttcttttttttttaattatactttaagttttagggtacatgtgcacaatgtgcaggttagttacatatgtatacatgtgccatgctggtgcactgcacccactaactcgtcatctagcattaggtatatctcccaatgctatccctcccccctccccccaccccacaacagtccccagagtgtgatattccccttcctgtgtccatgtgatctcattgttcaattcccacgtatgagtgagaatatgcagtgtttggttttttgttcttgtgatagtttactgagaatgatgttttccaatttcatccatgtccctacaaaggacatgaactcatcattttttatggctgcatagtattccatggtgtatatgtgccacattttcttaatccagtctatcattgttggacatttgggttggttccaagtctttgctattgtgaataatgccgcaataaacatacgtgtgcatgtgtctttatagcagcatgatttatagtcctttgggtatatacccagtaatgggatggctgggtcaaatggtatttctagttctagatccctgaggaattgccacactgacttccacaatggttgaactagtttacagtcccaccaacagtgtaaaagtgttcctatttctccacatcctctccagcacctgctgtttcctgactttttaatgattgccattctaactggtgtgagatggtatctcattgcggttttgatttgcatttctctgatggccagcgatgatgagcattttttcatgtgttttttggctgcataaatgtcttcttttgagaagtgtctgttcatgtccttcgcccactttttgatggggttgtttgtttttttcttgtaaatttgttggagttcattgtagattctggatattagccctttgtcagatgagtaggttgggaaaattttctcccattttgtaggttgcctgttcactctgatggtagtttcttttgctgtgcagaagctctttagtttaattagatcccatttgtcaattttggcttttgttgccattgcttttggtgttttagacatgaagtccttgcccatgcctatgtcctgaatggtaatgcctaggtttccttctagggtttttatggttttaggtctaacgtttaagtctttaatccatcttgaattgatttttgtataaggtgtaaggaagggatccagtttcagctttctacatatggctagccagttttcccagcaccatttattaaatagggaatcctttccccattgcttgtttttctcaggtttgtcaaagatcagatagttgtagatatgcggcgttatttctgagggctctgttctgttccattgatctatatctctgttttggtaccagtaccatgctgttttggttactgtagccttgtagtatagtttgaagtcaggtagtgtgatgcctccagctttgttcttttggcttaggattgacttggcaatgcgggctcttttttggttccagatgaactttaaagtagttttttccaattctgtgaagaaaggcattggtagcttgatggggatggcattgaatctgtaaattaccttgggcagtatggccattttcacgatattgattcttcctacccatgagcatggaatgttcttccatttgtttgtatcctcttttatttcattgagcagtggtttgtagttctccttgaagaggtccttcacatcccttgtaagttggattcctaggtattttattctctttgaagcaattgtgaatgggagttcactcatgatttggctctctgtttgtctgttgctgttgtataagaatgcttgtgatttttgtacattgattttgtatcctgagactttgctgaagttgctgatcagcttaaggagattttgggctgagacaatggggttttctagatatacaatcatgtcgtctgcaaacagggacaatttgacttcctcttttcctaattgaataccctttatttccttctcctgcctaattgccctggccagaacttccaacactatgttgaataggagtggtgagagagggcatccctgtcttgtgccagttttcaaagggaatgcttccagtttttgcccattcagtatgatattggctgtgggtttgtcatagatagctcttattattttgaaatacgtcccatcaatacctaatttattgagagtttttagcatgaagggttgttgaattttgtcaaaggccttttctgcatctattgagataatcatgtggtttttgtctttggctctgtttatatgctagattacatttattgatttgcatatattgaaccagccttgcatcccagggatgaagcccacttgatcatggtggataagctttttgatgtgctgctggattcggtttgtcagtattttattgaggatttttgcatcaatgttcatcaaggatattggtctaaaattctcttttttggttgtgtctctgcctggctttggtatcagaatgatgctggcctcacaaaatgagttagggaggattccctctttttctattgattagaatagtttcagaaggaatggtaccagttcctccttgtacctctggtagaattcagctgtgaatccatctgctcctggactctttttggttggtaagctattgattattgccacaatttcagatcctgttattggtctattcagagattcaacttcttcctggtttagtcttgggagagtgtatgtgtcgaggaatttatccatttcttctagattttctagtttatttgcatagaggtgtttgtagtattctctgatggtagtttgtatttctgtgggatcggtcgtgatatcccctttagcattttttattgcgtctattagattcttctctctttttttctttattagtcttgctagcagtctatcaattttgttgatcctttcataaaaccagctcctggattcatttattttttgaagggttttttgtgtctctatttccttcagttctgctctgattttagttatttcttgccttctgctagcttttgaatgtgtttgctcttgcttttctagttcttttaattgtgatgttagggtgtcaattttggatctttcctgctttctcttgtgggcatttagtgctataaatttccctctacacactgctttgaatgtgtcccagagattctggtatgttgtgtctttgttctcattggtttcaaagaacatctttatttctgccttcatttcgttatgtacccagtagtcattcaggagcaggttgttcagtttccatgtagttgagtggttttgagtgagattcttaatcctgagttctagtttgattgcactgtggtctgagatatagtttgttataatttgtgttcttttacatttgctgaggagagctttacttccaactatgtggtcaattttggaataggtgtggtgtggtgctgaaaaaaatgtatattctgttgatttggggtggagagttctgtagatgtctattaggtctgcttggtgcagagctgagttcaattcctgggtatccttgttgactttctgtctcgttgatctgtctaatgttgacagtggggtgttaaagtctcccattattaatgtgtgggagtctaagtctctttgtaggtcactcaggacttgctttatgaatcttggtgctcctgtgttgggtgcatatatattcaggatagttagctcttcttgttgaattgatccctttaccattatgtaatggctgtctttgtctcttttgatctttgttggtttaaagtctgttttatcagagactaggattgcaacccctgcctttttttgttttccatttgcttggtagatcttcctccatccttttattttgagcctatgtgtgtctctgcatgtgagatgggtttcctgaacacagcacactgatgggtcttgactctttatccaatttgccagtctgtgtcttttaattggagcatttagtccatttacatttaaagttaatattgttatgtgtgaatttgatcctgtcatgatgatgttagctggtgattttgctcattagttgatgcagtttcttctgagtcttgatggtctttacattttggcatgattttgcagcggctggtaccggttgttcctttccatgtttagcgcttccttcaggagctcttttagggcaggcctggtggtgacaaactctctcagcatttgcttgtctgtaaagtattttatttctcctttgcttatgaagcttagtttggctggatatgaaattctgggttgaaaattcttgtctttaagaatgttgaatattggcccccactctcttctggcttgtagggtttctgccgataaatctgctgttagtctgatgggcttccctttgagggtaacccgacctttctctctggctgcccttaacattttttccttcatttcaactttggtgaatctgaaaattatgtgtcttggagttgctcttctcgaggagtatctttgtggcgttctctgtatttcctgaatctgaacgttggcctgccttgctagattggggaagttctcctggataatatcctgcagagtgttttccaacttggttccattctccccatcactttcaggtacaccaatcagacgtagatttggtcttttcacatagtcccatatttcttggaggctttgctcatttctttttattcttttttctctaaacttcccttctcacttcatttcattcatttcatcttccatcgctgatatcctttcttccagttgatggcattggctcctgaggcttctgcattcttcacgtagttctcgagccttggttttcagctccatcagctcctttaagcacttctctgtattggttattctagttatacattcttctaaatttttttcaaagttttcaacttctttgcctttggtttgaatgtcctcccgtagctcagagtaatttgatcatctgaagccttcttctctcagctcgtcaaagtcattctccgtccagctttgttccattgctggtgaggaactgcattcctttggaggaggagaggcgctctgctttttagagtttccagtttttctgttctgttttttccccatccttgtggttttatctacttttggtctttgatgatggtgatgtacagatgggtttttggtgtggatgtcctttctgtttgttagttttccttgtaacagacaggaccctcagctgcaggtctgttggagtaccctgccatgtgaggtgtcagtgtgcccctgctggggggtgcctcccagttaggctgctcgggggtcaggagtcagggacccacttgaggaggcagtctgcccgttctcagatctccagctgcgtgctgggagaaccactgctctcttcaaagctgtcagacagggacatttaagtctgcagaggttactgctgtctttttgtttgtctgtgccctgcccccagaggtggagcctacagaggcaggcaagcctccttgagctgtggtgggctccgcccagttggagcttcgaggctgctttgtttacctcagcaagcctgggcaatggcgggcgcccctcccccagcctcgctgccaccttgcagtttgatctcagactgctgtgctagcaatcagcgagactccgtgggcgtaggaccctccgagccaggtgcggggtataatctcgtggtgcgccgttttttaagcccgtcggaaaagcgcagtattcgggtgggagtgacccgattttccaggtgccgtcagtcacccctttctttgactcggaaagggaactccctgaccccttgcgcttcccaagtgaggcaatgcctctccctgcttcggctcgcgcacggtgcgcgcacccactgacctgcgcctgctgtctggcactccctagtgagatgaacccggtacctcagatggaaatgcagaaatcaccgtcttctgcgtcgctcatgctgggagctgtagaccggagccgttcctattcggccatcttggctcctccaggccc

SEQ ID NO: 10645 - DNA, 6006 bp, Homo sapiens
cctttgtcagatggatagattgcaaaaatattcttccattctgtaggttgtctgttcactctgatgatagtttgttttgctgtgtagaagctctatggtttaatcagatccaatttgtcaatttttgcttttgttgtaactgcaaaaattgacaaattggatttcatgatgaaatctttgcctgtgcctgtgtcctaaatggtaatgcctagattttctactagggtttttatagttttgggttttacatataagtctgtaatccatcttgagttaatttttgtataaggtttaaggaaggggtccagtttcaattttctgcatatggctagccagttttcctagcaccatttattaaatagggaattctttccccattgtttgtttttgtcgggtttgacaaagatcaggtggttgtaggagtgtggtcttatttgtgagttctctattttgttccattggtctatgtgtctctttctgtacctgtaccatggtgttttggttactatagccttgcagtatagtttgaagtcaggtagtgtgatgactctggcttttttttttttttttttgcttaggattgtcttagctcctttttggttttatgtcagtttagaaattgtttttttttaaaattctgtgaagaatgtcaatgtttgtttaatgggaatagcattgaacctgtaaattactttgggcagtatggccattttcatgatattgattcttcccatccgtgagcatggaatgttatttcatttgtttgtgtcttctcttatttccttgaacagtggtttgtagttctaattgaagaagtcattcacttcccttataggctgtattcctaggtattttattctctgtgcagcaattgtgaatgggagttcattcatgatttggctttttgcttgtctgttgttgatgtataggaatgcttgtgatttttgcacattgattttgtatcctgagactttactgaagtttcttatcagcttaagaagctttagaactgagacaataggattttctagatatacgatgatgtcatctgcatagataacttgactttttcctctttctatttggatatgtttttttttttaacattgagataacttttattttttattttttattttttatttttttttaccttttttcattttattattattattattatttttcattatactttaagttctagggtacatgtgcacaacttgcaggtttgtcacatacgtatacatgtgccatgttggtgtgctgcacccattaactcgtcatttacattaggtatatctcctaatgctctccctcccccctccccccaccccacagcaggccccagtgtgtgatgtcccccttcctgtgtccatgtgttctcattgttcaattcccacctaggaatgagaacatgagatgtttagttttttgcccttgcgatggtttactgagaatgatggtttccagcttcatccatgtccctacaaaggacatgaactcatcattttttatggctagatagtattccatggtgtatatctgccattttcttaatccggtctatacattgttggacatttatgttggttccaagtctttgctattgtgaatagtgccgcagtaaacgtaagtgtgcatgtgtcttcatagcagcatgatttataatcctttgggtatatacccagtaatgggatggctgggtcaaatggtatttctagttctagatccctgaggaatcggcacactgtcttccacaatggttgaaccagtttacagtcccaccaacagtgtaaaagtgttcctatttctccacatcctctccagcacctgttgtttcctgactttttaatgatcgccattctaactggtgtgagatgctatctcattgtggttttgatttgcatttctctgatggccagtgatgatgagcattttttcatgtgtctgttggctgcataaatgtcttcttttgagaagtgtctgttcatatcctttgcctgcttgttgatggggttgtttgtttttttcttgtaaatttgtttgagttctttgtagattctgggtattagccctttgtcagatgagtagattgcaaaaattttctcccattttgtaggttgcctgttcactctgatggtagtttcttttgctgtgcagaagctctttagtttaattagatcccatttgtcaattttggctttggttgccattgcttttggtgttttagacatgaagtccttgcccatacctatgccctgaatggtattgcttaggttttcttctagggtttttatggttttaggtctaacgtttaagtctttaatccatcttgaattaatttttgtataaggtgtaaggaagggatccagtttcagctttctacatatggctagccagctttcccagcaccatttgttaaatagggaatcctttccccatttcttgtttttgtcaggtttgtcaaagatcagatagttgtagacgtgtggcattatttctgagggctctgttctgttccattggtctatatatttgttttggtaccagtatcatgctgttttggttactgtagccttgtagtatagtttgaagttaggaagtgtgatgcctccagctttgttcttttggcttaggattgacttggcaatgcgggctcttttttggttccatgtgaactttaaagtagttttttccaattctgtgaagaaagtcattggtagcttcatggggatggtattgaatctataaattaccttgggcagtatggccattttcacgatatttattcttcatatccatgagcatggagtgttcttcaatttgtttgtgtcctcttttattttattgagcaatgatttgtagttctccttgaagagatcctttacatcccttgtatgttggattcctaggtattttattctctttgaagcaattgtgaatgggagttcacacatgatttggatctctgtttgtctgttattggtgtataagaatgcttgtgatttttgcacattgattttgtatcctgagactttgctgaagttgcttatcagcttaaggagatttggggctgagatgatgaggttttctaaatatacaatcatgtcatctgcaaacagggacaatttgacttcctcttttcctaattgaataccctttatttctttctcttgcctgattgccctggccagaacttccagcactatgttgaataggagtggtgagagagggcatccctgtcttgtgccagtttcaaagggaatgcttccagtttttgcccattcagtatgatatttgctgtgggtttgtcatggatagctgttattattttgagatacgtcccatcaatacctaatttattgagaatttttagcatgaagcgctgttgaattttgtcaaaggccttttctgcatctattgagataatcatgtggtttttgtcgttggttctgtttatatgctggtttacatttattgatttgcgtatgttgaactggccttgcatcccagggatgaagcccacttgatcatggtggagaagctttttgatgtgctgctggattcggtttgccagtattttattgaggatttttgcataaatgttcatcacggatattggtctaaaattctcttttttggttgtgtctctgccaggctttggtatcatgatgatgctggcctcataaaatgagttagggaggattccctctttttctattgattggaatagtttcagaaggaatggtaccagctcctccttgtacctctggtagaattcggctatgaatccatctggtcttggcctttttttggttggtaagctgttaattattgcctcaatttcagagcctgttattggtctattcagagattcaacttcttcctggtttagtcttgggagagtgtatgtgttgaggaatttatccatttcttctagattttctagtttatttgcatagaggtgtttatagtattctctgatggtagtttgtatttctgtgggatcggtggtgatatcccctgtatcattttttgttgcatctatttgattcttctctcttttcttctttattagtcttgctagcggtctatcaattttgttgatcgtttcaaaaaaccagctcctggattcattgattttttgaagggttttgtgtttctctatctcctccagttctgctctgatcttagttatttcttgccttctgccagcttttgaatgtatttgctcttgcttctctagttcttttaattgtgatgttagggtgtcaattttagatctttcctgctttctcttgtgggcattcaatgctgtaaatttccctctacacattgctttaaatgtgacccagagattttggtatgttgtgtctttgttcttgttggtttcaaagaacatctttatttctgccttcatttcattatgtacccagtagtcattcaggagcaggttgttcagtttccatgtagttgagcagttttgagtgagtttcttaatcctgagttctaatttgattgcactgtggtctgagagacagtttgttataatttctgttcttttacatttgctgaggagtgctttacttccaactgtgtggtcaattttggagtaagtgcggtgtggtgctgagaagaatgtatattctgttgatttggggtggagagttctgtagatgtctattaggtccacttggtgcagagctgaaatcaattcctggatatcctcgttaactttctgtctcgttgatctgtccaatgttgacagtggggtgttaaggtctcccattattattgtgtgggaatctaagtctgtttgtaggcctctaaggacttgctttatgaatctgggtgctcctgtattgggtgcatgtatatttaagatagttggctcttcttgttgaattgatccctttaccattatgtaatggccttctttgtctcttttgatctttgttggtttaaagtctgttttatctgagactgggattgcaacccctgcctttttttgttttccatttgcttggtagatcttcctccatccctttattttgagcctatgtgtgtctctgcacatgagttgggtctcctgaatacagcacactgatgggtcttgactctttatccaatttgccagtctgtgtcttttaattggagctttcagcccatttacatttaaggttaatattgttatgtgtgaatttgatcctgtcattatgatgttagctggttattttgctcattagttgatgcagtttcttccttgcattgatggtctttacaatttggcatgtttttgcagtggctggtaccagttgttcctttccttgtttagtgctttcttcaggagctcttgtagggcaggcatgatggtgacaaaatctctcagcatttgcttgtctgtaaaggattttatttctccttcacttatgaagcttagtttggctggatatgaaattctggattgaaaattcttttctttaagaatgttgaatattggcccccactctcttctggcttgtagagtttctgctgagagatccactgttagtctgatgggcttccctttgtgggtgacccaacctttatctctggctgcccttaataatttttccttcatttcaactttggtgaatgtgacaattatgtgtcttggagttgctcttcttgtggagtatgtttgtggcattctctgtatttcctgaatcagaatgttggcctgccttgctaggttggggcaattctcctggataatatctcgcagagtgttttccaacttggttccattctccccatcactttcaggtacaccaatcagacgtagatttggtcttttcacatagtcccatatttcttcgaggctttgtttatttgtttttattcttttttctgtaaacttctgttcttgcttcatttcattcatttgatcttcaatcactgataccctttcttccacttgattgagtctgctactgaggcttgtgcattcatcacgtcgttctc

SEQ ID NO: 10646 - DNA, 5966 bp, Homo sapiens; identical to SEQ ID NO: 10501

SEQ ID NO: 10647 - DNA, 9478 bp, Homo sapiens
tcccaaagttctggcattacaggcgtgagccaccacgcccggcccctagtttacttttaagtggaaagatgagaaggggccatcagacaaggtgatgtgtctggcaacaagtgaagagatcatagatttcatttccacagataagtcaatacagttatttaggaaatgagaaatctctgactctggtctttgtgtaatattctatgatagcagaaacaaaaaattgaattgtgcctattgttaaaagtttactttgtttatgatttctactgtatgaaattatatgatctgggttatattaacacccagtgaaaccaaggggctgggttggtacactgaaagttattataatataattctcatgtgaggctaattgttactatatttgtttttaatttgactagaaatcccaatatttaatcaaaagtcttctcctctacctagagcttgttttatcgttttggtggcctcctcttgcaaaggactggctggtgaatggtttccctgaattatggacttaccctaaacatatcttatcatcattaccagttgcaaaatattagaatgtgttgtcactgtttcatttgattcctagaaggttagtcttagatatgttactttaacctgtatgctgtagtgctttgaatgcattttttgtttgcatttttgtttgcccaacctgtcaattatagctgcttaggtctggactgtcctggataaagctgttaaaatattcaccagtccagccatcttacaagctaattaagtcaactaaatgcttccttgttttgccagacttgttatgtcaatcctcaatttctgggttcattttgggtgccctaaatcttagggtgtgactttcttagcatcctgtaacatccattcccaagcaagcacaacttcacataatactttccagaagttcattgctgaagcctttccttcacccagcagagcaacttgattttctacaacttccctcatcagagccacaagagtatgggatatggagaccactaaaactacatccctttggccttaccagggaaatattgggaaggaaggaccttgtattactacctaatgaccccatagtattgtttgacagtctatacaaccagatgagcaggcaaggtagtaccctgctaaagagacaggctttctcatatctcataaatatttcacatcctggttctacatgctggttttattccatattagccatgaggtcttcagcaaattacttaatgtcattaaacctcaatttcttcatcctgaaaatgaggatgataataataagagtatatatctaataggcttattgtgaggattaaattaggtaatataggcaaagacctagcatacagtttgcttacaaacatcaacaaaagaaagagacaggaagagatgaagtgtgcaagagagagtgagagcaaccatcaatgtcagacagccaaaaaatgggcatatagatttttttataaatagacctcatatgtctcatttgcatgggcttttgggatgattaaagcctattgttctctaggattacttgaaatacacatttcctgcaggttacagcccaatggacacagaatgacttgtgtattagtccatccattctcacattgctatacagaattacctgagactgggtaatttgtaaagaaaagaggtttcattggctcatggttccacaggctatacaggacgcatcgatggggaggcctcaggaaacttacaatcatggcagaaggcgaaggggaagcaggcacatcctacatggctggagcaggaggaagagaaagcaaagggggaggtgccccacatacttttaaacaaccagatctcgtgaagactcactcactatcgtgagaacaccgcaggggaaatccacacccatgatccaatcacctcccatcagacccctcctccatcactggggattacaattcaacatgagatttggtggggacacggatccaaaccgtatcaacttgtatcattctgagtaattgcaactttcgaatgggtggtagggttggcaattgccaaaagccatggtttggagtcacttgcatcaggcctgggtttccccctggagcaggctgagcttggctgccttctaaggcctcttctgctctggacatttacaggcttctgagccaggagagaacactaagcaatgaaacacaggaggaaaaattaaaaacaccacctttaaattttggaaagtattttggagatacctgtgccctgctctctaaggagttcctgtagggatttctgcttatgaattccagtatattgtttctctttgggatgataaatggagtttctgttgccacaccttgccacagacccactttttgaaaaacactaaaatccactttgcaagtgtataaatattgcaggcaggcagcttccacattctttggcaagggaacaaaatactatttaataatgcaggttccagcttttctcctgacaatgcaaagtgccaatgattattgaaaagggaatttgaaatctgccagaatccactcagttttccttgtgtggttacatttccatcctgtcaccctcgctagtgaagacaattgtttcagccattgagaaaaaaaaaaaaaaggtattttataagattgcaagaaagtgatttaaaccatgactatgtctgttaactgtttgctttgtttctctgactgtgtgcctctctagtcacccaatcttctttagctatcctgtgggctttttcctgttgtcaaaaagcatggtctacccaaagccattcttcaagcatctgatttcccagctgtctttctgctatatatttaaacttctagttctctttggggaagagggtggtagacttgtgtgaggatatagtctgaatgaagtctccgagtgattttttgttgatgttataggggtgggagttcggggagaggagggagagtctttggcctcacactcccctctgagtcctgaatggggttctctcagcatctcattttcccgctattcctgacacactcctccctgaccctattttagaggtccctgttatcaaatggaagtgcttcttatgtcttccttcattctgctaagctgactgttctctatagaaatctgtacccccagcttttctaccaatgcgaatcttcgtttttggaaaatttcttttaccttctctaggaaatcattctctacatcactctatttctttagcaatcagggactacatttggatgtataagtatatacatattaagtttctagatattctttttctttttttaaaattattttttattttattattattatactttaagttttagggtacatgtgcacaatgtgcaggttagttacatatgtatacatgtgccatgctggtgtgctgcacccattaacacgtcatttagcattaggtatatctcctaatgccatccctcccccctccccccacgccacaatagtccccagagtgtgatgttccccttcctgtgtccatgtgttctcattgttcagttcccacctatgagtgagaacatgcggtgtttggttttttgtccttgtgatagtttactgagaatgatgatttccaatttcatccatgttcctacaaaggacatgaacttatcattttttatggctgcatagtattccatggtgtgtatgtgccacattttcttaacccagtctatcattgttggacatttgggttgcttccaagtctttgctattgtgaatagtgccacaataaatatacgtgtgcatgtgtctttatagcagcatgatttatagtcctttgggtatatacccagtaatgggatggctgggtcaaatggtatttccagttctagatccctgaggaatcgccacactgacttccacaatggttgaactagtttacagtcccaccaacagtgtaaaagtgttcctatttctccacatcctctccagcacctgttgtttcctgactttttaatgattgccattctaactggtgtgagatggtgtctcattgtggttttgatttgcatttctctgatggccagtgatggtgagcattttttcatgtgttttttggctgcataaatgtcttcttttgagaagtgtctgttcatgtccttcgcccactttttgatggggttgtttgttattttcttgtaaatttgtttgagttcattgtagattctggatattagccctttgtcagatgagtaggttgtgaaaattttctcccattttgtaggttacctgttcactctgatggtagttttttttgctgtgcagaagctctttagtttaattagatcccatttgtcaattttgtcttttgttgccattgcttttggtgttttagacatgaagtccttgcccatgcctatgtcctgaatggtaatgcctaggttttcttctagggtttttatggttttaggtctaacgtttaagtctttaatccatcttgaattaatttttgtataaggtgtaaggaagggatccactttcagctttctgcatatggctagccagttttcccagcaccatttattaaatagggaatcctttccccattgcttgtttttctcaggtttgtcaaagatcagatagttgtagatatgttgtgttatttctgagggctctgttctgttccgttgatctatatctctgttttggtaccagtaccatgctgttttggttactgtaggcttgtagtatagtttgaagtcaggtagtgtgattcctccagctttgttcttttggcttaggattgacttggtgatgtgggctcttttttggttccatatgaactttaaagtagttttttccaattctgtgaagaaagtcattggtagcttgatggggatggcattgaatctataaattaccttgggcagtatggccattttcacgatattgattcttcctactcatgagcatggaatgttgttccatttctttgtgtcctcttttatttcattgagcagttgtttgtagttctccttgaagaggtccttcgcatcccttgtaagttggattcctaggtattttattctctttgaagcaattgtgactgggagttcactcatgatttggctctctgtttgtctgtcattggtgtataagaatgcttgtgatttttgtacattgattttgtatcctgagactttgctgaagttgcttatcagcttaaggagattttgggctgagacagtggggttttctagatatacaatcatgtcatctgcaaaaagggacaatttgaattcctcttttcctaattgaataccctttatttccttctcctgcctaattgccctggccagaacttccaacactatgtcaaataggagtggtgagagagggcatccctgtcttgtgccagttttcaaagggaatgcttccagtttttgcccattcagtatgatattggctgtgggtttgtcatagatagctcttattattttgagatatgccccatgaatacctaatttattgagagtttttagcatgaagcgttgttgaattttgtcaaaggccttttctgcatctattgagataatcatgtggtttttgtctttggttctgtttatatgctggattccacttattgatttgcatatattgaaccagccttgcatcccagggatgaagcccacttgatcatggtggataagctttttgatgtgctgctggattcggtttgccagtattttattgaggatttttgcatcaatgttcatcaaggatattggtctaaaattctcttttttggttgtgtctctgcccggctttggtatcaggatgatgctggcctcataaaatgagttagggaggattccctctttttctattgattggaatagtttcagaaggaatggtaccagttcctccttgtacctctggtagaattcggctgtgaatccatctggtcgtggactctttttggttggtaagctattgattattgccacaatttcagctcctgttattggtctattcagagattcaacttcttcctggtttagtcttgggagggtgtatgtgtcgaggaatttgtccatttcttctaggtattctagttgatttgcgtagaggtgtttgtagtattctctgatggtagtttgtatttctgtgggatcagtggtgatatcccctttatcattttttattgcatctatttgattcttctctcttttcttctttattagtcttgctagtggtctatcaattttgttgatcctttcaaaaaaccagctcctggattctttaattttttgaagggttttttgtgtcactatttccttcagttctactctgattttagttatttcttgccttctgctagcttttgaatgtgtttgctcttgcttttctagttcttttaattgtgatgttagggtgtcaattttggatctttcctgctttctcttgtgggcatttagtgctataaatgtccctctacacactgctttgaatgtgtcccagagattctggtatgttgtgtctttgttctcgttgctttcatagaacatctttatttctgccttcgtttccttatgtacccagtagtcattcaggagcaggttgttcagtttccatgtagttgagtggttttgagtgagtttcttaatcctgagttctagtttgattgcactgtggtctgagagacagttttttataatttctgttcttttacgtttgctgaggagagctttacttccaactatgtggtcaattttggaataggtgtggggtggtgctgaaaaaaatgtatattctgttgatttgggttggagagttctgtagatgtctattaggtccacttggtgcagagctgagttcaattcctgggtatccttgttgactttctgtctcgttgatctgtctaatgttgacagtggggtgttaaagtctcccattattaatgtgtgggagtctaagtctctttgtaggtcactcaggacttgctttatgaatctgggtgctcctgtattgggtgcatgcatatttaggatagttagctcttcttgttgaattgatccctttaccattatgtaatggccttctttgtctcttttgatctttgttggtttaaagtctgttttatcagagactaggattgcaacccctgcctttttttgttttccatttgcttggtagatcttcctccatccttttattttgagcctgtgtgtgtcactgcacatgagatgggttcctgaatacagcacactgatgggtcttgagtctttatccagtttgccagtctgtgtcttttaattggagcatttagtccatttacatttaaagttaatgttgttatgtgtgaagttgatcctgtcattatgatgttagctggttattttgcttgttagttgatgcagtttcttcctagcctcgatggtctttacaatttggcatgattttgtagtggctggtaccggttgttcctttctatgtttagtgcttccttcaggagctcttttagggcaggcctgctggtgacaaaatctctcagcatttgcttgtctgtaaagtattttatttctccttcacttatgaagcttagtttggctggatatgaaattctgggttggaaattcttgtctttaagaatgttgaatatcggcccccactctcttctggcttgtagagtttctgcccagagatccgctgttagtctgatgggcttccctttgtgggtaacccaacctgcctctctggctgcccttaacattttttccttcatttcaacttcggtgaatctgacaattatgtgccttggagttgctcttctcgaggagtatctttgtggcgttctctgtatttcctgagtctgaatgttggcctgcctttttagattggggaagttctcctggataatatcctgcagagtgttttccaacttggttccattctccccgtcactttcagatacaccaatcagacgtagatttggtcttttcacatagtcccatatttcttggagtctttgttcatttctttttattcttttttctctaaacttcccttctcgcttcatttcattcacttcatcttccatcactgataccctttcttccagttgatcgcatcggctcccgaggcttctggattcttcacgtagttctcaagccttggctttcagctccatcagctcctttaagcacttctctgtattggttattctagttatacattcttctaaatttttttcaaagtttttaacttgtttgcctttggtttgaatttcctcctgtagctcagagtaatttgatcgtctgaagccttcttctctcaactcgtcaaagtcattctccgtccatctttgttctgttgctggtgaggaactgcattcctttggaggaggagaggcgctctgctttttagagtttccagtctttctgctctgttttttccccatctttgtggttttatgtacttttggtctttgatgatggtgatgtacagatgggtttttggtgtggatgtcctttctgtttgttagttttccttctaacagacaggacccttagctgcaggtctgttggagtttgctagaggtccactccagaccctgtttgcctgggtatcagcagcagtcgctgcagaacagcagattttcgtgaaccacaaatgctgctgtctgatctttcctctggaagttttgtctcagaggagtacccggcagtgtgaggtgtcagtctgcccctactggggggtgcctcccagctaggctgctcaggggtcaggggtcaggggtcagggacccatttgaggaggaagtctgcccattctcagatctccagctgcatgctgggagaaccactgctctcttcaaagctgtcagacagggacatttaagtctgcagaggttactgctgtctttttgtttgtctgtgccctgcacccagaggtggagcctacagaggcaggcaggcctccttgagctgtggtgggctccacccagttcgagcttcctggctgctttgtttacctaagcaagcctgggcaatggcgggtgcccctcccccagtctcgctcccaccttgcagtttgatctcagactgctgtgctagcaatcagcgagattccgtgggcgtaggaccctccaatccaggtgcgagatataatctcctggtgtgccgttttttaagcccgttggaaaagcacagtattagggtgggagtgacctgattttccaggtgccgtctgtcacccctttctctgactagcaaagggaactccctgaccccttgtgcttcccaagtgaggcaatgcctcaccctgctttggctcgcgcacggtgcactgcatccactgtcctgtgcccactgtctggcattccctagtgagatgaacccggtacctcagatggaaatgcagaaatcacccgtcttctgcgtcactcacgctgggagctgtagaccggagctgttcatattcggccaccttggctcgaccc

SEQ ID NO: 10648 - DNA, 1086 bp, Homo sapiens
ttatcctttaaggtttttttttttttttttgcatttatttatttatttattttcattatactttaagttttagggtacatgtgcacattgtgcaggttagttacatatgtatacatgtgccatgctggtgcgctgcacccactaactcgtcatctagcattaggtatatctcccaatgctatccctcccccctctccccacccctccacagtcccccgagtgtgatattccccttcctgtgtccatgtgatctcattgttcaattcccacctatgagtgagaatatgcggtgtttggtttttcgttcttgcgatagtttactgagaatgatgatttccaattccatccatgtccctacaaaggacatgaactcatcattttttatggctgcatagtattccatggtgtatatgtgccacattttcttaatccactctgtcattgttggacatttgggttggttcgaagtctttgctattgtgaataatgccgcagtaaacatacttgtgcatgtgtctttatagcagcatgatttatagtccttttggtatatacccagtaatgggatggctaggtcaaatggtatttctagttctagatccctgaggaattgccacactgacttccacaatggttgaactagtttacagtcccaccaacagtgtaaaagtgttcctatttctccacatcctctccagcacctgttgtttcctgacttttgaatgattgccattctaactggtgtgagatggtatctcattgtggttttgatttgcatttctctgatggccagtgatgatgagcattttttcatgtgtcttttggctgcataaatgtcttcttttgagaagtgtctgttcatgtccttcgcccactttttgatggggttgtttgtttttttcttgtaaatttgtttgagttcattgtagattctggatattagccctttgtcagatgagtaggttgcgaaaattttctcccattttgtaggttgcctgttcactctgatggtagtttcttttgctgtgcagaagctctttagtttaattagatcccatttgtcaattttgtcttttgttgccattg

SEQ ID NO: 10649 - DNA, 4933 bp, Homo sapiens
tttttttattggctttttttaaattattatactttaagttctagggtacatgtgcacaatgtgcaggtttgttacatatgtatacatgtgccatgttggtgtgctgcacaccattaactcatcatttacattcggtatatctcctaatgctatccctcccctatccaccaaccccatgacaggcccctgtgtgtgatgttccccttcctgtgtccatgtgttctcattgttcaattcccacctatgagtgagaacatgcggtgtttggttttttgtcctcgcgatagtttgctgagaatgatggtttccagcttcatccatgtccctacaaaggacatgaactcatccttttttatggctgcatagtactccatggtgtatatgtgccacattttcttaatccagtctatcattgctggacatttgggttggttccaagtctttgttattgtgagtagtgtcacaataaacatacatctgcatgtgtctttatagcaacaagatttataatcctttgggtatatacccagtaatgggatggctgggtcaagtggtatttccagttctagatccttggggaatcaccacactgtcttccacaacggttgaactagtttacagtcccaccaacagtgtaaaagtgttcctgtttctccacagcctctccagcacctgttgtttcctgactttttaatgatcaccattctaactgttgtgagatggtatctcgttgtggttttgatttgcatttctctgatggccagtgatgatgagcattttttcatgtgtctgttggttgcataaatgtcttcttttgagatgtgtctgttcatatcctttgcccactttttgatggggttgtttggttttttcttgtaaatttgtttgagttcattgtagattctggatattagccctttgtcagatgagtagattgcaaaaattttctcccattctgtaggttgcctgttcactctgatggtggtttcttttgctgtgcagaagctctttagtttaattagatcccatatgtcaattttggcttttgttgccattgctttttgtgttttagacatgaagtccttgcccatgcctatgtcctgaatggtattgcctaggtttacttctagggtttttatggttttaggtctaacatttaagtctttaatccatcttgaattaattttgtataaggtgtaaggaagggttccagtttcgtctttctacatatggctagccagttttcccagcaccatttattaaatagggaatcctttccccattgcttgtttttctcaggtttgtcaaagatcagatggttgtagatgtgtggggttatttctgagggctctgttctgttccattggtctagatatctgttttggtaccagtcccatgctgttttgattactgtaagccttgtagtatagtttgaagtcaggtagcatgatgcctccagctttgttctttttgcttaggattgtcttggcaatgcaggctctttcttggttccatatgaactttaaagtaattttttccaattctgtgaagaaagtcattggtagcttgatggggatggcattgaatctataaattaccttgggcagtatggccattttcacgatattgattcttcctatccatgagcatggaatattcttccatttgtttgtgccctcttttatttcattgagcagtggtttgtagttctccttgaagaggtccttcacatcccttataagttggattcctaggtattttattctctttgaagcaattgtgaatgggagttcactcatgatttggctctctgtttgtctcttcttgatgtataagaatgcttgtgatttttgcacattgattttgtaccctgagactttgctgaagttgcttttcagcttaaggagattttgggctgagacaatggggttttctagatatacaatcatgtcgtctgcaaacagggacaatttgacttcctcttttcctaattgaataccctttatttctttctcctgcctgaatgccctggccagaacttccaacactacgttgaataggagtggtgagagagggcatccctgtcttgtgccagctttcaaagggaatacttccagtttttgcccattcagtatgatattggttgtgggtttgtcataaatagctcttattattttgagatacgtctcatcagtaccaatttattgagaggttttagcatgaaggaccgttgaattttgctgaaggccttttaggcatctattgagataatcacgtggtttttgtctttggttctgtttatatgctggattaggtttatcgattttcgtatgttgaaccagccttgcatcccagggatgaagtccatttgatcatggtggataaactttttgatgtgctgctggatttggtttgccagtattttattgaggatttttgcattgatgttcatcagggatattggtctaaaattctcttgttttgttgtgtctctgccaggctttggtatcagggtgatgctggcctcataaaatgagttagggaggattccctctttttctattgattggaatagtttcagaaggaatggtaccagctcctccttgtacctctggtagaattcagctgtgaatccgtctggtcctggactttttttggttggtaagctattaattattgcctcaatttcagagcctgttattggtttattgagtgattcaatttcttcctggtttagtcttgggagggtgtatgtgcccgtgaatgtatccatttcttctagattttctagtttatttgtgtagaggtgtttatagtattctctgatggtagtttgtatttctgtgggatcggtggtgatatcccctttatcattttttattgcctctatttgattcttctctcttttcttctttattagtcttgctagcagtctatcaattttgttgatcttttcaaaaaaccagctcctggattcattgatttttttgaagggttttttgtgtctctatctcctccagttctgctctgatcttagttatttcttgccttctgctagcttttgaatgtgtttgctcttgcttgtctagttcttttaattgtgatgctagggtgtcaattttagatctttcctgctttctcttgtggtcttttagtgctataaatttccctctatacactgctttaaatgtgtcccagagattctggtatgttgtgtctttgttctcattggtttcaaagaacatctttatttctgccttcatttctttgtgtacccagtagtcattcaggagcaggttgttcagtttccatgttgttgagtggttttgagtgagtttcttaatcctgaggtctagtttgattgcactgtggtctgagagacagtttgttataatttctgttcttttacatttgctgaggagtgctttacttccaactatgtggtcaattttggtataagtgcaatgcggtgctgagaagaatgtatattctattgatttggggtggagagttctgtagatgtctattaggtccacttggtgcagagctgagttcaattcctgtatatccttgttaactttctgtctcgttgatctgtctaatgttgacagtggggagttaaagtctcccattattattgtgtgggagtctaagtctctttgtaggtctctaaggacttgctttatgaatctgggtgctcctgtattgggtgcatatatatttaggatagttagctcttcttgttgaattgatccctttaccattatgtaatggccttgtctcttttgatctttgttggttttgagtctgttttatcagaggctaggattgcaacccctgcctttttttgttttccatttgcttggtggatcttcctccattcctttattttgagcccatgtgtgtctctgcacatgagatgggtttcctgaatacagcacactgatgggtcttgactctttatccaatttgccagtctgtgtcttttaatgggagtatttagctcatttacatttaaggttaatactgttatgtgtgaatttgatcctgtcattatgatgttagctggttattttgctcattagttgatgcaatttcttcctagcatcgatggtctttacaatgtggcatgtttttgcagtggctggtgctggttgttcctttccatgtttagtgcttccttcaggagcctttgtagggcaggcctgatggtgacaaaatctctcagcatttgcttgtctgtaaaggattttatttctccttcacttatgaagcttagtttggctggatatgaaattctgggttgaaaattattttctttaccaatgttgaatattggcccccactctcttctggctcgtagagtttctgccgagagatcagctgttagtctgatgggcttccctttgtggataacccagcctttctctctggctgcccttaacattttttccttcatttcaactttggtgaatctgacaattatttgtcttggaattactcttctcgaggagtacctttgtggtgttctctgtatttcctgaatttgaacgttggcctgccttgctagattggggaagttctcctggataacatcctgaaaagtgttttccaacttggttcctttctccccatcactttcaggtacacccatgagacatagatttggtcttttcacatagtcccatatttcttggaggctttgttcgtttctttttactcttttttctctaaacttctcttcttacttcatttcattcatttgatcttcagtcactgataccctttcttccagttgatggaatttgctactgaagcttgtgcatttgtcacatagttctcgtgccatggttttcagctccatcaggtcatttaaggacttctctacactggttattccagttagccattcatctaatcttttttcaagatt

SEQ ID NO: 10650 - DNA, 23576 bp, Homo sapiens
tttaaattttttttatttttttattttattattattatactttaagttttagggtacatgtgcacagtgtgcaggttagttacatatgtatacatgtgccatgctggtgtgctgcacccattaactcgtcatttagcattaggtatatctcctaaaactatcccttccccctccccccaccccacaacagtccccagagtgtgatgttccccttcctgtgtccatgtgttctcattgttcaattcccacctgtgagtgagaacatgtggtgtctggttttttgtccttgcgatagtttactgagaatgatgatttccaatttcatctgtttatggatgtagatggcatttctctaccttcagtagcttcgtgggaccatcctttcatttcctctcctttcattttatctctcttccctttgtttcccttctgattcctcctttgccctgaaggaaagttatgaagctctaggtggcagagtgcaaatgggtaaagatggggtgttcattagcgcctgatgtattcactgtgtgtaaacccagcctacccatctcagagaccacctttgcctgaaatcctctatttaacatgtggcattcagagcagaagcgtctgaaaggcacatttcttccactaaacctccaagaggacaaacccagcaaggacatagtggatttatctgagtttaatggtattagcctgagaccagccatgatgtgccaaagacattggcaatttggaaaactaccaacagagtcctaatgtcagtcatgtctgtatagggctaccttggtgacttttttgctaaaattcagggacttagctggtctcctcagccaggcagttggagtgatttattttctgggactgaaatgaccagtggattcagtgaaagcaattagactgactttgtatagatactggaattttcctttcccatgattaacaaacagagtaattaagcctcgtttgtttgtgctcattctggaacagaacagctatggcaaagggggaggggaaaggggttgacttttctctggcactggaaatcaaaatgcacatttgtctttgtgtatacagaaagagagggaaaaagagaacaagaggggcagagaaggagagaggcagagaagaagtgaggcagagaacagaaattacctgctttagagagtggagtggggttgggactccctttccaggggttggaagattaaggcagcacttgggtctggaacactgctactgttccccaggtatggttaaatagatacatcttggcaacagattcagaatccccccccaagacctgtaattaaccgttacaattgcctatgttttccaaaatgaaaatttccttaaaacttaatccacatattttaaccttttaaatcttttgtaaagagataaatagcatgtgggggaagttaccccttcttgaagaatgacgattaacctgaactcagctataattataaggaaaggagaatctttagaaaagcaatggcagggtactaggttttatatcctgttgtacctagatttagagtattttggtttccattacagctgcctgagcatttcttcctctgtgtaagatgatttttagatttctcattcaccacatgctttaaattttaataacgttatagacatggaaggtcctgattttctgcctcttaccagtctcatcctcttacctcagctgctagaaactgttctctccacagtaagcctgtttgcatcctaaagccttcagcagtgagggtggaaatgggttcttgaatatcaggctcagagtggggacctgtgacctgctttccagatggaaaccatgagagccgtgcatgtagacatattcccaattgctgaaaacaaagaggtggtaagcacaggatggtgctggtggcgaagaaccatgtcttctcatttaacaaagactattcagaaaatagacattttagaacaaatctgaatgctaatagaatttctgaaaagggagagaatggatataaagtatactgtaatcaacactgggaagttctggtagaccaaaatgaatgtacagtttctgtgtggcagcctgcagccaagccagatggctgacagtgggccttaccttcactacctcttgagtatagacaatgaaaaaaattgagaacatggaaagagttttatcaagacttggaagatctttaaatcatccttgcatgtagtgcacaatcatggctcacacaccagctatcttgcttcccagttatgaaaatggagcactctgtccccacccccaacatgacccacaggaatctgtgtctcctggaaaggctggggactgcagtggccattgagaccaagtggaaaaaaaatctcagtgcacccagcaggccacttctctctagcaatatcaaagtgtgctgtttaggaaagccagcctcttccttagtttgagatcctctatttttatataatattaactctcatttcaatgtgaacatctgaacaaaaagttttttccaaatgaatagagccaaggggagatattgtattgagtgtggacagcagaatgagaaagaaaatgttttagtacttctagttccatttagtcttcttgatacttttctcttaggccaaaccactttgagtaacagaggtccttggctaagttccaggtggaaagaagcaaactggcattcagttccattctctttctcatcttgcccttttttgaggtagcactgactggtatgttaatttcactggttcatttttcatttaataaatatgtacctaagatttacttcatgggaagtgctgtgttagatgctagtgatgcaaagattaaaaagacaggttgcagcctggagtgactcctttgggtggaattaaggaagcatcaaggaatttagcaactcagtgggaaaggattggggtggagttctagagggggaatctgcttgagctgagatagggcagacaatgagcacgaggtgctcccagcaaggggaataggtcagacaaatgtgggtgagtgagagaatatagagggagccatgaagtaaatgatgaaataaatggagaagatgggaacgtgtacttttatcaagagttggagcatcttctcaattgtctttgcatgtagtgcataaaaccaaggctcatccatcagtcactcttggcctatggaaggtggggtctacatgaaatatgaccttggtgttatactaagcagttttgacttctaagtatttggtagggagcactgaaggatttgcagttgggacttacatgtccatattttcattttggaaaatgtattgtgaccctcagttctaaatgaccgagccttacttaaatcaccttatgcctaaaggaaattttgagtaaagttgaaatattctatgtcttctaaatagtaacctaaatttcatttagataattaaatatgtgtaactacctttctttctctctctctctcttttttttttttttggtctaagttggtctacagtgtctgaaagagttgaatggatttctttagaagcagaggaagtgtactttgatactgttggtgtgccatggatatacaagggcgcagggttagcctgggatgaatcattcacatgaattcagaaacattgctattaaatgaaaaaaatgtatttattatagagtagaatgcaattggcatgttttaaaaacaaacatgaggcatgaaggaagtttctactttgggctgaatctcaagcccttttgggtgggtgcctgcagtggggttgtcaagaagactgagaagcactgggctctgttgttgagcaaagccaagcacaagaaggtccttatgcaaagatggtgtgtcaggagaacatgtctgggtgttagttaatgcttgtggaactctcacaactccactagggggatgaggagctgggaaggtgggggttgtggtgggagggagagtcgtaattcttgtttcaaggcctggcttcttttttacaagatgattagctacatttagaaacctattctttacacattcttaattttgctggagttggaatatcttttcctcttctctgtgttggtattttatgagcagatcaactcaatctgttttcaataacattcaagttaatagtactatgacttagatgaaaagaaaattaaaagttatcaacagcttggtatacttaacccttcctaatgctgggcacattggctctcctttcctggatggactgagaaaattctggaaagtagttgcccaacaaaataggttagtactgtactgcacactttgttcagctttactgtgggcattgtcagatcaggttacagcataggatttaaaggtcaattatgccatgactttaggggaaagaaagagtgactagaaggttaaaaaaaacccctaagttttggcttttaaagacttatgaaattgtattccctttgtgacatttgatgaatcacttttcttaatttccattctgataataatctccctaacgttttcctaggaagctctttcatggcaaaaatactgtcctgtagatgcccgagagagttggggccagttatacagggtgggggagagttggggtagctactcctgtctctccgagttgatttgatactgcttccttgaatttactgaaattaagacacctgaagagattaaaattttgtggcataaaaacagtcacagctaggcatggaactggtttcagggagaatgaccaagttaggcatttagaggatgagaaccaaattacagatatacgaaaattagagaagccaaaatgaccccatgcattaatgaatggcctgagggaacatctgtggttgtctgcgtcttagcttacaaactgaatccagggacgttttcatcacaatgcctgcatctgaatagcatggaaggtcaccaggattaagagttttgacctgtcagcgcaatggggtttaggtttggtatctttatttttggtctgtaagctcttttgttcaaggcaaagttgatctctccctgagccaggccttgagtggaggtggactggcttcgtgtttctaattagtcagacactccccctgctcctgactactgatggatgtcatgttagttcaggaccccaagccctctctctctttgagctgcagtgcagggatccactttagtactgaactgtcatttgtatggttagcatggtggccggctgtcttgagattatgttagcagaccccctccctatccctggctcttgaccttttagcatacagcctcttggcattttcccaaatggaataatatatgtgtaagcacattgaacagcattatatgctgtttgctaatcagatgtggttgactgtaattatcttgcattcagttccttgttggtagatattctgtacaggtagttcattcgtattttggatcttgattaattttcacagtgccatatattgaccttgaaagaagtcttggtcagttttgaaaatctttaaccatgcaatggttagtccttcagccccaccatttactttggctgtctggcctcttacctgaagcatcttattacttgatctctacttcgaatgatctcttttccatcctttgggaaggacagtggcccttgtccctcaggggagaccctcctacatgctgtagctgtgaagctaaatgctcactggttcttactggtttaggggatatggggaggcctggcttgtcctggatccctatcttctactcatgcagtacttcctgtggttccatttaattgtacatttgtatgttggtcatttcaaccttgcttagtggccctctgtcctacttagagacagctaacttttttggctttctggaaaattccttgagatttgttgcagcattgcccactcctcagtcatgtaggccctgcctgtactgcttatcctagcttacattttaaatctcagtacctcaattcttatgatagccaattctatcttagtattatgacttcttgatgtccagcagaaaatattgcaatccattaacacacagagtagtgtagacagttaattgaatggaaatattactagatgtactttatagatgatgaacagattatgacattgtatagatataattgggttcttccttggagagattcatcaataataaaaacaacttttatttattgagaacatatgctggattgcataatgctctaaatatttcctctaacactttcaacctgtatggtgagcattggtatccccattttatagaggaaggacatgagatgcttgcctgaggtggaatcagtgttattgtgccagtatatctgacttcaaagtcagttttccattaggctgtgtggctatatattcacaaagaagaatcctagtggtgataattagtgacctactattggcaggagaagacactagcattctcttgaatgtacaccatatttgcttgtcaactgattgatccttttttgttatctgccagacgctgacatggtcttgaattttaaaggtaagtaagactcggctcttacctcaaacatttcatagttgagtgggggaaccacttgtttaatgtcactgattttttggtctgttttagaaaggtcatgaaactactacctttgagctttttcttattccaactcccttttttcccccccgataatggagaaaacttcttgccctaaagaaacgcaccttaagggatggcatggactattgtggatcttcatatgcttgtgggttttttttttctttaaacttattttgttactggagctgtgtgatcttttctttgaggtcaaattccacaaaaggagctaagattgtataattatgtttcacatctatagggcccctcatgatctataaaatgccttccatatacattatttgatttgcttctagaagggcaaatatttgatccctgtttcacagtggtacacttaggggccactcaagggtatgtgatgagctggacatgaccctgagttctccctgcctgtgacatacctccctttcaataagaggaagaggtgttgctggcagaagctttctggaagaatagaaggtgtattagaaggaaatgtggctatgtgcatccctattggtggggaaatagaaactaattgatgtacctcaccaggacaaatggtttggccaactggggcccagaaacaaagcagggggaagccatagaagtcggtgcctgaatcagctagggctgccataacgaaataccacagactgggtggctcatacaacagacatttattttcccatagttctggaggccaagaaggccaagatcaaggtgccagccaatttgggtcttggtgaggacccacctcctggcttacagacttttgccttctagttgtgtcctcccatggggatggggtggttagggcagaccaagttccatggtgccccttcctatatagggcactaatctcatcatgagagtcctactctcctgaactcatctaaccctaatcacctcccaaaggcacatctccaaataccgtcacactggaggttagggcttcaccatgaattttgtggggataccattcagtacatagcataatggtggagaggttaaaacatgtggaggaagatcgcactccaggatggtcagggcaagtgtgtgggtgtttaattgtgggcataaaaggcacaatcaacaaggttatagaaaacaatgtctcagtggtttgtttggactgcaagtaagaggaaagtgggacttgtgaatgcttggcataactcagctcttctctcaactcttggaaactcacagggtaaccagtccccctgaggaccagggaagctgtgacggatgggagagagtgttgtccccattgccataagcagaatgcagacgtgttatttatttatttttgaggctatacgaatatctgttgttttgaaatatattaggtccaaatttgaccccctgggaaagttttctgtcacttgagaggatactgctttatgtatgaccccactagaaagactaatccttggctgggcgcggtggctcatgcctgtgatcccagcactttgggaggctgaggcggccggatcacaaggtccggagttcaagaccagcctgaccaatatggtgaaactccgtctcttctaaaaatacaaaaaaatttagctgggcctgatggtgagtgcctatagttccagctacttgggaggctgaggcaggagaatcacttgaactgggaagcagaggatgcagtgagccaagatcgtgccactgtgctccagcctgggcgacagagcgagactccatctcacaaagaaagaccaatctttgtactttggcccaggtgcatggtgaagtgtatggtcttgtgttcttttgatatactcacctgattgagcagaatctcacacaagtcttcccttgcttccgaagttacaatgactcagtgacagctataaaagccttcttttcatggtaattataatcagacatctgaatacatttatgcatctatagcttctcagttttacacgtaaatagatgccatcagaagtattttgagggctgatttagctcgaagagggtccatttaaaacctattcttgtgttcccatcattttcggcagccaggcaactgaggtcagtgtgctcataaatggcttcgggtgagtgtgtgaattaaaagctcctctctgtgtgatgataacagggtattttctgctcacaattacagaagcatacattttgaaagtaaatagcctcatagttgttctttcaggtactaaagagccagtttatcaagaattaaggcccactgagttagggggcataaaagcagagtggacagggcagcctcaccaagatggagcttgagccaagcgtggtcctcctggccccttgtgggcagccagcaggctactgactctgtggtgcactaaggagctacctttttggactgcattacttaaacatcagagggtaagtattatgcacaaatctgaggaagattaagggatctgggttgctctgtaccgtgagagatgagattagctttccccagctggcgagactggagacattttaaaaagcattttaaccagagggttttctaagttctcctggaatccattaccatctattagctttgaaacactgactgccaaaaagatagggcagtgacagggcgatttgctctcctttctggtgaggtttgaatcccaaggtgccagatgagactggaagggctctccagacctgccgatagaggtagggagatattacacaaagcctgcttacaaatcgggcagctctacagtctcaaatataaaattcggtcattagcttacactgtcacgtttctagctgaatggcaagaggacttaagaccttctgtttggaaagtcagaaactaatgtttttgcttcaactcttaactcacaatgatgtcgtctcctgttgctgcacagtcctgtggagaaaatcagtcagtattcttgttttcctctggatggaggtgattttagagccattagtgcttctagaagcttccctcccctctgggtccctgaggggattcttttggtacaagtagacagagttgtcaacaggtgatcacggacctctgaaaatagtagtaaaagtagcaatcattattctgtgtgtcaggcactgtgccatgggcttttactctccaccgtatttaacacctcaaaatataataggaaagcccaccaacttggcatccattttggatatattttaaaactaaatttacacccatacatttatattttataattttagtatttttgataataaaatttgtttttttgatcacataaagtaaaaactatttgacatttcatctgtctgtaatgaccacaaatagcattttggtgctcattctttcatatatctctctctctttctgtctctctctacacatgcactggtgtgtggcatgggtataaatagattttcacaaattatattatatattttgtacttattgtacatagcttttaaaagttatgttttgttcctttccttccgttgatactcactccctgctcaccaccatcaaccagtgttgaacagcctagtttgtagatgtccacatttctatccatgtttatgtatatatttatgttttgttttctacaaaaagtcaccctccaaagcggtatttgtcatgtgcccaggatccattattcacaattcaaaatggtggacaagatattccaaaaaatgagattattgaaacatatattctctgtatgttacttttctcactcaacaatacctcatggactgcccttcctgatggtttagggctgactcactctgtaatggccttggaataggatatgaggtgggagaccaaccattttttttttttccatttgagtagtcagttgtgcatgtgccatttatcaataagctgttctctccaccatggatcacaagactcaccttgtcacgtagaagcttctgttgatactggaattgatttctgagttcatcagtcagttctgttgtttgttcctatgccatgttttcattttagtggatttaagtctggtatgatgctcccctcataattctttttcaaaagttttctgccaatttttggatatttgatattacctaaaaatgtattatatccacattaaaaattttgggattctaattaaatgtatatatgaattttgaatttatatgctttattttttcttttcctttttaatgacagtataatgctattgtaagttttttcaatttgcattacagatattttaaaaagccctaaacttttccagccacctgattaaattccttcattgattcgagtactttttatttttagagttggtgttcctaggagtatgaatatattattagcaagaagggaaaattttgtcttctcatttactctgtttatagtaactattttttcccctcaatttgaattataatgataacagcaggtatcccatcttattcctggcatttgattgtttggaatgatgtttgcaattgatttttgatgaatccatattcaagaggtttcttttattcctattttacttgaagttttattagaaatggctgttgaatttcaccaaatgcttttttagaacctattgatgtaaccaaccacttttactccgtgcatttgttgctctcatgaatgatggtaatggatttgctgatgtgaaaactgcctttctggagttgtccttgtttgatcattgacaatattcatttgatatagttttgggttttacttcataatgttttatttagaattttaacgaatatttacaaatgagattgctctgtagttttcttttattgtactgcctttaccagttttggttttaaggccaaaccagtttaatgatatggacttaggtgattttccctatgtttctattgttttgaataatttaaataacatttctttcctttaagttatatagaactctctgtgaaatcaactgtttttgccctctgctttttttttcctcttagaaaatcacttctcctatctctcctgtggtaactggtctattcaattttctacttgagtcagttttgttcctttatattttgtggaaagtcacaccaagaacttcagaatgctcttctctcttccccttctgcctgcagccctgcttcttcctaatgcctatgttttcttttgttcctgagtattactatacccttgaagtttgcctcttatttcagaaatctttaatatttatttacatgttctcagtcatggtatcattatccatttagatttcatagtgtatttgcaagatacccttctcaccactcttttctcctttcccctcccctgtccctggagatctctgctctgatttatttttgttgcattagagtctttcttggtgttttcctcagatgaagcatggggttgatttactattgaaactgcattattccaaagattttctttctaactgtataatcttgagaatgttatttaacttatctgggtctcagtctccttaactgtaaaatgggaattctaagaacagagaccttacaggaactttatgaagatgaaatgagttaatatatgcattctggttatctgttgctacattgtccttcagtagctgtgggacactggttccaggacaccctctgccctcccataccaaaatccacaagtgctcaagtcccttatataaaatggcttattatttgcatataacctttgcagctctcctatatactttaaatcatttctatattataatacctaatacaatgtaaatgctatgcaaacagttgttatactgtattttttatgttttaaaaaatatattctatctgtggttggttcacttcatcggtgtcgaacctgtggatatggagggccagcagtatataatgaactaccttaaaacagcagtgtgacaactatgtattattatctctcataggtctatgagttggctgggtttagctgggcagttcttgcttgggggctgtcatggttggagtcagatagcagcagtggctggagtcatctgaaggttcagctgggctgggagtcccagatggcttttttatttattgtttcagtgttcctccatgaggcctctgtctccatcagagtagcctggatttcttacctgctaactcaaggttcccagaggcagaaaactgctggtcttcataatgtcttggcccagaactggtgtagcagtgcttcaaccacattctatgaggtggaagaatacactctaccttgagttggaggagtggcacaagtagagagggagggaaggaattaatgatagccacatttatagacaaactaccacaataagtgaagtgcttagactagaatctggcactgaatgagtgctgtagaattattaactcagtgatattattgcagttgttaaattaccttcagaatttgcttttactctgagagctgaatgatgtcttgtatgagtatagaagtctaggactgtggttcttttctgtaagtaatgtgcagatgaagtgtgatgccagtctaatgacttttcctttgtaggcaagctgttatttttatctagaagctttcaggatttttcagtaaaagcagaaataagatagttatcaccacttattaacagacctttggaggttctagaaaatataagacaagaaaaggaagaagtagatgttgaaaaaaataaaatatcctctctgtgctgatgattatttttagcaagcccaggaaactccattaagaaaaaaaacaactaactagaattaaagagggaacacggtaagatgagacattacaagataaacatgtaaacacaatagcttttctttttttctattctagcaagtaccatagtttggattgatagaagtcttttataatatattcttaacctggtactggacgagctctttcagttcagttggatgagacttcttatgccaactgaagtcttttaaaaaagcagggatttttttctcttttatttcttcagttactgtctctcttccatatactcctttttctctattatttgcttggctgtgatatgacaattgccttttcatgggaagatttgttcttttgttgtaaagttctgtttttcctattgtagaagattatcctttatgatatgatgggaatagcaaagatggctttgtgtgtgtgtgtgtgtgtgtgtgtgtgtgtgtgtatgtgtatgtgcacactcgttttgttgtttttgtctcctggctgtcctgaaagtgttcccagcagattttcagagggatgctgctttccttactttcctgttactgaggaggctagagtggggaagggatgggggtagcagagaagctttcctggagacctccacaaaggacaggcagctagacctgctccagccctagccctctcatggggttgttgctgttcacagttcccaaacagctcgacctgaattgaactctgagggtgaatagaacaatgagaagcctggaaaccaacataaggggactcagccaccagaaaataataagcagaaggtaagtggtgcaagtcaaacagaatggatagaggagaaggtttaatcctaacaaaaaggtataaaataattccattgcaaaaaatgaagttttctagaatttaaacgagtagtttaaaaatgagacattcaatatatggaaaagatacccaagaaattgctaagagattacctccagagaggaggcaaagggatggctggggaccaaggtgagaagatgacttcctttattcattgacatttgccactatgccaaaatgatatatcatgtatatatgcagttatgtagttgaatggagaatgaagaggaaggtgttaaaaaaaaaatcaagcagtggtgttaggccagggtggaaatttcctgtttatgaattatagtagaatacaacatttaatttggaattaaaaaaaatacatcttttttttattttcttctaatgaaactgcaacagtgttattagtacctgtaactttgtcagcaatagaaatcaaaaatattttcatataatattacagttgttgcagacatcttgaatgtcatttatgttcatcagagcttaaagttataattgttcatagtaccaccactagagcttggtatttaatgtcataataaaagcacatgttattgagtttgtgtattttagtattttgatacttaaataggattggtttccttagtaatcctatggatttcactttatacatttaaacatattatatttggggtagggtctctagctttcattagactgccaaagggatcatgccctcaaaaaggtcaagaaacctatgggatatagggaccattggagtaaactattggcccagaagatcaagtggaagagcaaaaacatataaaaatataaaaataaaagtggaaaaaaaccaaataaaatataaataataaattataaaataaaatatataaattataagtatatggataaataaaaataagtacataatgaaataaataaaatcattagagggacataaagagacttggaggacagtctaacacacccaaaatgggaagaacagaatccttcataataaaaggataaatcttcccaacaaaggatggtggttgggaacattatgtctaataaggcttttgtcctttgttgttgctttatttggatgctcattttaagaaaaacacagcattggcaaagctttgttggaccacacttttgctggtccacaaaaccctccagctgacaacccacagatgcagggtggaaaagcctgtgtgactgtcggaggggagcagctgggtccttcccagcacactgcagctggagagagtgtcctggcagtgggaagtctcagcacaatggcctggtgcttttccacctgtgagaacagctagtgagtgatgcgtgcgctgcgttggcagcagctgcagtagtgtgtccactgtctgagcacttcttgccacttattctaccctcctgggttacccagctcttaccattcttatagggggtaatgaagacatggatttgagaacccttgaattgtttcctgctgatcgataggtcgcacatggctgtttacctagcaaacggaaagcaacatcagttcttgagactggtgactgtatgtgagaaaacgataaaaggatgggggcagggtgtgtgtgtgagtgaatgccgcattggtgtgtttacagttcagtgtctttccggagcatgagagacgaacaagtattgtttaaacgaatgctgtttaaaccctgggattatatagtcatgtgaacttttttggaggaaactgcaaatgttgctagccattgtaattgtgttagttcttgactaaatgtcgtatataaacttcctggtaacaattttaataacgtttgctacttaattataacagcattttacaaaagtgtcagggcatccttaatttatgttttgataagagtgaaagattcagaaagtttgctttcagttatctaaaacttggggccttctccagcatatgcaaacaaatagtaatgcttaaatgcactgtgtgtatgagatgggtttttgtttgtgtaaatctagatggatcctcactccgggggcttaactaaattgggatttacttttctcggtaatatgaagactggtagtgggtagctgaaagcaggtatgaaagctttgggggataccattctcatttcatctttccatacctcgtgctcccccaaatgacaaccatgcctttgggcttcttatctgtatttcaggcagctagaaggctgaaggacaaagaaggaaaagcaaaagtccagtgcaaagctttcttggaaggcctgctagtggcttccacttacatctcattgatcaggaatgcaccatatgtccatcagtatggatccatctagtggcttccacttacgtctcattgatcaggaatgtaccacatgaccatcagtatggttccatccagtggtttccacttacatctcattggtcaggaatgcaccacatgaccacctgtatggaattctgggaagtgtattttgggtcaggccggttgccaccctgaacaaaatttttctattcataatgaagaaggagtgattggatttgggatatgtaagcagaagtgccaggcacaggagccttcaccattcccctctatctttgttccagctgatttctgctcatctggaaggctctgtctgtgccatctcttccaggaagccctctgtgagccccaggtggggttaagtgtccattcttcgagcattgatggtactctgtatccacacatctcatattccctgtctttttccacatacacattttctatatctggtggaaatctctactttaggaatattacctcattatgcttgtaagtgccttgagagtaggatttgtgtccaatgtttattcccagatcttttatttttagtattattttaatttaaaatttttaaatctcaataggtttttggggaacaggtggtgtttggttacatgaataagttcttcagtggtgatttctgagattttggtgcacccaacacccgagtagtgtacactgtacccactgcatagtcttttatcccttgccaccccccaccccttcccccgaatccccaaagttcaatgtatcattcttacgcctttgcatcctcataacttagctccaacatatgagtgagaacatgtgatgtttggttttccacttctgagttacttcacttagaataatagtctctggatacctaattcatgagaggcttaaaacctagatgacgggttgacaggtgcagcaaaccaccatggcacatgtatacctatgtaacaaacctgcacgttctgcacgtgtatcccagaacttaaaaaaaaaaaagaataatagtctccaattccatccaggttgctgcaaatgccattatttcattcctttttatggctgaatagtattccatggtgtgtgtttgcgtgtgtgtgtgtgtgtgtgtgtgtgtattacatttcctttatccacatgttaactgatgggcatttgggctggttccatatttttacaattacaaattgtgctcctgtaaacatgcatgtgcaaatatctttttcatataatgacttattttcctctgggtagatacctagcagtgggattgctggatcaaatggtagatctatttttagttcacttaggaatctccacactgttttccatagtggctgcactagtttacattcccactaacagtgtagacgttttcccttttctccttggcatccatgccaacatctgttatttttgattatggccattcttgcaggagtgagttggtattatattgtggttttgatttgcatttccctgatgactagtgatgctgagcatttttccatatacttgttggctgtttgtgtatcttcttttgagaattgtctattcatgtccttagcccactttttttttatttttttattttattataattatactttaagttttagggtacatgtgcacaacgtgcaggtttgttacatatgtatacatgtgccatgctggtgtgctgcacccattaactcgtcatttagcattaggtatatctcctaatgctatccctcccccctcccccaaccgcacaacagtccccaaagtgtgatgttccccttcctgtgtccatgtgttctcattgttcaattcccacctatgagtgagaacatgcagtgtttggttttttgtccttatgatagtttactgagaatgatgatttccaatttcatccatgtccctacaaaggacatgaactcatccttttttatggctgcatagtattccacggtgtatatgtgccacattttcttaatccagtctatcattgttggacatttgggttggttccaagtctttgctattgtgaatagtgccgcagtaaacatatgtgtgcatgtgtctttatagcagcatgatttgtagtcctttgggtatatacccagtaatgggatggctgggtcaaatggtatttctagttctagatccctgaggaatcgccacactgacttccacaatggttgaactagtttacagtcccaccaacagtgtaaaagtgttcctatttctccacatcctttccagcacctgttgtttcctgactttttaatgattgccattctaactggtgtgagatggtatctcattgtggttttgatttgcatttctctgatggccagtgatggtgagcattttttcatgtgttttttggctgcataaatgtcttcttttgagaagtgtctgttcatgtccttcgcccactttttgatggggttgtttgttttttttcttgtaaatttgtttgagttcattgtagattctggatattagccctttgtcagatgagtaggttgtgaaaattttctcccattttgtaggttgcctgttcactctgatggtagtttctcttgctgtgcagaagctctttagtttaattagatcccatttgtcaattttggcttttgttgccattgcttttggtgttttagacatgaagtccttgcccctgcctatgtcctgaatggtaatgcctaggttttcttctagggtttttatggttttaggtctaacgtttaagtctctaatccatcttgaattaatttttgtataaagtgtaaggaagggatccagtttcagctttctacacatggctaaccagttttcccagcaccatttattaaatagggaatcctttccctattgcttatttttcccaggtttgtcaaagatcacatagttgtagatatgcgccattatttctgaaggctctgttctgttccattgatctatatctctgttttggtaccagtaccatgctgttttggttactgtaggcttgtagtatggtttgaagtcaggtggcgtgatgcctccagctttgttcttttggcttaggattgacttggcgatgcgggctcttttttggttccatatgaactttaaagtagttttttccaattctgtgaagaaaatcattgttagcttgatggggatggcattgaatctataaattaccttgggcagtatggccattttcacgatattgattcttcctacccatgagcatggaatgttcttccatttgtttgtatcctcttttacttcattgagcggtggtttgtagttttacttgaagaggtccttcacatcccttgtaagttggattcctaggtattgtattctctttgaagcagttgtgaatgggagttcactcatgatttggctctctgtttgtctgttattggtgtataagaatgcttgtgatttttgcacattgattttgtatcctgagactttgctgaagttgcttatcagcttaaggagattttgggctgagacagtggggttttctagatatacaatcatgtcgtctgcaaacagggacaatttgacttcctcttttcgtatttgaataccctttatttccttctcctgcctaatttccctggccagaacttcccacactatgttgaataggagtggtgagagagggcatccctgtcttgtgccagttttcaaagggaatgcttccagtttttgcccattcagtatgatattggctgtgggtttgtcatagataggtcttattattttgagatacatcccatcaatacctaattgattgagagtttttagcatgaagcgttgttgaattttgtcaaaggccttttctgcatctattgagataatcatgtggtttttgtctttggttctgtttatatgctggattacatttattaatttgcgtatattgaaccagccttgcatcccagagatgaagcccacttgatcatggtggataagctttttgatgtgctgttggatttggtttgccagtattttattgaggatttttgcatcaatgttcatcaaggctattggtctaaaattctcttttttggttgtgtctctgccaggctttggtatcaggatgatgctggcctcataaaatgagttagggaggattccctctttttctattgattggaatagtttcagaagcaatggtaccagttcctccttgtacctctggtagaatttggctgtgaatccatctggtcctggaccctttttggttggtaagctattgattattgccacaatttcagagcctgttattggtctattcagggattcaacttcttcctggtttagtcttgggagggtgtatgtgtcaaggaatttatccatttcttctagattttctagtttatttgcatagaggtgtttgtagtatcctgtgatggtagtttgtatttctgtgggattggtggtgatatccgctttatcattttttattggtctatttgattcttctctgttttcttctttattagtcttgctagtggtctatcaattttgttgatcctttcacaaaaccagctcctggattcattaattgtttgaagggttttttgtgtctctatttccttcagttctgctctgattttagttatttcttgccttctgctagcttttgaatgtgtttgctcttgcttttctagttcttttaattgtgatgttagggtgtcagttttggatctttcctgctttctcttgtgggcatttagtgctataaatttccctctacacactgctttgaatgtgtcccagagattctggtatgttgtgtctttgttctcattggtttcaaagaacatctttatttctgccttcatttcgttatgtacccagtagtcattcaggagcaggttgttcagtttccatgtagttgagcggttttgagtgagtttcttaatcctgagttctagtttgattgcactgtggtctgagagacagtttgttataatctctgttcttttacatttgctgaggagagctttacttccaagtatgtggtcaattttggaataggtgtggtgtggtgctgaaaaaaatgtatattctgttgatttggggtggagagttctgtagatgtctattaggtccacttggtgcagagctgagttcaattcctgggtatcttgttaactttctgtctcgttgatctgtctaatgttgacagtggggtgttaaagtctcccattattattgtgtgggagtctaagtctctttgtaggtcactcaggacttgctttatgaatctgggtgctcctgtattgggtgcatatatatttaggatagttagctcttcttgttgaattgatccctttaccattatgtaatggcctcctttgtctcttttgatctttgttggtttaaagtctgttttatcagagactaggattgcaacccctgccttatttgttttccatttgcttgatagatcttcctccatccttttattttgagcctatgtgtgtctctgcacgtgagatgggtttcctgaatacagcacactgatttgtcttgactctttatccaatttgccagtctgtgtcttttaattggagcatttagtccatttacatttaaagttaatattgttatgtgtgaatttgatcctgtcattatgatgttagctggttattttgctcgttagttgatgcagtttcttcctagcctcaatggtctttacaatttggcatgattttgcagtggctggtatcagttgttcctttccatgtttagtgcttccttcaggagctcttttagggcaggcctggtggtgacaaaatctctcagcatttgcttgtctgtaaagtattttatttctccttcacttatgaagcttagtttggctggatatgaaattctgggttgaaaattcttttctttaagaatgttgaatattggcccccactctcttctggcttgtagagtttctgccgagagatccactgttagtctgatgggcttccctttgtggttaacccgaccgttctctctggctgcccttaacagtttttccttcatttcagctttggtgaatctgacaattatgtgtcttggagttgctcttctggaggagtatctttgtggcgttctctgtatttcctgaatctgaattttggcctgccttgccagattggggaagttctcctggataatatcctgcagagtgttttccaacttggttccatcctccccatcactttcaggtataccaatcagacgtagatttggtcttttcacatagtcgcatatttcttggaggctttgttcgtttctttttattcttttttctctaaacttcccttctcgcttcatttcattcatttgatcttccatcactgataccctttcttccagttgatcgcgtcggctcctgaagcttctgcattctttgcgtagttctggagccttggctttcggctccatcagctcctttaagcacttctctgtattggttattctagttatacattcgtctaaatttttttcaaacttttcaacttctttgcctttggtttgaatttcctcctgtagctcggagtagtttgatcatctgaagccttcttctctcaacttgtgaaagtcatcctccttccagctttgttgcattgctggtgaggaactgcattcctttggaggaggagaggcactctggtttttagagtttccagtttttctgctctgttttttccccatctttgtggttttatctacttttggtctttgatgatggtgacgtacagatgggtttttggtgtggatgtcctttctgtttgttagttttccttctaacagacaggaccttcagctgcaggtctgttggagtttgctagaggtccactccagaccctgtttgcctgggtatcagcagcggtgtttgcaaaaccgcggattttcgtgatctgcgaatgctgctgtctgatcgttcctctagaagttttgtctcagaggagtacccggccgtgtgagttgtcagtctgcccctacttgggggtgcctcccagttaggctgctcgggggtcaggggtcagggacccacttgaggaggcagtctgcccgttctcagatctccagctgcgtgctgggagaaccactgttctcctcaaagctgtcagacagggacattt

SEQ ID NO: 10651 - DNA, 5647 bp, Homo sapiens
ttttttttaatactttttaaaattatactttaagttttagggtacatgtgcacattgtgcaggttagttacatacgtatacatgtgccatgctggtgcgctgcacccactaacgtgtcatctagcattaggtatatctcccagtgctatccctcccccctcccccgaccccaccacagtccccagagtgtgatattccccttcctgtgtccatgtgatctcatggttcaattcccacctatgagtgagaatatgcggtgtttggttttttgttcttgcgatagtttactgagaatgatggtttccaatttcatccatgtccctacaaaggacatgaactcatcattttttatggctgcatagtattccatggtgtatatgtgccacattttcttaatccagtctatcattgttggacatttgggttggttccaagtctttgctattgtgaataatgccgcaataaacatacgtgtgcatgtgtctttatagcagcatgatttatagtcatttgggtatatacccagtaatgggatggctgggtcaaatggcatttctagttctagatccctgaggaatcgccacactgacttccacaatggttgaactagtttacagtcccaccaacagtgtaaaagtgttcctatttctccacatcctctccagcacctgttgtttcctgactttttaatgattgccattctaactggtgtgagatgatatctcatagtggttttgatttgcatttctctgatggccagtgatgatgagcattttttcatgtgttttttggctgcataaatgtcttcttttgagaagtgtctgttcacgtccttcgcccactttttgatggggttgtttgtttttttcttgtaaatttgtttgagttcattgtagattctggatattagccctttgtcagatgagtaggttgcgaaaattttctcccatgttgtaggttgcctgttcactctgatggtagtttcttttgctgtgcagaagctctttagtttaattagatcccatttgtcaattttggcttttgttgccattgcttttggtgttttggacatgaagtccttgcccacgcctatgtcctgaatggtaatgcctaggttttcttctagggtttttatggttttaggtctaacgtttaaatctttaatccatcttgaattcatttttgtataaggtgtaaggaagggatccagtttcacctttctacatatggctagccagttttcccagcaccatttattaaatagggaatcctttccccattgcttgtttttctcaggtttgtcaaagatcagatagttgtagatatgcagcattatttctgagggctctgttctgttccattgagctatatctctgttttggtaccagtaccatgctgttttggttactgtagccttgtagtatagtttgaagtcaggtagcgtgatgcctccagctttgttcttttggctgaagattgacttggcaatgcaggctcttttttggttccatatgaactttaaagtagttttttccaattctgtgaagaaagtcattggtagcttgatggggatggcattgaatctgtaaattaccttgggcagtatggccattttcacgatattgattcttcctacccatgagcatggaatgttcttccattcgtttgtatcctcttttacttccttgagcagtggtttgttgttctccttgaaaaggtccttcacgtcccttgtaagttggattcctaggtattttattctctttgaagcaattgtgaatgggagttcactcatgatttgtctctctgtttgtctgttattggtgtataagaatgcttgtgatttttgcacattgattttgtatcctgagactttgctgaagttgcctatcagcttaaggagattttgggctgagacagtggggttttctagatatacaatcatgtcatctgcaaacagggacactttgacttcctcttttcctaattgaataccctttatttccttctcctgcctgattgccctggccagaacttccaacactatgttgaataggagtggtgagagagggcatccctgtcttgtgccagttttcaaagggaatgcttccagtttttgcccattcagtatgatattggctgtgggtttgtcatagatagctcttattattttgagctacgtcccatcaatacctaatttattgagagtttttagcatgaagtgttgttgaattttgtcaaaggccttttctgcatctattgagataatcatgtggtttttgtctttggttctgtttatatgctggattacatttattgatttgcgtatattgaaccagccttgcatcccagggatgaagcccacttgatcatggtggataagctttttgatgtgctgctggatttggtttgccagcattttattgaggatttttgcattgatgttcatcagggatatgggtctaaagttctctttttttgttgtgtctctgccaggctttgctatcaggatgatgctgggctcataaaatgagttagggaggattccctctttttctattgattggaataatttcagaaggaatggtaccagctcctccttgtacctctggtagaattcggctgtgaatccatctggtcctggactttttttggttggtaagctattaattattgcctcaattcagagcctgttattggtctattcagaaattcaacttcttcctggtttagtcttgggagggtgtatgtgtcaaggaatttatccatttcttctagattttctagtttatttgcatagaggtgtttatagtattctctgatggtagtttgtatttctgtgggatcggtggtgatatcccctttatcattttttattgcatctatttgattcttctctcttttctttttattagtcttgctagcgttctatcaattttgttgatcttttcaaaaaaccagctcctggattcattgattttttgaagggtttttttgtgtctctatttccttcagttctgctccgatcttagttatttcttgccttctgctagcttttgaacgtgtttgctcttgcttctctagttcttttaattgtgatgttagggtgtcaattttagatctttccttctttctcttgtgggcatttagtgctataaatttccctgtacacgctgctttgaatgtgtcccagagattctggtatgttgtgtctttgttcttgttggcttcaaagaacatctttatttctgccttcatttcgttatgtacccagcagtcattcaggagcaggttgttcagtttccaagtagttgagcggttttgagtgagtttcttaatgctgagttctagttggattgcactgtggtctgagagacagtttgttataatttctgttgttttacatttgctgaggagtgctttacttccaactatgtggtcaattttggaataggtgtggtgtggtgctgaaaagaatgtatattctgtggatttggggtggagagttctgtagagtctgttaggtctgcttggtgcagagctgagttcaattcctggatatccttgttaacttcctgtctcgttgatctgactaatgttgacagtggggtgttaaagtctcccattattattgtgtgggagtctcagtctctttgcaggtctctaaggacttgctttatgaatctgggtgctcctgtattggatgcatatatacttaggatagttagctcttcttgttgaattggtccctttaccattatgtaatggccttctttgtctcttctgatctttgttggtttaaagtctgttttatcagagactaggattgcaacccctgcctttttttgttttccattttcttggtagatcttcctccatccctttattttgagcctatgtgtgtctctgcacgtgagatgggtttcctcaatgcagcacactgatgggtcttgactctttatccaatttgccagtctgtgtcttttaattggagcatttagcccatttacatttaaggttagtattgttatgtgtgaatttgatcgtgtcattatgatgttagctggttattttgctcattagttgatgcagtttcttcctagcctcgatggtctttacaatttggcatgtttttgcagtggctggtactggttgttcctttccatgtttagtgcttccttcaggagctcttttagggcaggcctggtggtgacaaaatctctcagcatttacttgtctgtaaaggattttatttctccttcacttatgaagcttagtttggctggatatgaaattctgggttgaaaattcttttctttaagaatgttgaatattggcccccactctcttctggcttgtagagtttctgccgagaaatcagctgttagtctgatgggcttccctttgtgggtaacccaacctttctctctggctgcccttaacattttttccttcatttcaacgttggtgaatctgaaaattatgttcttggagttgctgttctcgaggagtatctttgtggcattctctgtatttcctgaatttgaatgttggcctgccttgctagattggggaagttctcctggataatatcctgaagagtgttttccaacttggttccattctccccatcactttcaggtacaccaatcagacgtagatttggtcttttcacatagtcccatatttcttggaggctttgttcatttctttttattcttttttctctaaacttctcttctcacttcatttcattcatttcatcttccatcactgataccctttcttctagttgatcaaatcggctactgaggcttgtgcattcgtcatgtagttctcgtgccttggttttcagctccatcaggtcctttaaggacttctatgcattggttattctagttagccatttgtctaattttttttcaaggtttttaacttctttaccatgggttcgaacttccttctttagcttggagtagtttgatcatctgaagcgttcttctctcaactcgtcaaagtcattctccatccagctttgttctgttgctggtgaggagctgtgttcctttggaggaggagaggcgctctgatttttagagtttccagtttttctgctctgttttttccccatctttgtggttttatctacctttggtctttgatgatggtgacatacagattgggttttggtgtggatgtcttttctgtttgttagttttccttctaacagtcaggaccctcagctgcaggtctgttgaagtttgctggaggtccactccagaccctgtttgcctgggtatcagcagcagaggctgcagaacagcggatattggtgaaccgcaaatgttgctgcctgatcgttcctctggaagttttgtctcagaggaatacctggccgtgtgaggtgtcagtctgcccctactcgggggtgcctcccagttaggccacttgggggtcagggacccacttgaagaggcagtctgtcctgtccattctcagatctccagctgcgtgctgggagaaccactactctcttcaaagctgtcagacagggacatttaagtctgcagagatttctgctgccttttgttcggctatgccctgaccccagaggtggagtctacagaggcaggcaggcctctttgag

SEQ ID NO: 10652 - DNA, 4842 bp, Homo sapiens
tttgtttaattttttttttaattatacttttaagttctagggtacatgtgtacaacgtgcaagtttgttacatatgtatacaagtgccatgttggtgtgctgctgctgtacccattaactcgtcatttatattaggtatatctcctaatgctatccctcccccctccccccaccccacaacaggccctggtgtgtgatgttccccaccctgtgtccaagtattctcattgttcaattcccacctatgagtgagaatgtgcagtgtttggttttctgtccttgtgatagtttgctcagaatgatggtttccagcttcatccatgtccctgcaaaggacatgaactcatccttttttatggctgcatagtattccatggtgtatatgtgccacattttcttaatccagtctatcattgttggacatttgggttggttccaagtctttgctattgtgaatagtgccacagtaaacatacgtgtgcatgtgtctttatagcagcatgatttataatcctttgggtatatacccagtaatgggattgctgggtcaaatggtatttctagttctagatctctgaggaatcgccacactgtcttccaccatggttgaactagtttacagtccaaccagcaatgtaacagtgttcctatttctccacatcctctccagcacctgttgtttcctgactttttaatgattgccattttaactggtgtgagatggtatctcattgtggttttgaattgcatttctctgatgaccagtgatgatgagcattttctcatgtgtctgttggctgcataaatgtcttcttttgagaagtgtctgttcatatcctttccctactttttgatggggttgtttgattttttcttgtaaatttcagttcttcgtagattctggatattagccctttgtcagatgggtagattgcaaaaattttctcccattctgtaggttgcctgttcactctgatggtagtttcttttgctgtgcagaagctctttagtttaattagatctcatttgtcaatttcagcttttgttgccattgcttttggtgttttagtcatgatgtccttgcctatgcctatgtgctgaatggtattgcctaggttttcttctagggtttttatggttttaggtctaacatttaagtctttaatccatcttgaattaatttttgtataaggtgtaaggaagggatccagtttcagctttctacatatggctagccagttttcctagcaccatttattaaatagggaatcctttccccatttcttgttttggtcaggtttgtcaaagatcagatggttgtagatgtgtggtattatttctgagggttctgttctgttccattggtctatatctctgttttggtaccattaccatgctgtttttgttactgtagccttgtagtatagtttgaagtcaggtagcatgatgcctccagctttgttctttttgcttaggattgtcttggcaatgtgggctcttttttggttccttatgaactttaaagtagttttttccaattctgtaaagaaagtcattggtggcttgatggggatagcattgaatctataaattatcttgggcagtatggccattttcacgatattggttcttcctacccatgaacatgggatgttcttccatttgtttgtgtcttcctttatttccttcagcagtggtttgtagttcttgaagagttccttcacatcccttttaagttggattcctaggtattttattctctttgaagcaattgtgaatgagagttcactcatgatttggctctctgtttgtctgttattggtgtataggaatgcttgtgatttttgcacattgattttatatcctgagactttgctgaagttgcttatcagcttagggagattttgggctgagatgatggggttttctaaatatacagtcatgttatctgcaaacagggacaatttgacttcctcttttcctaattgaataccctttatttctttctcctgcctgattgccctgggcagaacttccagcactatgttgaataggagtggtgagagagggcatccttgtcttgtgccagttttcaaagggaatgcttccagtttttgtccattcagtatgatattggctgtgggtttgtcataaatagctcttattattttgagctacatcccatcaatacctagttaattgagagtttttagcatgaagggttgttgaattttgtcaaaggccttttctgcatctgttgagttaatcatgtgatttttgtctttggttctgtttatatgatggattacatttattgatttccatgtgttgaaccagccgtgcatcccagggatgaagccaacttgatcgtggtgggtaagctttttgatgtgctgctggattcggtttgccagtattttattgaggatttttgcatcaatgttcatcagggatattggtctaaaattctcttgttttgttgtgtctctgccaggctttggtatcagaatgatgctggcctcataaaatgagttagggaggattccctctttttctgttgattgggacagtttcagaaggaatggtaccagctcctctttgtacctctggtaaaattcatctgtgaatctgtctggtcctggactttttttggttggtaggctattaattattgcctcaatttcagagcctgttattggtctattcagagattcaacttcttcctggtttagtcttgggagggtgtatgtgtccaggaatttatccatttcttctggattttctagtttatttgcgtagaggtgtttatagtattctctgatggtagtttgtatttctgtgggattggtggtgatatcccctttatcaatttttttgcatctatttttttcttctctcttttcttctttattagtcttgctagtggtctatcaattttgttgatcttttcaaaaaaccagctcctgaatttattgattttttttttttgaagggttttttgtgtctctgtctccttcagttctgctctgattttagttatttcttgccttctgctagcttttgaatggtttgctcttgcttctctagttcttttaattgtgatgttagggtatcaattttagatctttcttactttttcttgtgggcatttagtgctataaatttccctgtacacactgctttaaatgtgtcccagagattctggtatgttgtgtctttgttctcattggtttcaaagaacatctttatttctgccttcatttcgttatgtacccagtagtcattcaggagcagattgttcagtttccatgtagttgagcagttttgagtgagtttcttaatcctgagttctaattcgattgcactgtggtctgagagccagtttgttataatttctgttcttttacatttgctgaggagtgctttacctccagctatgtggtcaattttggaataattttgtggtgccgaaaagaatgtatattttgttgatttagggtggagagttcagtagatgtctattaagttggctcagtgcagagctgagttcaagtcctggatatctttgttaactttctgtcttattgatctgtcgaatgttgacagtggggtgttaaagtctcccattattgtgtgggagtctgagtctcattgtacattgtaggtctctaaggacttgcttcatgaatctgggtgctcctgtattgggtgcatatatgtatttaggatggttagctcttcttgttgaattgatccctttaccattatgtaatggccttctttgtctcttttgatctttgttggtttaaagtctgttttatcagagactacgattgtaacccctgcttttttttgttttccatttgtttggtagatcttcctccatccctttattttgagcctgtgtgtgtctctgcacatgagatgggtctcctaaatacagcacactgatgggtcttgactatccaatttgccagtctgtgtcttttaattggagcttttagcccatttacatttaaggttaatattgttatatgtgaatgtgatcctgtcattatgatgttagctggttattttgctcgttagttcatgcagtttcttcctagccttgatggtctttacaatttggcatgtttttgcagtggctggtaccaatcgttcctttccacttttcgtgcttccttcaggagctcttgtaaggcaggcctggtggtgacaaaatctcacgtttgcttgtctgtaaagcagtttgtttctccttcacttatgaagcttagtttggctggatatgaagttctgggttgaaaattcctttctttaagaatgttgaatattggcccccactctcttctgacttgtagagtttctgccaagagatccactgttagtctgatgggcttccctttgtgggtaacccgacctttctctctggctgcccttaatattttttccttcatttcaactttggtgaatctgacaattatgtgtcttggagttgctcttctcgaggagtatctttgtggcgttctgtgtatttcctgaatttgaatgttggcctgccttgctaggttggggaagttctcgtggataataccctgcagcatgttttccaacttggttccattttccccgtcactttcaggtacaccattcaaatgtagatttggtcttttcacatagtcccatatttcttggagtccttgttcatttgtttttactctttttttctctaaacttctcttctcgcttcatttcgttcatttgatcttcaatcactgataccctttcctccacttgatcgaattgtctactgaagcttgtgcatgagtcacgtagttctcg

SEQ ID NO: 10653 - DNA, 5591 bp, Homo sapiens
ttttttgcagattccttagtgttttttttttttattatactttaagttttagggtacatgtgcacaacgtgcaggtttgttacatatatatatgtgtgccatgttggtgtgctgcacccattaactcgtcatttaacattaggtatatctcctaatgctatccttcccccctcctcccaccccacaacaggccctggtgtgtgatgttccccttcctgtgtccatgtgttctcattgttcaattcccacctacgagtgagaacatgccgtgtttggttttttgtccttgcgatagtttgctgagaatgatggttttcagcttcatccatgtccctacaaaggacatgaactcatcattttttatggctgcatagtattccatggtgtatatgtgccacattttcttaatccagtctatcattgttggacatttgggttggttccaagtctttgctattgtgaatagtgccgcaataaccatacgtgtgcatgtgtctttatagcagcatgatttataatcctttgggtatatacccagtaatgggatggctgggtcaaatggtatttctggttctagatccctgaggaatcgccacactgacttccacaatagttgaactagtttacagtcccaccaacagtgtaaaagtgttcctatttctccacatcctctccagcacctgttgtttcctgactttttaatgatcgccattctaactggtgtgagatggtatctcattgtggttttgatttgcatttctctgatggccagtgatgatgagcattttttcatgtgtcttttggctgcataaatgtcttcttttgagaagtgtctgttcatatccttcgcccgcttgttgatggagttgtttgtttttttcttgtaaatttgtttgagttcattgtagattctggatattagccctttgtcagatgagtaggttgcaaaaattttctcccattttgtaggttgcctgttcactctgatggtagtttcttttgctgtgcagaagctctttagtttaattagatcccatttgtcaattttggcttttgttgccattgcttttggtgttttagacatgaagtccttgcccatgcctgtgtcctgaatggtattgcctaggttttcttctaggatttttatggctttaggtctaacatttaaatctttaatccatcttgaattaattttagtataaggtgtaaggaagggatccagtttcagctttccacatatggctaggcagttttcccagcaccatttattaaatagggaatcctttccccattgcttgtttttctcaggtttgtcaaagatcaggtagttgtagatatgtggcattatttctgaggcctctgctctgtaccattggtctatatctctgttttggtaccagtaccatgctgttttggttactgtagccctgtagtatagtttgaagtcaggtagcgtgatgcctccagctttgctcttttggcttaggattgacttggcaatgtgggctcttttttggttccatatgaactttaaagtagttttttccaattctgtgaagaaagtcattggtagcttgatggggatggcattgaatctataaattaccttgggcagtatggccattttcacaatattgattcttcctacccatgagcatggaatgttcttccatttgtttgtatcctctttcatttcatcaagcagtggtttgtagttctccttgaagaggtccttcacatcccttgtaagttggattcctaggtattttattctctttgaagcaattgtgaatgggagttcactcctgatttggctttctgtctgttattggtgtataagaatgcttgtgatttttgtacattgattttgtatcctgagactttgctgaagttgcttatgagcttaaggagattttggtctgagacaatgggattttctagatacacaatcatgtcatctgcaaacagggacagtttgacttcctcttttcctaactgaataccctttatttttttctcctgcctgatagccctggccagaacttccaacactatgttgaatagcagtggtgagagagggcatccctgtcttgtgccagttttcaaagggaatgcttccagtttttgtccattcagtatgatattggctgtgggtttgtcataaatagctcttattattttgagatacatcccatcaatacctaatttcttgagagtttttagcatgaagggctgttgaattttgtcaaaggccttttctgcatctaatgagataatcatgtggtttttgtcattggttctgtttatatgctggattacgtttattgatttttgtatgttgaaccagccttgcatcccagggatgaagcccacttgatcatggtggataagctttttgatgtgctgctggatttggtttgccagtattttattgaggatttttgcatcgatgttcatcaaggatattggtctaaaattctctttttttgttgtgtctctgccaggctttggtatcagaatgatgctggcctcataaaatgagttcgggaggattccctctttttctattgattggaatagtttcagaaggaatggtaccagctcctccttgtacctctggtagaattcggctgtgaatccatctggtcttggacttttttttggttggtaagctattaattattgcctcattttcagagcctgttattggtctattcagatattccagttcttcctggtttagtcttgggagggtgtatgtgtcaaagaatttacccatttcttctagattttctagtttatctgtgtagaggtgtttatagtattctctgatggtagtttgtatttctgtgggatcggtggtgatatcccctttatcatttttttattgcatctatttgattcttctctcttttcttctttattagtctagctagcggtctatccattttgttgatcttttcaaaaaaccagctcctggattcattgatttttttaaggggtttttgtgtctctatctccttcagttctgctctgatcttagttatatcttgccttctgctagcttttgaatgtgtttgctcttgcttctctagttcttttaattgtgattttagggtgtcaatttgagatctttcctgctttctcttgtgggcagttagtgctataaatttccctctacacactgctttaaatgtttcccagagattctggtatgttgtatctttgttctcattggtttccaagaacatctttatttctgccttcatttcgttatgtacccagtagtcattcaggagcaggttgttcagtttccatgtagttgagtggttttgagtgagtttctcagtcctgagttctagtttgattgcactgtggtctgagaggcagtttgttatagttacaatttctgttcttttacatttgctgaggagtgctttacttcaaagtatgtggtcaattttggaataggtgtggtgtggtgctgaaaagaacgcatattctgttgatttgggttggagagttctgtagatgtctattaggtctgcttggtgcagagctgagatcagttcctggatatcctcattaactttctgtctcattgatctatctaaggttgacagtggggtgttaaagtctccccttgttattgtgtgggagtctaagtctctttgtaggtctctaaggacttgctttatgaatctgggtgctcctgtattgggtgcatatatatttaggatagttagctcttcttgttgaattgatgcctttaccattatgtaatggccttctttgtctcttttgatctttgttggtttaaagtctgttttatcagagaccaggattgcaacccctgccttttttttgttttccatttgcttggtagatcttcctccatccctttattttgagtctatgtgtgtctctgcacatgagatgggtttcctgaatacagcacactgatgactctttatccaatttgccagtctatgccttttaattgggagcatttagcccatttgcatttaaagttaatattgttatgtgtaaatctgatcctgtcattatgatgttagctggttattttgcttgttagttgatgcagtttcttcctagcctcgatggtctttacaatttggcatgtttttgcagtggctggtaccggtcgttcctttccatgttgagtgcttccttcaggagctcttttagggcaggcctggtggtgacaaaatctctcagcatttgcttgtctgtaaaggattttatttctccttcacttatgaagcttagtttggctggatatgaaattctgggttgaaaattcttttctttaagaatgttgaatattggtccccaactctcctctggcttgtagagtttctgccgatagatctgctgttagtctgatgggcttctctttgtgggtaacccgacctttctctctggctgcccttaacattttttccttcatttcaactttggtgaatctgacaattatgtgtcttggagttgctcttctcgaggagtatctttgtggcgttctctgtatttcctgaatgtgaatgttggcctgccttgctagattcaggaagttctcctggataatatccggcagagtgttttccaacttggttccattctccccgtcactttcaggtacaccaatcagatgtagatttggtcttttcacatagtcccatatttcttggaggctttgttcatttctttttattcttttttctctaaacttttcttctcgcttcatttcattcatttgatcttccatcactgataccctttcttccagttgatcgaattggctactgaggcttgtgcattcatcatgtagttctcatgccatggttttcagctccatcaggtcctttaaggacttctcagcattggttattctagttagcctttcatctaatcttttttcaaggtttttaacttctttgccatgggtttgaacttcctcctttagctcggagtagtttgatcttctgaaggcttcttctctcaactcgtcaaagtcattctccctccagctttgttccattgctggtgaggaggtgcattccttcggaggaagagaggcgctctgatttttagaattttcagtttttctgctctgttttttccccatgtttgtggttttatctacctttggtctttgatgatggtgatgtacagatggggttttggtgtggatgtcctttctgtttgttagttttccttctaacagtcaggaccctcagctgcaggtgggttggagtttgccggaggtccactccagaccctgtttgcctgggtatcagcagcagaggctgcagaacaatggatattggtgaacagcaaatgttgctgcctgatcgttcctctggaagttttgtctcagaagagtacccagccgtgtgagttgtcagtctacccctactgggggttgcctcctagttaggctacttgggcatcagggacccccctgaggatgcagtctgtccattctcagatctcaagctgcatgctgggagaaccactactctcttcaaagctgtcagatagggacatttaagtctgcaggatttctgctg

SEQ ID NO: 10654 - DNA, 4878 bp, Homo sapiens
gccatgttggtttgctgcaccctttaactcgtcatttacattaggtatttctcctgatgctatcccttaccctgtcccccagcccacgacaggccccagtgtgtgatgctccccgccctgtgtccaaatgttctcattgttcaattcccacctacaaataagagcatgaggtgtttggttttctgtccttgtgatactttgctcagaatgatggtttccagcttcatccatgtccccacaaaggacatagcctcatccttttttatggctgcatagtattccatggtgtatatgtgccacattttcttaatccagtctatctttgacggacatttgggttggttccaagtctttgctattgtgaatagtgcttcaaaaaacatacatgtgcatgggtctttatagtagcatgatttataattctttgggtatatacccagtaatgggatcactggatcaaatggtatttctagttctagatccttgaggaatcaccgcactgtcttccacaatggttgaattagtttacactcccaccaacagtgtaaaagcgttcctatttctacacatcctctccagcacctgttgtttcctgactttttaatgatcaccattctaactagtgtgagatggtatctcattgtggttttgatttgcatttctctgatgaccagtgatgatgggcattttttcatgtgcctgttggctgcataaatgtcttcttttgaaaagtgtctgttcatatcctttgtccactttttgatggggttgtttgatttttttcttgtaaatttgtttaagttctttgtagattctggatattagccctttgtcagatgagtagattgcaaaaattttctccctttctctaggttgccttttcgctctgatgatagtttcttttcctgtgcagaagctcttgagtttaattagatcccttttgtcaattttggcttttgttgtcattgcttttggtgttttagtcatgaggtccttgcccatgccaatgtcctgaatggtattgcctaggttttcttctagggtttttatggttttaggtctacaatttaagtgtttaatccagcttgaattaatttctgtataaggtgtaaggaagggatccagtctcagctttctacatatggctaaccagttttcccagcaccatttattaaatagggaatcctttccccattgcttgtttttgtcaggtttgtcaaagatcagatagttgtggatgtgtagtgttattactaagggctctgttctgtttcattggtctatatctctgttttggtaccagtaccatactgttttggttactttatccttgtagcatagtttgaagtcaggtagcctgatttctccagctttgttccttctccttaggattgtcttggcaaggcaggctcttttttggttccatatgaactttaaagtagtttcttccaattctgtgaaggaagtcattgggagcttgatggggatggcattgaatctaaaaattgccttgggcagtatggccattttcacaatattgattcttcctatccatgagcatggaatgtgcttctatttgtttgtgtccttttttacttcgttgagcagtggtttgtagctccccttgaagaggtccttcacatcccttgtaagttggattcctagatattttattctctttgtagcaattgtgaatgggagttcactcatgatttggctctctgtttgtctgttattggtgtgtaagaatgcttgtgatttttgcacattgattttatatcctgagactttgctgaagttgcttaccagcttaaggagattttgggctgagatgatggggttttctagatatacaattatgtcatctgtaaacagggacaatttgacttcctcttttcctaattgaataccctttatttctttctcctgcctgattgccctggccagaacttccaacactatgttgaataggagtggtgagagagggcatccctctcttgtgccagttttcaaagaaaatgcttccagcttttgcccattcagtatgatattggctgtgggtttgtcataaatagctcttattgttttgagatatgtcccatcaatacctaatttattgagagtttttagcatgaagggctgctgaattttgtcaaaggccttttctacatctactgagataatcatgtggtttttgtccttggttctgtttatatgctggattacgtttattgatttgtgtatgttgaaccagccttgcatcccagggatgaagcccacttgatcatggtggataagctttttgatgtgctgctggattcggtttgccagtattttattgaggacttttgcatcgatgttcatcagggatattggtctaaaattctctttttttgttgtgtctctgccaggctttgttatcaggatgatgctggactcataaaatgagttagggaggattctctctttttctattgattagagtagtttcagaaggaatggtaccagctcctccttgtacctctggtagaattcagctgtgaatccatctggtcctgaacttttcttggttggtaagctattaattattgcctcaatttcagagtctgttattggtctattcagagattcaacttcttcctggtttagtcttgggagggtgtatgtgtccaggaatttatccgtttcttctagattttctatgcaaataagcatagaggtgtttatagtattctctgatggtagtttgtatttctgtgggattggtggtgatatcccctttatcattttttattgcgtctatttgattcttctctcttttcttctttattagtcttgctagcagtctatcgattttgttgatctttaaaaaaaaaaccagctcctggattcacagattttttgaagggttttttgcgtctctatctccttcagttctgctttgatcttgttatttcttgccttcggctagcttttgaatgtgtttgctcttgcttctctagttcttttaattgtgatgttagggtgtcaattttagatcttttctgctttcacttgtgggcatttagtgctgtacttttccctctacacactgctttaaatgtgtcccagagattctggtatgttgtgtctttgttctcattggtttcaaagaacatctttatttctgccttcatttcgttatttaccccgtagtcattcaggagtaagttgttcagtttccatgtagttgtgtggttttgagtgagtttcataatcctgagttctaatttcattgcactgtggtctgacagacagtttgttatcatttctgttcttttgcatttgctgaggagtgcttcacttccacctatgtggtcaattttggaataagtgcgatgtggtgctgagaagaatgtacattctgttgatttggggtgaagagttctgtagatgtctattaggtctgcttgttgcagagctgagttcagttcctggatatccttgttaaccttctgtctcgttgatctgtctaatgttgacagtggggtgttaaagtcttccattatcattgtgtgggagtctaagtgtctttgcaggtctctaagggcttgctttatgaatctgggtgctcctgtattggatgcatgtatatttaggatagttagctcttcttgttgaattgatccctttaccattatgtaatagccttctttatctcttttgatctgtgttggtttaaagtctgttttatcagagactaggattgcaacccctgttttttgtttgtttgtttgttgtttgttttgttttgtttttttgtttttttgctttccatttgcttggtagatcttcctccatccctttattttgagcctatgtgtgtgtctctgcacgtgagatgggtctcctgaatacagcacagcaatgggtcttgactctttatccaatttgccagtctctgtcttttaattggggcatttagcccatttacatttaaggttaatattgttatgtgtgaatttgatcctgtcattgtgatgttagctggttattttgcctgttagttaatgcagtttcttcctagcattgatggtctttacaaattggcatgtttttgcagtggctgttaccagttgttcctttccatgtttagtgcttccttcaggagctcttgtaaggcaggcctggtggtgacaaaatctctcagcatttgcttgtctgcaaaggattttatttctccttcacttatgaagcttagtttggctggatatgaaatcctgggttgaaaattcttttctttaagaatgttgaatattggcccccactctcttctgacttgcagcgtttctgctgagatatccactgttagtctaatgggcttgcctttgtgggtaacctgacctttctctctgggtgcccttaacattttttccttcatttcaacctcggtgaatctgacaattatgtgtcttggggttgctcttctcgaggagtatcattgtggtgttctctgtatttcctgaatttgaatgctggcctgccttgctaggttggggaagttttcctggaaaatatcctgaagagtgttttccagcttggttccattctccccgtcactttcaggtacaccaatcagacgtagatttggtcttttcacatagtcccatatttcttggaggctttgtttgtttctttttactcttttttctctaaacttctcttcttgcttcatttcattaatttgatcttcaatcaccattaccctttcttccacttgatcgaatcggctactgaagcttgtgcatgtgtcacgtagttcttgtgccatggttttcagctccatcaggtcatttaaggtcttctgtacagtgtttattctagttagccattcatcta

SEQ ID NO: 10655 - DNA, 5579 bp, Homo sapiens
tttctcttttttttcttagtctagtttaggatttttttaaaattttattattattatactttaagttttagggtacatgtgcacaaagtgcagatttgttacatatgtatacatgtgctgttggtgtgctgcacccattaactcgtcatttagcactaggtatatctcctaatgctatccctccccctccccccacccatgacaggccccggtgtgtgatgttcccctttctgtgtccaagtgttctcattgttcagttcccacctatgagtgagaacatgcagtgattgatttttcgtccttgcgatagtctgctaagaacgatggtttccagcttcgtccgtgtccctacaaaggatgtgaactcatccttttttatggctgcatagtattccatggtgtatatgtgccacattttcttaatccagtgtatcattgatggacgtttgggttggttccaagtctttgctattgtgaatagtgccacaataaacatacgtgtgcatgtgtccttctagcagcatgatttataatcctttgggtatatacccagtaatgggatggctgggtcaaacggtatttctatttctagattcttgaggatttgccacactattttccacaatgtttgaactagtttacagtcccaccaacagtgtaaaagtgttcctatttctccacatcctctccagcacctgttgtttcctgactttttaatgattgccattctaactggtgtgagatggtatctcattgtggttttgatttgcacttctctgatggccggtgatgatgagcattttttcatatgtctgttggctgcataaatgtcttcttttgagaagtgtctcttcatatccttcccccacttgttgatggggttgtttggttttttcttgtaaatttgtttgagttcttagtcgattccggatattagccctttgtcagatgagtagattgcaaaaattttctcccgttctgtaggatgcctgttcactctgatggtagtttctttagctgtgcagaaactctttggtttaataagatgccatttgtctattgtggcttttgttgccattgcttttggtgttttagacatgaagtccttgcccatgcctgtgtcctgaatggtattgcctaggttttcttctaggctttgtatggtttaacctctaacatttaagtcgttcatccgtcttgaattaattttcgtataaggtgtaaggaagggatccaatttcagctttcgacatatggctagccagttttcccagcaccatttattaaatagggaatcctttccccatttcttgtttttgtcaggtttgtcaaagatcagatggttgtagatgtgtggtattatttctgagggctctattctgttccattggtctacagtaaccaaaacagcaaccaatagcatgctgttttggttgctgtagccttgtagtgtagtttgaagtcaggtagcctgatgcatccagctttgttcttctggcttaggatcgtcttggcaatgcgggctcgtttttggttccatgtgaattttgaaggagtttttccaactctgtgaagaaagtcattggtagcttgatggggatggcattgaatctataaattaccttgggcagtatggctattttcacgatattgattcttcctatccgtgagcatggaatgttcttccatttgttttcgtcctcttttatttcatggagcagtggtttgtagtcctccttgaagaggtccttcacatcacctgtaagttggattcctaggtattctattctctttgaagcaattgtgaatgggagttcactcatgatttggctctctgtttgtctgttagtggcgcataagaatgcttgtgatttttgcacattgattttgtatcctgagactttgctgcagttgcttatcagcttgaggagattttgggctgaggcgacggggttttctaaatattcaatcatgtcatctgcaaacagggacaatttgacttcctctttccctaattgaataccctttatttctttctcctgcccgattgccctggccagaacttccaacactatgtcaaataggagtggtgagagagggcatccctgtcttgtgccagtttgcaaagggaatgcttccagtttttgcccattcagtatgatattggctgtgggtttgtcataagtagctcgtattattttgagatacgtcctatcaatacttaacttattgagggtttttagaacgaagggctgttgaattttgtcaaaggtcttttctgcatctattgagataatcatgtggtttttgtctttggttctgtttctatgctggattatgtttattgatttgcgtatgttgaaccagccttgcatctcagggatgaagctcacttgatcaagttggataagctttatgatgtgctgctggattagggttgccagtattttattgaggattttgcatcagtgttcatcagggatatttgtctaaaattctctttttgttgtgtctctgtcaggatttgatgtcaggataatgctggcctcataaaacgagttagggagaattccctctttttctattgattggaatagtttcagaaggaatggtaccaactcctccttgtacctctgttagaattcggctgtgaatccttctggtcctggactttttttggttggtaggctattaattattgcctcaatttcagagcctgttattggtctattcaaggattcaacttcttcctgatttagtctggggagggtgtatgtgtctaggaatttatccatttcttctagattttctagtttatatgcatcgaggtgtttataggattgtctgatggtagtttgtatttctgtgggatcagtggtgatatcccctttatcattttttattgcatctatttgattcttctctcttttcttctttattagtcatgctagcggtctatcaattttgttgatcttttccaaaaaccagctcctggtttcatcgattttttgaagggctttttgtgtctccgtctccttcagctctgctgtgatcttagttatttcttgccctctgctagcttttgaatgtgtttgctcttgcttccctggttcttttaattgtgatgttagggtgtccattttagatctttcctgctttcccctgtgggcatttaatgctataagtttccctctacacactgctttgaatgtgtcccagagattctggtatgttgtgtctttgttctcattggtttcaaagcacatctttattctgccttcatttcgttatgtacccagtagtcattcaggagcagattgctcagtttccatgtagttgagcggttttgagtgagtttcttaatcctgaggtctagtttgattgcactgtggtctgagagaccatttgttgtaatttgtgttcttttgcatttgctgaggagtgctttccttccgactatggggtcagttttggaataagtgtgatgtagtgctgagaagaatgtatattctgttgatttgaggtggagagttaatgtggatgtctattaggtctgcttggtgcagagctaagttcagttcctggatatccttttcaactttctgtctcgttgatctgtctaatgtggatggtggggtgttaaagtctcccattattattgtgtgggagtctaagtctctttgtagttcactgaggacttgctttatgaatctgtgtgctcctgtattgggtgcatatatatttaggatagttagctcttcttgttgaattgatccctttaccattatgtaatggccttctttgtctcttttgatctttgttgttttaaagtctgttttatcagagaataggattgcaacccctgcctttttctgttttccatttgcttggtaagtcttcctccatccctttattttgggcctttgtgtgtctctgcacaggagatgggtttcctgaatacagcatactgatgggtcttgactctttatccgatttgccagtctgtgtcttttaattggagcatgtatcccatttacattcaaagttaatatcgttatgtgtgaatttgatcctgtcattatgacgtcagctggctactttgcttgttagttgatgcagtttcttcctagcctttttggtctttacaatttggcatgtttttgcagtggctggtaccggttgttcctttacatgtttagtgcttccttcaggagctcttttagggcaggcctggtggtgacaaaatctctcagcatttgtttctctgtaaagtattttatttctccttcacttatgaagcttagtttggctggatatgaaattctgggttgaaaattcttttctttaagaatgttgaatattggcccccactctcttctgtctcgtagagtttctgctgagagatcagctgttagtctgatgggcttcctttgtgggtaacttgacctttctctctggctgcccttaacgttttttccttcatttccactttggtgaatctgacaattatgtgtcttggagttgctcttctcgaggagtatctttgtggtattctctgtatttcctgaatttgaatgttcgcctgccttgctagattggggaagttttcctggataatatcctgcagagtgttttccagcttggttccattctccctgtcactttcaggtacaccaatcagacgcagatttggtcttttccatagtcccatatttcttggaggctttgttcgtttctttttaatcttttttctctaaacttctcttctcgcttcatttcattcatttcgtcttccatcactgataccctttcttccagttgattgcattggctactgaggcttctgcattcttcacgtagttctcgtgccttggttttcagctccttcaggtcctttaaggacttctctgcattggttattctagttatccatttgtctaatttttttaaaagtttttaacttctttgccatttgtttgaacttcctcctgtagcttggagtagtttgatcctctgaagccttcttctctcaactcgtcaaagtcattctccgtccagctttgttccactgctggtgaggagctgcgttcctttggaggaggagaggtgctctgatttttagagtttctagtttttctgctctgttttttccccatctttgtggttttatctacctttggtctttgatgatgttgacatatagatgggtttttggtgtggatgtccttcctgtttgttagttttccttctaacagacaggaccctcagctgcaggtctgttggagtttgctagaggtccactccagaccctgtttgcctgggtatcagtagcagtggctgcagaacaacggatattggtgaaccgcaaatgctgctgcctgatcgttcctctggaagttttgtctcagaggagtaccggccgtgtaagctatcagtccgcccctactggaggatgcctcccagttaggctactcggggttcagggacctacttgaggaggcagtctgcccattctcagatctcaagctgcatgctgggagaaccactgctctcttcaaagctgtcagagagggacattt

SEQ ID NO: 10656 - DNA, 21927 bp, Homo sapiens
  SITE (13866): n equals a,t,g, or c
ccgccatagctccccagcagaaacccggaagtggaaatctcagccattcagtgtttgggtgaagacggaggcgggttctggacagacctacgctgtcggggagtgtttacttcgcctccacttctgttcctccccgccctggtgctgctccaggtcacatactcttcctgagccggcttcagcctctccgcgcagaagtctcccggagccatggcctagtattcttatgtgaagtctaccaagcttgtgctcaagggaaccgaggtgaagagctgggtcctgcagctccggcgggagcctcctcagttcttttcggacgcactccacccccgcgaatccggtggaagccgtgatgcggagagccggcttcgtggcctcccaggcttcgctctgaccctgtctgggctggatggaggccggaccgcccttcctggcgcctgtgcagagaggggcagcctcctgcgcggacgaccctggaaacaggatagacgggcgggtgacccgtgaccccgtacccacgagtttgggtcccttgaggcatctctccaggcctctgcctggtgggtctgcgttagtctgatcttgtagttcattataataacttcctttattaggaattattcttttctccattgtctcttcctggaaaaattattaatttttttctaagctaatatgtagagtgaaaccaggatgaatcacacagtggttgaggtgtatatggactttgatagggatatgggctggaacctgcactctgtcatttactaattttgtaatttgtggcaaattggttaatatgtctgaacttccatttactcattaagagatcaagtatctttgaacctccgtttacacatttatactttcagaccattttttatacctttagaagactgtgaggattaaatgagagaacatacatgcagtaaataaattgagccaaatgtgaggaggaggttgtagtggtaatttattagctctttaggagaaaaatacctgtgcattcatatccccgcttcttttttaactggcagatttgcctgaggttgactgtacatgcaaatattgagctttcctcctggcctccgtgataaacagaagttttgatattgttaggcgagatggaaagaaagtatcaaggagtgagctgaagccactgcccttgagaaccctctcgaggagtctggcctcatgaagatgccagaataaatggcaggtatatcctgaatgaatgtgagatttttactctgtgaatttcctgtgaggagtggtgagttatcttctgaaaactttatgatgaaaatgcagacaagagtatcttaagattatcgtaataatcataattaatgcttatatagcactttcaatgcgccaagaaattgtaggcattttgcacattaacttttttcaaatccctcttgggtttttatttttttattgcgatgtaattcataattataaaattcacccttttgtacagtcagtggtttttagtatatatccaagaggttcaccactgtctagttgctcagcatttttgtcatctcaaaaggaaatctcttcctacccattaaagctgtcacatcccatcttccccctctcctagtccatggcaaccactagtctgctatctatgtgaaattgcctattctgaatatttcctaagaaatcatgtaacatgtggccttttgtatctggcttctttcacttacaacattcttgaggtccatcattgttgtagcacttgttcctttttatggctgcgtagtgtagtccattgtatggatgtaatattttgttcatccattcatcagttgatgaacatttagattgtttcccctttttgactattgtgactaatgctagtgtgaatattcttatgtaagtatttttgtgggtgtacgttttcatttcccttgggtatacatacttaggagtaaaattgctgggtcatatggtaactctttaactttttgaggaaccccaaactgtttcctgtagatgctgcaccattttacatttccaccagcaatgtgtgaagatacatattacctcttaatcctcacaatagacttaagagttaagttgttatcctaattttttaagtggggaaactgactcacagagagattcagtaccttttccaaaaattgcagagctaagaagtgacagaatcgggatttaaaatctggcggtgtggctctacaatctgctttgaactttaacataatatgtacaaagcctgaagcaaattctcagtactgtatttaagagggcatagcaatgtaagtcttcctaaatcaataatttataaatgaaacaacttaaaagacttccaagtttcaatcttacgatatttatttatcacacaaatcaatatacttaaactcatctatataaattatttcctgtagtaagaagaaaaagagcaaagataagaagagaaaaagagaagatgaagaaacccagcttgatatgttggtgagtcagttttcagtgctttattctgaaaaaagttaacatttcttgagatctcattgaaaatattttcctagttagaaatttatgatgtattcatatttgtcttaaagtgcttaaatattgcctacagttgtaaattccatttattctttagcacagtagatgctactgatgcctttacttcattatcagaacagagcacaggagagaagaattacaacactctgacttagtaggcaccattagactgcttaatagccggagattctgatacataattttaaaggcttaatgtaaatgttattcaaccaaatatattttacaagctattttctttgaacatctgtacattttagttgtagaagtcagttgtctcttaaacgaagtatcttcacaggaaaaatcattattttgtgaactctgaaatgaatgaaaattttaaatacaatatcagggtggcctgtaaatgatactagaaataaactgacccaaacacacttaaccagcctgttttccgtttagctgtttccatacttttttttcttttttaaaacttggcaagttgcattttgaatcttcataaattatggtagcttaaaaaatatataaaatatggaatggtgtaaagctaatgttctggaagatcattgcttttgaaatggcaaatcaacaattctaaaattagggtaaatatctagggtagatatgtagatgtggaattgctgtgtcaaaggatagttgaatgtttaactatataagaaactgtcaaaaattttctaaagtggttgtgctattttatcctcccaacaagaatgaattagttctccagttacatccttgccaagagttgatggtgttatcagtcttttctcccagtctgagttttaccttttcagtttcttaatggtggtttttggatggacagcttttttttttttttttttttgagatggagtcttgctctgtcacccagactggagggcagtggcgcaatcttcgttcactgctaggtccacctcccaggttcacgccattctcctgccttagcctcccaagtagctgggactacaggcacctgccaccacgcccagctaattttttgtgtttttagtagtgacagggtttcaccatgttagccaggatggtcagaagcttttaatttttataaagcttagtttatttttttttcttttatggttactgccttatctctttgatctaagagatctttgcttaccccaaagtcaggaagatattctacattgtcttttagaggcatcatagttttagtttttacattaaatctgtcattaatctcaaattaatttttggcatggtgtgagtttggtttcaagatttacttttttttttttttaacatcttgatagccatttgtgccagcaccactggtgtttcctttttccattaatccagtttcatatcttcataaaaagtcaattaactttctatgtattggtctatttctggactctgttctatcgattgtctgtttttcttttggtatatttctcttgattgctataatttcatgaagtcttgagatcaggtagtgtgtgtcctccaactttgtacttactattagtttattaatttctacagtgaagcctgttggattttctcggagaattgtattgagtccagatcatttgggggagaatcaacatcttaatattgggcctcaatatttcataattttcaatgtagcagtcttgcatgcctgtttaaaaatttattcttaagtattttataattttacattactgtgtagaacttttgaatttgactttccagttgtttgctgtcagtatgtagatatacaattgatttttgtatagtgactttatagtctgataagtctgtttcacttattacttctagtggtttgtttatatagaaaactaagaaatttgcaattatgtttcctgtgactatcattttacttctttctttcgaatcttaatgtcttgtcttgctttttattggtttattatactgtccaggacttccatagtgttgaacagaagtcacgagaatgggcataattgcattgtttccaagcttaggcagaaaggtttcagtagtccaccatatggtatgatgtctgtacgatctacagagaaaacctttatcaaaatgaggacattccttttaaactttgtttctcggcagtttttatcataacgatgtttaatgctgtcaaatgtctccttctgtatctgttgagatgattatacaactttcttcattctgccagtgaattacattggtttcattttcaacttttaaactaactttacatccctgagataaaccccacttggttgtggtgcattgtcctttggaatattgctagagttgatttctaggttttttttttttttttaagatttctatattggtgttgatggagatattggacttttgtatccttttcttgtaatgtctttatttgattttggtgtcaaggtgatattgggtgtcataaaattagatgggaagtgctgtctccttccctgtttttggaaatagctgtgtaagataggtatgatttcttctttacatgtttgataggatttaccagtgaagtcatctgaacctagagggttttgtttggtttggttttagttttttgtgggagaattaagattttttaagagatattttcagatttttctgttgtcagttttggtaatttgtgtcttttaggaaaatttcatttcatccaagttgttggatttattggcataaaatttttcagaatattcctttaatatccttctaatgtctgtagaatctaatctgtattgcagtctcttcatattggtaatttgtgttttttctattttttcctggatcagtcagtctagctggagatttatcaattctttataagatcacttattttagatcattaatgatcttttagtacaggggtattcactcttttagcttccctgggccacaacggaaggagaagaattgtcttgggccacacataggatacattaacgataagctgatgagccaaaaaaaaggaaaaaaaatctcataatgtttcaagaaagtttacaaatttgtgttgggctgcattcaaacctggcctgggccacatgcagccctcaggttggacaagcctgtttcagtattacttattttctttttttcattttttatttcatttattttcagtctttttttttcctccctttaacttattttcagtttactttgctcttgttttattgcttcttaagaagagagttagatctcttcattccacgttagttttagttatagtcaacacattttgctttcgttttcattccattcaaaatatcatctagttttccttgtgatttttcttttcatggacacttgagttatttaaaagtgtattttttttaatttctactacatagagatattataggtatgttattgttgctgatttctaattcatttatagtatagttggagaacatacattcttagtgaatttccatgtacacttgaaaagaatgtgtattctgtagatgttggttcagggtttttttttttttttttttttttggagatgaagtcgcactctgttgcccagcaggctggagtgcagtggaacgatctccgctcactgcagcctccgcctcccaggttcaagtgattctcctgcctcagcctctggaggagctggaattacaggcacctgccaccacgcctggctaatttttttaatatttttaatagaggcggggtttcaccacgttggccaagctggtctcaaactcctgacctcaggcgatccacccgcctcggcctcccaaagtgctgggattacgggcgtgagccgtggtgcccggtggttcagtgttctttagatgtcagttagatcaactggtggagcttgtgactatgcacatcttctgtgtccttactgattttttactcatcctacaatgtattgagagttatgttaaaatctccagctgtaattctagatctgtctacttgagcagtttttgcttaaagtattttgaagctgtcatgtgtacgcatttaggattgttaattcttccttataaattcagtctttcattttcataacattttaacctttatttctgttaaatgtcttgatgcctagttatattatttgaccacccttttgctcctgtcaagcctgggcctttgttagtttgtgcttatttattaggtttttgcctgtagacttagacagtgactcttactctaggaaaggttcatcctcatgggcctcagccacatgttctaggtatacttgatgagttctctccactctgctatgtcccaaatttgtgtgctctctggcatctccagtcagccctcagaagtgccagccactctgcagaggccttgtggagcctgcctgctgtatgcactccccccagcccttggccccagacctgcagagaacttttgcattctcttttgaggcctcacctgtatgtagttccctcttctccagtaccttattctatgaactccaaacacgttagcactgcaagactctcagcttagtgacagtgacattgcctcatttttggaggtctctacctctctctgtgtggtcgagaaactgccattgggcagaaaacagaagtgtgtgtgagatttgcctcctgtgttttcctgttctcaaatatcacagtcctgttctgcctgtgttccaatccctgaaaacagttttctcaaatattctatccagcttcagtcgttggtcatggtgggagggcaagttcatcttggctggaagaggaagtccttctgcgtctttttctccttgtccttccaccttcttttgcattgtggattttctaaacttgccatataagtaagcatgtgcctatttgtgaagggaaagaaaaaacccttttaattttttgaagctgttctgttggttcctcacaaggatctgaagggattggtaaataggatgaaagaaattctgtctttcacatggagaataccgtgtgtgacattaataaaaatgagcatgtctgtaagcaaagagtttcactgagctctgctagaatcagaagcaactgaacttacatcgtagtttgcaaaacacagatttgatttacccaggaactaaagctgagtaagctatgggttaatagaaggtctgtgaagggtacttagactacagtaagattggggaagaaaattccatttccaaatctaagatatatcattcctttgtgccaagcacataatgaaggtagaggtttaagggggcccttagcacagaagcactgggttagtcagaaggtgaggtgagctgtcacacagccttgatgctagaatgagggtgccctgatagtgtcttatcagccatgacactggtgcatcgggccaggtttgtttttttttcttttttttgagacaggctgttgctttgttactcaggctagagtgcagtgacacgatcatggctcagtgcacccttgacctcgtaggctcaagcaatcctctcacctcgaactcccgagtagctgggaccacagtcttgtaccaccatacccagctaatttcttaatttttttgtagagatgggggtctccttttgttgcctaggctgattttgaactcctgggcttaagtgattctcctgcttccacctctcaaagtgctggattacaggcatgccagacatatggaaacattctcaactatctgaaaatacgtgaaaagctttgttatgcattgtgagacaatacagcaggaatatttcaccatctgcctaaggtttaaaaggaaataactttaagcatgtgtctaaataggaagtaatgttttagagcggattctcttaaattcagcttgtgcgtctgcagcatatacacagcttgagctgtaacctgacatagagacaggcaacttcagtgcccactgttcttaggatccactgctttttcacagctaaaacccctgagtggcactgttaagtattatgttatgttactttagtcgttaaacgtataagcatacctccaaaggttgaatgtaggccacttgcagaaagtaggcagaatgctcacatttaattcttgataatactgtgtttagctttcttattctttgaaatctcattgagaagaaatactggcatctgttcaaagtaatttctttttcagttgacaatattataagtaatgttattgtatcatttccctacttggacagagtgtgaaaattttgaggagcttgtctgccagaaatttcttcttcatttgcaaaacattaatgagatattatatttaaataattttgtttaatattaagtgtacttggtgaatgtggcatagaacatacaaaataaaactaatttaaaattattaactattacatttataagaaagacttgctaatcataacactgttgataatgattctgaataaagcattatttcttttcctgaaaacaattgtagctataactcaatcatctaaattgcttattagttttatttctttttaattgtctattttgattaattttctttttctccattggtttcgtgtgtttgtggaggtaaaatatacagaatatagaatttgccagtttttctatttttacgtgtacacttcagtggcatttaaatacatgcaccattttaccttcccaccagcattgcacagggtttcagtttctccacatcctgcccaacatttgtttttctggttttcttgatttctgttttttatttgttttgataatagcattctaatgggtgtgaagtggtattgcattatggttttgatttatatttccctagtgactagtgaagttgagcgtcttttcgagtgcttattggccatttgtatatcatctttggagcaatgtccgtatatatcctttgcccagttttgaattgtggtatttgtccttttggagttctctacatagtctggatattaattccttataatgtatgtagtttacacatattttctccattctctgggttgccttttattctgacagtggttcttgatgcacaaaagtttttaattctgatgaagtccagtttgtctgtgttttcttttgttgcctgtgcctttgatgttctatataagaaatcattgccaaattcattgtcgtgaagctttttccatcttattctaaaagttttctaactttagctcttacatttaggtctttggtctattttaagttactttttgtatttggtgttagataagggtccaacttcattttagctaaaattttatgtattttaaaattgattatgaaaagcatgaaatgtttagttgaatagaaaattttgtgcagtggaattaactgaatctttaaaacctttttattatggaaatatccaaactaatccatacatagaagaatataatgagtcccccatgtgcccaggccccagcattaattatcaatattttgccaatttcgtttcatttacatacacacccccacacacgttttttcctaaaaaattttaagtaaaatcacagatattacatcattttatccataagtacataaatggacatttcttttttatttatttatttttttattattatactttaagttttagggtacatgtgcacattgcgcaggttagttacatacgtatacatgtgacatgctggtgtgctgcacccactaactcatcatctagcattaggtatacctcccaatgctatccctcccccctccccccaccgcacaacagtccccagagtgtgatgttccccttcctgtgtccatgtgatctcattgttcaattcccacctatgagtgagactatgcggtgtttggttttttgttcttgcgatagtttactgagaatgatgatttccaatttcatccatgtccctacaaaggacatgaactcatcattttttatggctgcatagtattccatggtgtatatgtgccacattttctgaatacagtctatcattgttggacatttgggttggttccaagtctttgctattgtgaataatgccgcaataaacatacgtgtgcatgtgtctttatagcagcatgatttatagtcctttgggtatatacccagtaatgggatggctgggtcaaaaggtatttctagttctagatccctgaggaattgccacactgacttccacaatggttgaactagtttacagtcccaccaacagtgtaaaagtgttcctatttctccacatcctttccagcacccgttgtttcctgactttttaatgattgccattctaactggtgtgagatggtatctcattgtggttttgatttgcatttctctgatggccagtgatggtgagcattttttcatgtgttttttggctgcataaatgtcttcttttgagaagtgtctgttcatgccctttgtccactttttgatggggttgtttttttcttgtaaatttgtttgtgttcattgtagattctggatattagccctttgtcagatgagtaggttgtgaaaaatttctcccattttgtaggttgcctgttcactctgatggtagtttcttttgctctgcagaagctctttagtttaattagatcccatttgtcaattttggctttggttgccattgcttttggtgttttagacatgaagtccttgcccatgcctatgtcctgaatggtaatgcctaggttttcttctagggtttttatggttttaggtctagtgtttaagtctttaatccatcttgaattgatttttgtataaggtgtaaggaagggatccagtttcagctttctacatatggctagccagttttcccagcaccatttattaaatagggaatcctttccccatttcttgtttttgtcaggtttgtcaaagatcagatagttgtagatatgcggcattatttctgagggctctgttctgttccattgatctatatctctgttttggtacctgtaccatgctgttttggttactgtagccttgtagtatagtttgaagtcaggtagtgtgatgcctccagctttgttcttttggcttaggattgacttggtgatgcaggctcttttttggttccatatgaactttaaagtagttttttccaattctgtgaagaaaggcattggtagcttgatggggatggcattgaatctgtaaattaccttgggcagtatggccattttcacgatattgattcttcctacccatgagcatggaatgttcttccatttgtttgtatcctcttttatttccttgagcagcagtttgtagttctccttgaagaggtccttcacatcccttgtaagttggattcctaggtattttattctgtttgaagcaattgtgaatgggagttcactcatgatttggctctctgtttgtttgttgttggtgtataagaatgcttgtgatttgtgtacattgattttgtatcctgagactttgctgaagttgcttatcagcttaaggagattttgggatgagatgatggggttttctagatatacaatcatgtcatctgcaaacagggacaatttgacttcctcttttcctaattgaataccttttatttccttctcctgcctaattgccctggccagaacttccaacactatgttgaataggagtggtgagagagggcatccctgtcttgtgccagttttcaaagggaatgcttccagtttttgcccattcagtatgatattggctgtgggtttgtcatagatagctcttattattttgaaatatgtcccatcaatacctaatttattgagagtttttagcatgaagggttgttgaattttgtcaaaggccttttctgcatctgttgagataatcatgaggttttgtctttggttctgtttatatgctggattacatgtattgatttgcatatattgaaccagccttgcatcccagggatgaagcccacttgatcttggtggataagctttttgatgtgctgctggattctgtttgccagtattttattgaggatttttgcatcaatgttcatcaaggatattggtctaaaattctcttttttggttgtgtctctgcccggctttggtatcagaatgatgctggcctcataaaatgaattagggaggattccctctttttctattgattggaatagtttcagaaggaatggtaccagttcctccttgtacctctggtagaatttggctgtgaatccatctggtcctggactctttttggttggtaagctattgattattgccacaatttcagatcctgttattggtctattcagagattcaacttcttcctggtttagtcttgggagagtgtatgtgtcaaggaatttatccatttcttctagattttctagtttatttgcgtagaggtgtttacagtattcactgatggtagtttgtatttctgtgggatcggtggtgatatcccctttatcattttttattgcgtctatttgattcttctctcttttcttctttattagtcttgctagtggtctatcaattttgttgatcctttcaaaaaaccagctcctggattcattaattttttgaagggttttttgtgtcactatttccttcagttctgctctgattttagttatttctttccttctgctagcttttgaatgtgtttgctcttgcttttctagttcttttaattgtgattttagggtgtcaattttggatctttcctgctttctcttgtgggcatttagtgctgtaaatttccctctacacactgctttgaatgcgtcccagagattctggtatgttgtgtctttgttctctttggttttaaagaacatctttatttctgccttcatttcattatgtaactagtagtcattcaggagcaggttgttcagtttccatgtagttgagtggttttgagtgagattcttaatcctgagttctagtttgattgcactgtggtctgagagacagtttgttataatttctgttcttttacatttgctgaggagagctttacttccaagtatgtggtcaattttggaataagtgtgatgtggtgctgaaaaaaatgtatattctgttgatttggggtggagagttctgtagatgtctattaggtctgcttggtgcagagctgagttcaattcctgggtatccttgttgactttctgtctcattgatctgtctaatgttgacagtggggtgttaaagtctcccattattaatgtgtgggagtctaagtctctttgtaggtcactcaggacttgctttatgaatcttggtgctcctgtattgggtgcatatatatttaggatagtgagctcttcttgttgaattgatccctttaccattatgtaatgaccttctttgtctcttttgatctttgntggttgaaagtctggtttatcagagactaagattgcaacccctgccttttttttttgttttccatttgcttggtagatcttcctccatccttttatgttgagcctatgtgtgcctctgcacatgagatgggtttcctgaatacagtacactgatgggtcttgactctttatccaatttgccagtctgtgtcttttaattggagcatttagtccatttacatttaaagttaatattgttatgtgtgaatttgatcctgtcattatgatgttagctggttattttgctcgttagtttatgctgtttcttcctagtctcgatggtcattacattttggcatgattttgcagcggttggtactggttgttcctttccatgtttagtgcttccttcagaagctcttttaggcaggcctggtggtgacaaaatctctcatcatttgcttgtctgtaaagtattttatttctccttcacttatgaagcttagtttggctggatatgaaattctgggttgaaaattcctttctttaagaatgttgaatattggcccccactctcttctggcttgcagggtttctgccgagagatccgctgttagtctgatgggcttccctttgagggtaacccgacctttctctctggctgcccttaacattttttccttcatttcaactttggtggatctgacaattatgtgtcttggagttgctcttctcgaggagtatctttgtggcgttctctgtatttcctgaatctgaacgttggcctgccttgctagattggggaaattctcctgaataatatcctgcagagtgttttccaacttggttccattctccccatcactttcaggtataccaatcagacgtagatttggtcttttcacatagtcccatatttcttggaggctttgctcgtttctttttattcttttttctctaaactttccttctcgcttcatttcattcatttcatctgccattgctgataccctttcttccagttgatcgcatcggctcctgaggcttctgcattcttcctgtagttctcgagccttggttttcagctccatcagctcctttaagcacttctctatattagttattctaactgggaggcaccctccagcaggtgcacactgacacctcacactgcagggtactccaacagacctacagctgagggtcctgtctgttagaaggaaaactaacaaacagaaaggacatccacacaccaaaaacccacctgtacatcatcaccatcatcaaagaccaaaagtagataaaaccacaaagatggggaaaaaacagaacagaaaaactggaaactctaaaaatcagagcgcctctcctcctccagaggaacgcagctgctcaccagcaacggaacaaagctggacggagaatgactttgaagagctgagagaaggcttcagacgatcaaattactctgagctacgggaggacattcaaaccaaaggcaaagaagttgaaaactttgaaaaaaataaatgtacattaattaacgtggtatgtctttctctcatcacctgttttgttctttacttttatattatactatgtcattatcagaccttgtaaaattaacaagaattccttaatatgtcatatccagttaatgattgactcatttctactctagttaaggtacaaattaggaggaggtttgaggatattttttaacattaagatataaacttttataacaactgctaaaataattgttgctagagtctaacatttatattggcaaattggacattagtatacataggcatagattctgctcattttgctttcaatctaaaatcatagttaagattactggctgggcgcggtggctcacacctgtaatcccagctctttgggaggcagaggcgggtgaatcacgaggtcaggagttcaagaccagcctggccaatgtggtgaaaccctgtctctactaaaaatacaaaaaaaattatttgtgcatggtgacaggctcttgtaaccccagctactcgggaagctgaggcagagaattgtttgaacccaggaggtggaggttgcagtgagccaagatcgcatcactgcacttcagcctgggcaacagagcgagactccatctcaaaaaaaataaataaataaaaattactatgctagaaagtcttcctgtagaggcatttttaagaagcattatgataggcattgcctctggaaagcaggcatgaatagatggctggggtctatcatgagagagaccgttctccatatatcactttgtaccttcatatgttgccttttgttttagtttggtttttttttgagacaggaccttgctctgtcactcaggctagagtgcagtggcatgatcatagctcactataaccttgaactcctgggctcaagtgatcctctttcacagctccccgagtagttgggattacaggcatgcacccccatgcctggctgtatgttgctattgtgtattttaaaaacctaatcctgactgtgctggtagtcgcatgaatctgtgcacatacgtgcaaacaagtacatgtaaaactggtgaaatctgaataagcttcatggattatatcaatgtcagtttccggattctaacaatgtatgatacttatgcaagatgttatcactgagacaaagcgagtaaaggatatgtgagatcttcatagtatttcttacgactgcaaaataaaaagtttttaaaactcagttacaataacaaagaactctgtgtcaaaactaaaatataaagttgaaatatcaattttattttttaggaatctggtgaacagtaacaaactttggtgaaatttcaggaaccatagccattgaagtggatgagggaacctatatacatgcactcaacaatggtctttttaccctgggagctccacacaaagaaggtttgtgtctggaacggaagatcctgccacaagtgtagattttaggacattcattcacttaggccaaactctaactagtctcaaacattttccaaaggaatggaaccattgcatttgactcttccatttttttaaattccttaatatgtaccagccattggcaagtccctctttctaatataagcatttgaaaacattccgtatagttccagaagagtatctttggaaatccaaacaatatgaataattaaaatagtaagtggaaagaaaaaagaaaacctatttgagtcaaacatatttgaatttcttttttattcagacctattaccaaaactaacctgggtgcatttaacagtttgaagtttccacattttctttagcccattagaggaagcactaatgagatacgaagtaattagaagataaaaagcagtatcatttcgtcagcaaggccatccattgaataaatgaaagcatttagcttttttaaataagtgcttatttatgactgtattttaaaacaaagagaagctatctcgaaagttattaaataagcattatatcaccctgtcttactcagtgtatacaattagcactatagttaaaagaaggtaaaatagatcttgattccaaagatacagtattacagtgacatcagtatatctgaatattcttacatttaattgcagaagaaaatagccacattttttaaagcaaaataatgtctttatatttatagcatatgtcaaatttattttcaaatgttttttctccaatagttgatgagggccctagtcctccagagcagtttatggctgtcaaattatctgattccaggtgaacttatattgtaatataattagtaaccagttattttaaaaatttaattgtattcattaaaaattttagtatctgtcttaagcccatggtaattttgatataaaaaacaaaatagcttttttgaaaagtagattttgtgatctacttttagtggatttcctctcaatatataatgctaggctggagaaaagatatgtaagttaaaagatgaagattaataattttatacggcaaataagatagattaaaaaataaatcaaatagtacaaaacctggttcactgttgctatgatatttaaactcactgtttggaagtccaaagacaaacaggaagactaaaaaaaaggaatattgttgaaaccagcagagaatgttacagcatcataacgaccaaaagaatatttgtactcactatttttacagtcattttattttttattctcaccttgtgcagaagtatagaatgattctttgggtaaaagatactgaaagtgaatttacatattttagtaattggttacatcaacatgataatgatttctgttatataatcattaatgtataagggagtaaaagtcaattctggcatccgaggagattcttggtaaggtaaaagaaatcataattttaaaaaatcacattaagatgattatttctatactttctttgaaagtgataagtagggtgaaaaagaataaaagcagaggaagaaaaactcaatagttttaaactgctttacaattataaacaaaaaaggattataaataaaactgacaaatgagaaaatatttgcaacaatcttaataggcagtgagttcttactcttcatatgtatcttgtatagaattcatagcactgaagaccccagtagaaaaattgcgaacaatcagatctgaatagaaaaatggacaaggggcattaccagataatctaaaaactaaaaaggaaaggaaaagaaaaataattgttattctagttaactactaaaatgcaaattaataggatactgtttttttcatatcaggttttcaagtatttttttagagtcataacatttaaaaaaaaaatccatgatacaaaacatactctgttaatttgaggtaagaatgtaaatggaagcagcattttctggaaaacagtttgatgacataaagttttagtaatttattattgaagtttataactaaagaggtataattgaagcatgatgaattttgaaaatatttattatgtaatatataaggtacaatgtttatattaaaaaagcaaaatataaaactaaatttaaaactgtactgtccaatatggcaacaactagtcacatgtagcttttttttttttttgaaggcacagagtctcactctgtcacccaggctggagggcagtggtgtgatcatagctcactataacctcaaatttctgggctcaagcactcctcctgcgtcagcctcccaagtagctggtattacatgtgcacaccaccatgcccagctaactttttaaattttttgtaaagatggggtctcactatgttgtccaggctgatcttgaacttcttgcctcaagcacttctcccattggcttcccaaagcacagagattacaggagtgagtcaccactcagccacatgcatcttttgaacacttggaatatgtccagtctggaattttagatatgtacacacccacacacatacacatgtcctgttttgatgtcctataattaattttctcttagtttttaacttttatctatcttattaatgtacagaatcgccctgaaacctggctatggaaaatatcttagtataaattcagatgaacttgttgttggcgttcagatgcaattggaccaagagaacaatgggaaccagtctttcaaaatgtgagtgctgttattgtttataaaaacttcctgtcagtttaacacaaagtctgtagcagtcaataataatatatttaaaaagaaaaagtaggatgcaatagtacaatacattaaattggaataaatcagtaagaacacagagccttaaagagatctcaaaatatagtgcaacaaaaatagctttagtacttttgcccacaattatttctgtatacccttagtgcccgatatggatctcatttccattgaagaaccagtcaattttaggtcacagagtaggaaaacagaatcgttcctaagtatcttctttgtggcagaaatcatggatgctttcagaaactttagagactgtaagcgaacagtagagctagctaataccaagttgtgacaatttgcttataaaatataaataataatagttcattgaagtaaattatctctaaaagactttcagttcataaacttaaaatagtgtatgaaaagatagttttaatataagaagaaaaaagataatatactaattcttaattttagtaagtagacagttgtagtgtatggatgttttgttaaatctttgttgatacagaatatataatttcctttttctgtttgtgtgagaagtaaagattgaacaaaaatatgtgagtgctaaactgtctttaaaaagtagataactatatcaaaaacagtaaggaccagtgggcaccatgcagaacaagcaaatagaagctcagcctttgagtagcagctttggtagtatacaaaaatgaactgaaaataggaactcagcagtgttttaagatgacagattaaacaaacatcccaccagaaagaggtaatcacttagactaatttcctcatcccctaggataaaatcttaagtcagtgacttgaaaactattttgacccaatccattgagaaatgcatttttacattgcagcccagcacacacatatgtataactgaagcaagagttgtacttaacaatacttacttatccgtgtgttatgcatcttgatatttcttattctcttttaccccttcctctgtgtgtgtgtgtgtattctttttcccccccacccacccgataccgttcaggaaacactacgttgatttcattacctgctaatgtgttgcaacccctttgagatgatcctactagttatgatgagatgcttctaataaaagttacaccagtagaaaatgccaatatttcataaggccaggatgatgacttagatagtactaatattacaacactttaggaaagttcatttcattttatttttaggaaggacactaatagagttccataaaagaaaagtctttagtgcatgttatttattattcagggtgtagatactattttaacttccacattctaaattatagtgtgggtatcaatctatgaagtaggtgctgacaagttgtcaacattactgacttttatggtgaagttttaaatttgaatttttattcaaatataaatgaaaagaccattttctcaggtaaaaaaatctatcatgctttgatgcttttcactttaattgaaaaaagactcattataaaagtacaatgcaagaaatatttagaaaaatattcctgatctccagttgttactgtacctagatttttcttgggacctatgtgataaaacttatcatgattcttgaagaaatagaagttcatacaactgttatcagaatttatataaaatgtttctcagaaaatgtggtttctccagctcgaacattctataactctaagccaaattgaaagagcagattgatgggataaaacacaaagtatggaaataaataataaactgctaccctgaaaaagcctacctctgcacattgtttaaaaattggaaaaaatcctacttctgtgttctgatattcaatgcaagtcattagagtaaggtgagactcttcctgtggattcagattgaaatcagggacggtgtagggaggccatggtcaacttttgagctacccttgagggaagaaattaattgatcaaatattaactgcccaagtatattcacaggatggccatccagtaatgagaatgaacagtctccaactaaaggcaacaatatagatgaatctcggaaacatgatattgaccagacagaaaagattccacttacataaacttcaaaagaagataaaactgatctatgacattaatagtcagaatattcattatccttgagggaactaaactgggaagccacatgatagggcatctggaagctagtaatgtcctctttcttgatctgttacattggtgtgtttatttcattagatttattgagctatacatttaccaccgtgtacttgtctctgtatatgttttgcattgaaataaattttaccaataaaatgataaagcaaaataaagcattaa

SEQ ID NO: 10657 - DNA, 6056 bp, Homo sapiens
atatatatttttttaatttattattattttactttaagttttagggtacatgtgcacaatgtgcaggttagttacatatgtatacatgtgccatgctggtgtgctgcacccactaacttgtcatctagcattacgtatatctcccaatggtatccctccccactcccccaccccacagcagtccccacagtgtgatgttccccttcctgtgtccatgtgttctcattgttcaattcccatctatgagtgagaatatgcggtgtttggttttttgctcttgtgatagttttctgagaatgatgatttccaatttcatccatgtccctacaaaggacatgaactcatccttttttatggctgcatagtattccatggtgtatatgttccacattttcttaatccagtctatcattgttggacatttggattggttccaagtctttgctattgtgaatagtgccgcaataaacatacgtgtgcatgtgtctttatagcagcatgatttatagtcctttgggtatatacccagtaatgggatggctaggtcaaatggtatttcttgttctagatccctgaggaatcgccacactgacttccacaatggttgaactagttgacagtcccaccaacagtgtaaaagtgttcctatttctccacatcctctccagcacctgttgtttcctgactttttaatgattgccattctaactggtgtgagatggtatctcattgtggttttgatttgcatttctctgacggccagtgatggtgagcattttttcatgtgttttttggctgcataaatgtcttcttttgagaagtgtctgttcatgtcctttgcccactttttgatggggttgtttgtttttttcttgtaaatttatttgagttcattgtagattctggatgttagccctttgtcagatgagtaggttgtgaaaattttctcccattttgtaggttgcctgttcactctgatggtagtttcttttgctgtgcagaagctctttagtttaattagatcccattagtcaattttggcttttgttgccattgcttttggtgttttagacatgaagtccttgcccatgcctatgtcctgaatggtaatgcctaggttttcttctagggtttttatcgttttaggtctaacatttaagtctttaatccatcttgaattgatttttgtataaggtgtaaggaagggatccagtttcagctttctacatatgcctagccagttttcccagcaccatttattaaatagggaattctttctccattgcttttttttctcaggtttgtcaaagatcagatagttgtagatatgcggcgttatttctgagggctctgttctgtttcattgatctatatctctgttttggtaccagtaccatgctgttttggttactgtagccttgtagtatagtttgaagtcaggtagtgtgatgcctccagctttgttcttttggcttaggattgacttggcgatgcgagctcttttttggttccatatgaacattaaagtagttttttccaattctgtgaagaaagtcattggtagcttgatggggatggcattgaatctgtaaattactttgggcagtatggccattttcacgatattgattcttcctacccatgagcatggaatattcttccatttgtttgtatcctcttttatttccttgagcagtggtttgtagttctccttgaagaggtccttcacatcccttgtaagttggattcctaggtatttcattctctttgaagcaaatattctctttgaatgggagttcactcatgatttggctctctgtttgtctgttgttggtgtataagaatgcttgtgatttttgtacattgattttctatcctgagactttgctgaagttgcttatcggcttaaggagattttgggctgagacaatggggttttctagatatacaatcatgtcatctgcaaacagggacaatttgacttcctcttttcctaattgaataccctttatttccttctcctgcctaattgccctggccagaacttccaacactatgttgaataggagtggtgagagagggcatccctgtcttgtgccagttttcaaagggaatgcttccagtttttgcacattcagtatgatattggctgtgggtttgtcatagattgctcttattattttgaaatatgtcccattaatacctaatttattgagagtttttagcatgaagcgttgttgaattttgtcaaaggccttttctgcatctattgagataatcatgtggtttttgtctttggttctgtttatatgctggattacatttattgatttgcgtatattgaaccagccttgcatcccagggatgaagcccacttgatcatggtggataagctttttgatgtgctgctggattccgtttgccagtattttattgaggatttttgcatcaatgttcatcaaggatattggtctaaaattctcttttttggttgtgtctctgcccggctttggtatcaggatgacgctggcctcataaaatgagttagggaggattccttctttttctattgattggaatagtttcagaaggaatggtacaagttcctccttgtacctctggtagaattcggctgtgaatccctctggtcctggactctttttggttggtaagctattgattattgccacaatttcagagcctgttattggtctattcagagattcaacttcttcctggtttagtcttgggagagtgtatgtgtcgaggaatttatccatttcttctagattttctagtttatttgcatagaggtgtttgtagtattctctgatggtagtttgtatttctgtgggatcggtggtgatatcccattttcattttttattgtgtctatttgattcttctctctttttttctttattagtcttgctagcggtctatcaattttgttgatcctttcaaaaaaccaactcctggattcattaattttttgaagggttttttgtgtctctgtttccttcagttctgctctgattttagttatttgttgccttctgctagcttttgaatgtgtttgctcttgcttttctagttcttttaactgtgatgttagggtgtcaattttagatctttcctgctttctcttgtgggtatttagtgcaataaatttccctctacacactgctttgaatgtgtcccagagattctggtatgttgtgtctttgttctcgttggtttcaaagaacatctttatttctgtcttcatttcgttatgtacccagtggtcattcaggagcaggttgttcagtttccatgtagttgagcggttttgagtgagattcttaatcctgagttctagtttgattgcactgtggtctgagagatagtttgttataatttctgttctcttacatttgctgaggagagctttacttccaactatgtggtcaattttggattaggtgtggtatggtgctgaaaaaaatgtatattctgttgatttggtgtggagagttctgtagatgtctatcaggtccacttggtgcagagctgagttcaattcctgggtatccttgttgactttctgtctcattgatctgtctaatgttgacagtggggtgttaaagtctcccattattaatgtgtgggagtctaagtctctttgtaggtcactcaggacttgccttatgaatctgggtgctcctgtattgggtgcatatatatttaggatagttagctcttcttgttgaattgatccctttaccactatttaatggccttctttgtctcttttgatctttgttggtttaaagtctgttttatcagagactaggattgcaacccctgccttttcttgttttccatttgcttggcagatcttcctccatccttttattttgagcctatgtgtgtctctgcacgtgagatgggtttcctgaatacagcacactgatgggtcttgactctttatccaatttgccagtctgtgtcttttaattggagcatttagtccatttacatttaaagttaatattgttatgtgtgaatttgatcctgtcattatgatgttagctggttattttactcattagttgatgcagtttcttcctagtctcgatggtctttacaatttggcatgattttgcagcagctggtaccggttgttcctttccatgtttagcgcttccttcaggagctcttttaaggcaggcctggtggtgacaaaatctctcagcatttgcttctctgtaaagtattttatttctccttcacttatgaagcttagtttggctggatatgaaattctgggttgaaaattcttttctttaagaatgttgaatattggcccccactctcttctggcttgtagagtttctgccaaaagatctgctgttagtctgatgggcttccctttgagggtaacccgacctttctctctggctgcccttaacattttttccttcatttcaactttggtgaatctgacaattatgtgtcttggagttgctcttctcaaggagtatctttgtggcgttctctgtatttcctgaatctgaatgttggcctgccttgctagattggggaagttctcctggattatatcctgcagagtgctttccaacttggttccattctccctgtcacttgcaggtacaccaatcagatgtagatttggtcttttcacatagtcccatatttcttggaggctttgctcatttctttttattcttttttctctaaacttcccttctcacttcatttcattcgtttcatcttccatcactgataccctttcttccagttgatcgcatcggctcctgaggcttctgccttcttcatgtagttctcgagccttgcttttcagctccatcagctcctttaagcacttctctgtattggttattctagttatacattcttctaaatttttttcaaagttttcaacttctttgcctttggtttgaatgtcctcccatagctcggagtagtttgatcgtctgaagccttcttctctcagctcgtcaaagtcactctccgttcagctttgttccgttgctggtgaggaactgcgttcctttggaggaggagaggcgctctgctttttagagtttccagtttttctgctctgttttttccccatctttgtggttttgtctacttttggtctttgatgatggtgatgtacagatgggtttttggtgtgcatgtcctttctgttcgttagttttccttctaacagacaggacccttagctgcaggtctgttggagtactgggccgtgtgaggtgtcagtgtgcccctgctggggggtgcctcccagttaggctgctcgggggtcaggggtcagggacccacttgaggaggcagtctgcccgttctcagatctccagctgtgtgctgggagaaccactgctctcttcaaagctgtcagacagggacatttaagtctgcagaagttactgctgtctttttgtatgtctgtgccctgcccccagaggtggagcctacagaggcaggcaggcctcctggagctgtggtgggctccacccagttcgagcttcccggctgctttgtttacctaagcaagcctgggcaatggcgggcgcccctcccccagcctcgctgccgccttgcagtttgatctcagactgctgtgctagcaatcagcgagactccgtgggcgtaggaccctccgagccaggtgcaggatgtaatctcctggtgcgcggtttttttaagcccgtcggaaaagcgcagtattcgggtgggagtgacccgattttccaggtgccctctgtcacccctttgactaggaaagggaactccctgaccccttgtgcttcccgagtgaggcaatgcctcgccctgcctcggctcacgcacagtgcgtgcacccactgacctgcacccacccactgacctgcacccactgtctggcagtccctagtgagatgaacccggtacctcagatggaaatgcagaaatcacccatcttctgcgttactcacgctgggagctgtagaccggagctgttcctattcggccatcttggc

SEQ ID NO: 10658 - DNA, 5446 bp, Homo sapiens
ttgttttttgtttttttttttttcatttatttttattttattttattttattttttttattatactctaagttttagggtacatgtgcacattgtgcaggttagttacatatgtatacatgtgccatgctggtgcgctgcacccactaatgtgtcatctagcattaggtatatctcccaatactatccctcccccctcccccaaccccaccacagtccccagagtgtgatattccccttcctgtgtccatgtgatctcattgttcaattcccatctatgagtgagaatatgcggtgtttggttttttgttcttgcgatagtttactgagaatgatggtttccaatttcatccatgtccctacaaaggatatgaactcatcattttttatggctgcatagtattccatggtgtatatgtgccacattttcttaatccagtctatcattgttggacatttgggttggttccaagtctttgctattgtgaatagtgccgcaataaacatacgtgtgcatgtgtctttatagcagcatgatttatactcatttgggtatatacccagtaatgggatggctgggtcaaatggtatttctagttctagatccctgaggaatcgccacactgacttccacaatggttgaactagtttacagtcccaccaacagtgtaaaagtgttcctatttctccacatcctctccagcacctgttgtttcctgactttttaatgattgccattctaactggtgtgagatgatatctcatagtggttttgatttgcatttctctgatggccagtgatgatgagcatttcttcatgtgttttttggctgcataaatgtcttcttttgagaagtgtctgttcatgtccttcgcccactttttgatggggttgtttgtttttttcttgtaaatttgtttgagttcattgtagattctggatattagccctttgtcagatgagtaggatgcgaaaattttctcccatgttgtaggttgcctgttcactctgatggtagtttcttttgctgtgcagaagctctttagtttaattagatctcatttgtcaattttgtcttttgttgccattgcttttggtgttttggacatgaagtccttgcccacgcctatgtcctgaatggtaatgcctaggttttcttctagggtttttatggttttaggtttaacgtttaaatctttaatccatcttgaattgatttttgtataaggtgtaaggaagggatccagtttcagctttctacatatggctagccagttttcccagcaccatttattaaatagggaatcctttccccattgcttgtttttctcaggtttgtcaaagatcagatagttgtagatatgcggcattatttctgagggctctgttgtgttccattgatctatatctctgttttggtaccagtaccatgctgttttggttactgtagccttgtagtatagtttgaagtcaggtagtgtgatgcctccagctttgttcttttggcttaggattgacttggcaatgcgggctcttttttggttccatatgaactttaaagtagttttttccaattctgtgaagaaagtcattggtagcttgatggggatggcattgaatctataaattaccttgggcagtatggccattttcacgatattgattcttcctacccatgagcatggaatgttcttccatttgtttgtgtcctcttttatttccttgagcagtggtttgtagttctccttgaagaggtccttcacatcccttgtaagttggattcctaggtattttattctctttgaagcaattgtgaatgggagttcacccatgatttggctctctgtttgtctgttgttggtgtataagaatgcttgtgatttttgtacattgattttgtatcctgagactttgctgaagttgcttatcagcttaaggagattttgggctgagacgatggggttttctacataaacaatcatgtcgtctgcaaacagggacaatttgacttcctcttttcctaattgaataccctttatttccttctcctgcctgattgccctggccagaacttccaacactatgttgaataggagcggtgagagagggcatccctgtcttgtgccagttttcaaagggaatgcttccagtttttgcccattcagtatgatattggctgtgggtttgtcatagatagctcttattattttgaaatacgtcccatcaatacctaatttattgagagtttttagcatgaagggttgttgaattttgtcaaaggccttttctgcatctattgagataatcatgtggtttttgtctttggctctgtttatatgctggattacatttattgatttgcgtatattgaaccagccttgcatcccagggatgaagcccacttgatcatggtggataagctttttgatgtgctgctggattcggtttgccagtattttattgaggatttttgcatcaatgttcatcaaggatattggtctaaaattctcttttttggttgtgtctctgcctggctttggtatcagaatgatgctggcctcataaaatgagttagggaggattccctctttttctattgattggaatagtttcagaaggaatggtaccagttcctccttgtacctctggtagaattcggctgtgaatccatctggtcctggactctttttggttggtaaactattgattattgccacaatttcagatcctgttattggtctattcagagattcaacttcttcctggtttagtcttgggagagtgtatgtgtcgaggaatgtatccatttcttctagattttctagtttatttgcgtagaggtgtttgtagtattctctgatggtagtttgtatttctgtgggattggtggtgatatcccctttatcattttttattgtgtctatttgattcttctctctttttttctttattagtcttgctagcggtctatcaattttgttgatcctttcaaaaaaccagctcctggattcattgattttttgaagggttttttgtgtctctatttccttcagttctgctctgattttagttatttcttgccttctgctagcttttgaatgtgtttgctcttgcttttctagttcttttaattgtgatgttagggtgtcaattttggatctttcctgctttctcttgtaggcatttagtgctataaatttccctctacacactgctttgaatgcgtcccagagattctggtatgtggtgtctttgttctcgttggtttcaaagaacatctttatttctgccttcatttcgttatgtacccagtagtcattcaggagcaggttgttcagtttccatgtagttgagcggctttgagtgagattcttaatcctgagttctagtttgattgcactgtggtctgagagacagtttgttataatttctgttcttttacatttgctgaggagagctttacttccaactatgtggtcaattttggaataggtgtggtgtggtgctgaaaaaaatgtatattctgttgatttggggtggagagttctgtagatgtctattaggtctgcttggtgcagagctgagttcaattcctgggtatccttgttgactttctgtctcgttgatctgtctaatattgacagtggggtgttaaagtctcccattattaatgtgtgggagtctaagtctctttgtaggtcactgaggacttgctttatgaatctgggtgctcctgtattgggtgcataaatatttaggatagttagctcctcttgttgaattgatccctttaccattatgtaatggccttctttgtctcttttgatctttgttggtttaaagtctgttttatcagagactaggattgcaacccctgcctttttttgttttccatttgcttggtagatcttcctccatccttttattttgagcctatgtgtgtctctgcacgtgagatgggtttcctgaatacagcacactgatgggtcttgactctttatccaacttgccagtctgtgtcttttaattgcagaatttagtccatttatatttaaagttaatattgttatgtgtgaatttgatcctgtcattatgatgttagctggtgattttgctcattagttgatgcagtttcttcctagtctcgatggtctttacattttggcatgattttgcagcggctggtaccggttgttcctttccatgtttagcgcttccttcaggagctcttttagggcaggcctggtggtgacaaaatctctcagcatttgcttgtctataaagtattttatttctccttcacttatgaagcttagtttggctggatatgaaattctgggttgaaaattcttttctttaagaatgttgaatattggcccccactctcttctggcttgtagggtttctgccgagagatccgctgttagtctgatgggctttcctttgagggtaacccgacctttctctctggctgcccttaacattttttccttcatttcaactttggtgaatctgacaattatgtgtcttggagttgctcttctcgaggagtatctttgtggcgttctctgtatttcctgaatctgaacgttggcctgccttgctagattggggaagttctcctggataatatcctgcagagtgttttccaacttggttccattctccacatcactttcaggtacaccaatcagacgtagatttggtcttttcacatagtcccatatttcttggaggctttgctcatttctttttattcttttttctctaaacttcccttctcgcttcatttcattcatttcatcttccattgctgataccctttcttccagttgatcgcatcggctcctgaggcttctgcattcttcacgtagttctcgagccttggttttcagctccatcagctcctttaagcacttctctgtattggttattctagttatacattcttctaaatttttttcaaagttttcaacttctttgcctttggtttgaatgtcctcccgtagctcagagtaatttgatcgtctgaagccttcttctctcagctcgtcaaaatcattctccatccagctttgttctgttgctggtgaggaactgcgttcctttggaggaggagaggcgctctgcgttttagagtttccagtttttctgttctgttttttccccatctttgtggttttatctacttttggtctttgatgatggtgatgtacagatgggttttcggtgtagatgtcctttctggttgttagttttccttctaacagacaggaccctcagctgcaggtctgttggaatacactgccgtgtgaggtgtcagtgtgcccctgctggggggtgcctcccagttaggctgctcgggggtcaggggtcagggacccacttgaggaggcagtctgcccgttctcagatctccagctgcgtgctgggagaaccactgctc

SEQ ID NO: 10659 - DNA, 6075 bp, Homo sapiens
tttccatgtttgctttggtttggttttttttttttttttttcatgtgttttttttttattatactctaagttttagggtacatgtgcacattgtgcaggttagttacatatgtatacatgtgccatgcttgtgcgctgcacccactaatgtgtcatctagcattaggtatatttcccaatgctatccctcccccctcccccgaccccaccacagtccccagagtgtgatattccccttcctgtgtccatgtgatctcattgttcaattcccacctatgagtgagaatatgcggtgtttggttttttgttcttgcgatagtttactgagaatgatggtttccaatttcatccatgtccctacaaaggatatgaactcatcattttttatggctgcatagtattccatggtgtatatgtgccacattttcttaatccagtctatcattgttggacatttgggttggttccaagtctttgctattgtgaatagtgccgcaataaacatacgtgtgcatgtgtctttatagcagcatgatttatactcatttgggtatatacccagtaatgggatggctgggtcaaatggtatttctagttctagatccctgaggaatcgccacactgacttccacaatggttgaactagtttacagtcccaccaacagtgtaaaagtgttcctatttctccgcatcctctccagcacctgttgtttcctgactttttaatgattgccattctaaccggtgtgagatgatatctcatagtggttttgatttgcatttctctgatggccagtgatgatgagcatttcttcatgtgttttttggctgcataaatgtcttcttttgagaagtgtctgttcatgtccttcgcccactttttgatggggttgtttgtttttttcttgtaaatttgtttgagttcattgtagattctggatattagccctttgtcagatgagtaggttgcaaaaattttctcccatgttgtaggttgcctgttcactctgatggtagtttcttttgctgtgcagaagctctttagtttaattagatcccatttgtcaattttgtcttttgttgccattgcttttggtgttttggacatgaagtccttgcccacgcctatgtcctgaatggtaatgcctaggttttcttctagggtttttatggttttaggtttaacgtttaaatctttaatccatcttgaattgatttttgtataaggtgtaaggaagggatccagtttcagctttctacatatggctagccagttttcccagcaccatttattaaatagggaatcctttccccattgcttgtttttctcaggtttgtcaaagatcagatagttgtagatatgcggcattatttctgagggctctgttctgttccattgatctatatctctgtttttgtaccagtaccatgctgttttggttactgtagccttgtagtatagtttgaagtcaggtagtgtgatgcctccagctttgttcttttggcttaggattgacttggcgatgcgggctcttttttggttccatatgaactttaaagtagttttttccaattctgtgaagaaagtcattggtagcttgatggggatggcattgaatctgtaaattaccttgggcagtatggccattttcacgatattgattcttcctacccatgagcatggaatgttcttccatttatttgtctcctcttttatttccttgagcagtggtttgtagttctccttgaagaggtccttcacatcccttgtaagttggattcctaggtattttattctctttgaagcattgtgaatgggagttcacccatgatttggctctctgtttgtctgttgttggtgtgtaagaatgcttgtgatttttgtacattgattttgtatcctgagactttgctgaagttgcttatcagcttaaggagattttgggctgagacgatggggttttctagataaacaatcatgtcgtctgcaaacagggacaatttgacttcctcttttcctaattgaataccctttatttccttctcctgcctgattgccctggccagaacttccaacactatgttgaataggagcggtgagagagggcatccctgtcttgtgccggttttcaaagggaatgcttccagtttttgcccattcagtatgatattggctgtgggtttgtcatagatagctcttattattttgaaatacatcccatcaatacctaatttattgagagtttttagcatgaagggttgttgaattttgtcaaaggctttttctgcatctattgagataatcatgtggtttttgtctttggctctgtttatatgctggattacatttattgatttgcgtatattgaaccagccttgcatcccagggatgaagcccacttgatcatggtggataagctttttgatgtgctgctggattcggtttgccagtattttattgaggatttttgcatcaatgttcatcaaggatattggtctaaaattctcttttttggttgtgtctctgcccggctttggtatcagaatgatgctggcctcataaaatgagttagggaggattccctctttttctattgattggaatagtttcagaaggaatggtaccagttcctccttgtacctctggtagaattcggctgtgaatccatctggtcctggactctttttggttggtaaactattgattattgccacaatttcagagcctgttattggtcgattcagagattcaacttcttcctggtttagtcttgggagagtgtatgtgtcgaggaatgtatccatttcttctagattttctagtttatttgcgtagaggtgtttgtagtattctctgatggtagtttgtatttctgtgggatcggtggtgatatcccctttatcattttttattgtgtctatttgattcttctctctttttttctttattagtcttgctagcggtctatcaattttgttgatcctttcaaaaaaccagctcctggattcattgagtttttgaagggttttttgtgtctctatttccttcagttctgctctgattttagttatttcttgccttctgctagcttttgaatgtgtttgctcttgcttttctagttcttttaattgtgatgttagggtgtcaattttggatctttcctgctttctcttgtaggcatttagtgctataaatttccctctacacactgctttgaatgcgtcccagagattctggtatgtggtgtctttgttctcgttggtttcaaagaacatctttatttctgccttcatttcgttatgtacccagtagtcattcaggagcaggttgttcagtttccatgtagttgagcggctttgagtgagattcttaatcctgagttctagtttgattgcactgtggtctgagagatagtttgttataatttctgttcttttacatttgctgaggagagctttacttccaactatgtggtcaattttggaataggtgtggtgtggtgctgaaaaaaatgtatattctgttgatttggggtggagagttctgtagatgtctattaggttctgcttggtgcagagctgagttcaattcctgggtatccttgttgactttctgtctcgttgatctgtctaatgttgacagtggggtgttaaagtctcccattattaatgtgtgggagtctaagtctctttgtaggtgactgaggacttgctttatgaatctgggtgctcctgtattgggtgcataaatatttaggatagttagctcctcttgttgaattgatccctttaccattatgtaatggccttctttgtctcttttgatctttgttggtttaaagtctgttttgtcagagactaggattgcaacccctgcctttttttgttttccattggcttggtagatcttcctccatccttttattttgagcctatgtgtgtctctgcacgtgagatgggtttcctgaatacagcacactgatgggtcttgactctttatccaacttgccagtctgtgtcttttaattgcagaatttagtccatttatatttaaagttaatattgttatgtgtgaatttgatcctgtcattatgatgttagctggtgattttgctcattagttgatgcagtttcttcctagtctcgatggtctttacattttggcatgattttgcagcggctggtaccggttgttcctttccatgtttagcgcttccttcaggagctcttttagggcaggcctggtggtgacaaaatctctcaacatttgcttgtctataaagtattttatttctccttcacttatgaagcttagtttggctggatatgaaattctgggttgaaaattcttttctttaagaatgttgaatattggcccccactctcttctggcttgtagggtttctgccgagagatccgctgttagtctgatgggctttcctttgagggtaacccgacctttctctctggctgcccttaacattttttccttcatttcaactttggtgaatctgacaattatgtgtcttggagttgctcttctcgaggagtatctttgtggcgttctctgtatttcctgaatctgaacgttggcctgccttgctagattggggaagttctcctggataatatcctgcagagtgttttccaacttggttccattctccacatcactttcaggtacaccaatcagacgtagatttggtcttttcacatagtcccatatttcttggaggctttgctcatttctttttattcttttttctctaaacttcccttctcgcttcatttcattcatttcatcttccattgctgataccctttcttccagttgatcgcatcggctcctgaggcttctgcattcttcacgtagttctcgagccttggttttcagctccatcagctcctttaagcacttctctgtattggttattctagttatacattcttctaaatttttttcaaagttttcaacttctttgcctttggtttgaatgtcctcccgtagctcagagtaatttgatcgtctgaagccttcttctctcagctcgtcaaaatcattctccatccagctttgttctgttgctggtgaggaactgcgttcctttggaggaggagaggcgctctgcgttttagagtttccagtttttctgttctgttttttccccatctttgtggttttatctacttttggtctttgatgatggtgatgtacagatgggttttcggtgtagatgtcctttctggttgttagttttccttctaacagacaggaccctcagctgcaggtctgttggaataccctgccgtgtgaggtgtcagtgtgcccctgctggggggtgcctcccatttaggctgctcgggggtcaggagtcagggacccacttgaggaggcagtctgcccgttctcagatctccagctgcgtgctgggagaaccactgctctcttcaaagctgtcagacagggacacttaagtctgcagaggttactgctgtctttttgtttgtctgtgccctgcccccagaggtggagcctacagaggcaggcaggcctccttgagctgtggtgggctccacccagttcgagcttcccggctgctttgtttacctaagcaagcctgggcaatggcgggcgcccctcccccagcctcgttgccgccttgcagtttgatctcagactgctgtgctagcaatcagcgagattccgtgggcgtaggaccctccgagccaggtgtgggatatagtctcgtggtgcgccgtttcttaagccggtctgaaaagcgcaatattcgggtgggagtgacccgattttccaggtgcgtccgtcacccctttctttgactcggaaagggaactccctgacccttgcgcttcccaggtgaggcaatgcctcgccctgcttcggctcgcgcacggtgcgcacacacactggcctgcgcccactgtctggcactccctagtgagatgaacccggtacctcagatggaaatgcagaaatcaccgtcttctgcgtcgctcacgctgggagctgtagaccggagctgttcctattcggccatcttggctcctccccag

SEQ ID NO: 10660 - DNA, 5688 bp, Homo sapiens
ctttttttttttattatactttaagttttagggtacatgagcacaatgtgcaggttagttgcatatgtatacatgtgacatgttggtgtgctgcacacattaactcatcatttaacattaggtatatctcctaaagctatccctcccccctcgcgccaagccacaagaggccgcgctgtgcgatgttccccttcctgtgtccatgtgtacttgttgttcgagtcccagctatgagtgagaacatgcggtgtttggtattggtctccttgtgatattttgctgagaatgatggtttccagcttcatccgtgtccgtacaaaggacatgaactcatccttttttatgtctgcatagtattccatggtgtatatgtgccacattttcttaatccagtctatcatcgttggacatttgggttggttccaagtctttgctattgtgaatagtgccacaataaacatatgtgtgcatgtgtcttcatagcagcatgatttataatcctttgggtatatacccagtaatgggatggctgggtcaaatggtatttctagttctagatccctgaggaatcgccacactgacttccacaatggttgaactagtttacagtcccaccaacagtgtaaaagtgttcctatttctccacatcctctccagcacctgttgtttcctgactttttaatgattgccattctaactggtgtgaggtggtatctcattgtggttttgatttgcatttctctgatggccagtgatgatgcgcattttttcatgtgtcttttggctgcataaatgtcttcttttgagaggtgtctgttcatatcctttgcccactttttgatggggttgtttgtttttttctcgtaaatttgttggagttcattgtagattctggatattagccctttgtcagatgagtagattgcaaaaattttctcccattctgtaggtggcctgttcagtctgatggtagtttcttttgctgtgcagaagctctttagtttaattagatcccatttgtcaattttggcttttgttgccattgcttctggtgttttagacatgaagtcctcgcccatgcctatgtcctgaatggtattgcctgggttttcttctagggtttttatagttttaggtctaacatttaagtctttaatccatcttgaattaatttttgtataaggtgtaaggaagggatccagtttcagctttctacatatggctagccagttttcccagcaccatttattaaatagggaatcctttccccattgcttgtttttatcaggtttgtcaaagatcagatggttgtagatatgtggcattatttctgagggctctgttctgttccattgatctatatctctgttttgataccagtaccatgctgttttcgttattgtagccttgtagtatagtttgaagtcaggtagcatgatgcctccagctttgttcttttggctgaggattgacttggcaatgcgggctcttttttggttccatatgaactttaaagtagtttttttccaattctgtgaagaaagtcattggtagcttgttggggatggcattgaatctataaattaccttgggcagtatggccattttcacaatattgattcttcctacccatgagcatggaatgttcttccatttgtttgtatcctcttttatttcattgagcagtggtttgtagttctccttgaagaggtccttcacgtcccttgtaggttggattcctaggtatttcattctctttgaagcaattgtgaatgggagttcactcatgatttggctctctgtttgtctgttgttggtatataagaatgcttgtgatttttgcacattgattttgtatcctgagactttgctgaagttgcttattagcttaaggagattttgggctgagatgatggggttttctagatatacaatcatgtcatcggcaaacaggaacaatttgacttcctcttttcctaattgaatgccctttatttatttctcctgcctgattgccctggccagaacttccaacactatgttgaacaggagtggtgagagaggacatccctgtcttgtgccagttttcaaagggaatgcttccagtttttgcccattcagtatgatattggctgtgggtttgtcatagatagctcttattattttgagatacatcccatcaatacctaatttattgagagtttttagcatgaagtgttgttgaattttgtcaaaggccttttctgcatctattgagataatcatatggtttttgttgttggttctgtttatatgctggattatgtttattgatttgcgtatgttgaaccagcctcacatcccagggatgaagcccattcgatcatggtggacaaggtttttgatgtgctgctggatttggtttgccagtattttattgaggatttttgcatcgatgttcatcagggatattgctctaaaattctctttttttgtgtgtctctgccaggctttggtatcaggatgatgctgggctcataaaatgagttagggaggattccctctttttctgttgattggaatagtttcagaaggaatggtaccagttcctccttgtacctctggtagaatttggctgtgaatccatctggtcctggacttcttttgtttggtaagctattaattattgcctctatttcagagcctgttattggtctattcagagattcaacttcttcctggtttagtcttgggaggctgtatgtctccaggaatttatctatttcttttagattttccagtttatttgcatagaggtgtttatagtattctctgatggtagtttgtatttctgtgtgattggtggacatgtcccctttatcattttttattgcatgtatttgattcttctctcttttcttctttattagtcttgctagcagtctatcaattttgttgatcttttcaaaaaaccagcctctggattcattgattttttgaagggttttttgtgtctctatttccttcagttctcctctgatcttagatatttcttgccttctgctagcttttgaatgtgtttgctcttgcttctctagttcttttaattgtgatgttagagtgtcaattttagatctttcctgctttctcttgtgggcatttagtgctataaatttccctctacacactgctttcaatgtgtcccagagattctggtatgttgtgtctttgttctcattggtttcaaagaacatctttatttctgccttcatttcgttatgtacccagtagtcattcaggagcaggttgttcagtttccatgtagttgagcggttttgagtgagtttcttaatcctgagttctagtttgattgcactgtggtctgagagacagtttattttaatttctgatcttctatatttgctgaggggtgctttacttccaagtatgtggtcaattttggaataggtgtggtgtggtgctgaaaagaatgtatattctgttgattcggggtggagatttctgtagatgtctattaggtctgcttggtgcagagctgagttcaattcctggatatccttgttaactttctgtctcattgatctgtctaatgttgacagcggggtgttaaagtctcccattattaatgtgtgggagtctaagtctctttgtaggtcactcaggacttgctttatgaatctgggtgctactgtattgggtgcatatatatttaggatagttagctcttcttgttgaattgatccctttaccattatgtaatggccttctttgtctcttttgatctttgttggttaaaagtctgttttatcagagactaggattgcaacccctgcctttttttgttttccatttgcttggtagatcttcctccatctctttattttgagcctatgtgtgtctctgcacgtgagatggatttcctgaatatagcacactgatgggtcttgactctatccaatttgccagtctgtgtcttttaattggagcatttagctcatttacatttaaggttaatattgttatgtgtgaatttggtcctgtcattatgatgttagctgtgttttttttttttttcgttaattggtgcagtttcttcctagtctcgatggtgtttacattttggcatgattttgcagtggctggtaccagttgttcctttccatgtttagcgcttccttcagcaccttttttagggcaggccgggtggtgacgaaatctctcagcatttgcttgtctgtaaagtactttatttctccttcacttatgaagcttagtttggctggatatgaaattctgggttgaaaattcttttctttacgaatgttgaatattggcccccaattcttctggcttgtagagtttctgccgagagatccgctgttagtctgatgggcttccctttgagggtaacccgacctttctctctggctgcccttaacattttttccttcatttcaactttggtgaatctgacaattatgtgtcgtggagttgctcttctcgaggagtatctttgtggtgttctctgtatttcctgaatctgaacgttggcctgccttgctagattggggaagttctcctggataatatcctgcagagtgttttccaacttggttccattctccccgtcactttcaggtacaccaatcagatgtagatttggtcttttcacatagtcccatatttcttggaggctttgttcctttctttttattcttttttctctaaacttcccttctcgcttcatttcattcatttcatcttccatcgctgataccctgtcttccagttgatagcattggctcctgaggcttctgcattcttcacgtagttcttgagtcttggttttcagctccatcagctcctttaagcacttctctatattgattattctagttatacattcttctaaatttttttcaaagttttcaacttctttgcctttggtttgagtgtcctcctgtagctcggagtaatttgatcgtctgaagccttcttctctcagctcgtccaagtcattctccatccagctttgttccattgctggtgaggaactgcgttcctttggaggaggagagacgctctgctttttagagtttccagtttttctgctctgttttttccgcatctttgtggttttatctagttttggtctttgatgatggtgatgtacagatgggtttttggtgtggataccctttctgtttgttagttttccttctaacagacaggaccctcagttgcaggtctgttggagtacctggccgtgtgaggtgtcagtctgcccctgctggggattgcctcccagttaggctgctcggggatcaggggtcagggacccacttgaggaggcagtctgtccattctcagatctccagctgcgtactgggagaaccactgctctcttcaaagctgtcagacagggacatttaagtctgcagaggttactgctgtgtttttgtttgtctgtgccctgcccccagaggtggaacctacagaggcaggcaggcctccttgagctgtggtgggctccacccaatttgagcttccaagctgctttgtttacctaagcaagcctgggcaatggcagacacccctctcccagcctcactgccaccttgcagtttgatctcagactgctgtgctagcaatcagtgagactctgtgggcataggaccctccaagcca

SEQ ID NO: 10661 - DNA, 6054 bp, Homo sapiens
ttttctttttttttttttttttttttttttttattatactctaagttttagggtacatgtgcacattgtgcaggttagttacatatgtatacatgtgccatgctggtgcgctgcacccactaatgtgtcatctagcattaggtatatctcccaatgctatccctcccccctcccccgaccccaccacagtccccagagtgtgatattccccttcctgtgtccatgtgatctcattgttcaattcccacctatgagtgagaatatgcggtgtttggttttttgttcttgcgatagtttactgagaatgatggtttccaatttcatccatgtccctacaaaggatatgaactcatcattttttatggctgcatagtattccatggtgtatatgtgccacattttcttaatccagtctatcattgttggacatttgggttggttccaagtctttgctattgtgaatagtgccgcaataaacatacgtgtgcatgtgtctttatagcagcatgatttatactcatttgggtatatacccagtaatgggatggctgggtcaaatggtatttctagttctagatccctgaggaatctccacactgacttccacaatggttgaactagtttacagtcccaccaacagtgtaaaagtgttcctatttctccgcatcctctccagcacctgttgtttcctgactttttaatgattgccattctaactggtgtgagatgatatctcatagtggttttgatttgcatttctctgatggccagtgatgatgagcatttcttcatgtgttttttggctgcataaatgtcttcttttgagaagtgtctgttcatgtcctttgcccactttttgatggggttgtttgtttttttcttgtaaatttgtttgagttcattgtagattctggatattagccctttgtcagatgagtaggttgcgaaaattttctcccatgttgtaggttgcctgttcactctgatggtagtttcttttgctgtgcagaagctctttagtttaattagatcccatttgtcaattttgtcttttgttgccattgcttttggtgttttggacatgaagtccttgcccacgcctatgtcctgaatggtaatgcctaggttttcttctagggtttttatggttttaggtttaacgtttaaatctttaatccatcttgaattgatttttgtataaggtgtaaggaagggatccagtttcagctttctacatatggctagccagttttcccagcaccatttattaaatagggaatcctttccccattgcttgtttttctcaggtttgtcaaagatcagatagttgtagatatgcggcattatttctgagggctctgttctgttccattgatctatatctctgttttggtaccagtaccatgctgttttggttactgtagccttgtagtatagtttgaagtcaggtagtgtgatgcctccagctttgttcttttggcttaggattgacttggcaatgcgggctcttttttggttccatatgaactttaaagtagttttttccaattctgtgaagaaagtcattggtagcttgatggggatggcattgaatctgtaaattaccttgggcagtatggccattttcacgatattgattcttcctacccatgagcatggaatgttcttccatttgtttgtgtcctcttttatttccttgagcagtggtttgtagttctccttgaagaggtccttcacatcccttgtaagttggattcctaggtattttattctctttgaagcaattacgaatgggagttcacccatgatttggctctctgtttgtctgttgttggtgtataagaatgcttgtgatttttgtacattgattttgtatcctgagactttgctgaagttgcttatcagcttaaggagattttgggctgagacgatggggttttctagatatacaatcatgtcgtctgcaaacagggacaatttgacttcctcttttcctaattgaataccctttatttccttctcctgcctgattgccctggccagaacttccaacactatgttgaataggagcggtgagagagggcatccctgtcttgtgccggttttcaaagggaatgcttccagtttttgcccattcagtatgatattggctgtgggtttgtcatagatagctcttattattttgaaatacgtcccatcaatacctaatttattgagagtttttagcatgaagggttgttgaattttgtcaaaggctttttctgcatctattgagataatcatgtggtttttgtctttggctctgtttatatgctggattacatttattgatttgcgtatattgaaccagccttgcatcccagggatgaagcccacttgatcatggtggataagctttttgatgtgctgctggattcggtttgccagtattttattgaggatttttgcatcaatgttcatcaaggatattggtctaaaattctcttttttggttgtgtctctgcccggctttggtatcagaatgatgctggcctcataaaatgagttagggaggattccctctttttctattgattggaatagtttcagaaggaatggtaccagttcctccatgtacctctggtagaattcggctgtgaatccatctggtcctggactctttttggttggtaaactattgattattgccacaatttcagagcctgttattggtctattcagagattcaacttcttcctggtttagtcctgggagagtgtatgtgtcgaggaatgtatccatttcttctagattttctagtttatttgcgtagaggtgtttgtagtattctctgatggtagtttgtatttctgtgggatcggtggtgatatcccctttatcattttttattgtgtctatttgattcttctctctttttttctttattagtcttgctagcggtctatcaattttgttgatcctttcaaaaaaccagctcctggattcattgattttttgaagggttttttgtgtctctatttccttcagttctgctctgattttagttatttcttgccttctgctagcttttgaatgtgtttgctcttgcttttctagttcttttaattgtgatgttagggtgtcaattttggatctttcctgctttctcttgtaggcatttagtgctataaatttccctctacacactgctttgaatgcgtcccagagattctggtatgtggtgtctttgttctcgttggtttcaaagaacatctttatttctgccttcatttcgttatgtacccagtagtcattcaggagcaggttgttcagtttccatgtagttgagcggctttgagtgagattcttaatcctgagttctagtttgattgcactgtggtctgagagatagtttgttataatttctgttcttttacatttgctgaggagagctttacttccaactatgtggtcaattttggaataggtgtggtgtggtgctgaaaaaaaggtatattctgttgatttggggtggagagttctgtagatgtctattaggtctgcttggtgcagagctgagttcaattcctgggtatccttgttgactttctgtctcgttgatctgtctaatgttgacagtggggtgttaaagtctcccattattaatgtgtgggagtctaagtctctttgtaggtcactgaggacttgctttatgaatctgggtgctcctgtattgggtgcataaatatttaggatagttagctcctcttgttgaattgatccctttaccattatgtaatggccttctttgtctcttttgatctttgttggtttaaagtctgttttatcagagactaggattgcaacccctgcctttttttgttttccattggcttggtagatcttcctccatccttttattttgagcctatgtgtgtctctgcacgtgagatgggtttcctgaatacagcacactgatgggtcttgactctttatccaacttgccagtctgtgtcttttaattgcagaatttagtccatttatatttaaagttaatattgttatgtgtgaatttgatcctgtcattatgatgttagctggtgattttgctcattagttgatgcagtttcttcctagtctcgatggtctttacattttggcatgattttgcagcggctggtaccggttgttcctttccatgtttagcgcttccttcaggagctcttttagggcaggcctggtggtgacaaaatctctcaacatttgcttgtctataaagtattttatttctccttcacttatgaagcttagtttggctggatatgaaattctgggttgaaaattcttttctttaagaatgttgaatattggcccccactctcttctggcttgtagggtttctgccgagagatccactgttagtctgatgggctttcctttgagggtaacccgacctttctctctggctgcccttaacattttttccttcatttcaactttggtgaatctgacaattatgtgtcttggagttgctcttctcgaggagtatctttgtggcgttctctgtatttcctgaatctgaacgttggcctgccttgctagattggggaagttctcctggataatatcctgcagagtgttttccaacttggttccattctccacatcactttcaggtacaccagtcagacgtagatttggtcttttcacatagtcccatatttcttggaggctttgctcatttctttttattcttttttctctaaacttcccttctcgcttcatttcattcatttcatcttccattgctgataccctttcttccagttgatcgcatcggctcctgaggcttctgcattcttcacgtagttctcgagccttggttttcagctccatcagctcctttaagcacttctctgtattggttattctagttatacattcttctaaatttttttcaaagttttcaacttctttgcctttggtttgaatgtcctcccgtagctcagagtaatttgatcgtctgaagccttcttctctcagctcgtcaaaatcattctccatccagctttgttctgttgctggtgaggaactgcgttcctttggaggaggagaggcgctctgcgttttagagtttccagtttttctgttctgttttttccccatctttgtggttttatctacttttggtctttgatgatggtgatgtacagatgggttttcggtgtagatgtcctttctggttgttagttttccttctaacagacaggaccctcagctgcaggtctgttggaataccctgccatgtgaggtgtcagtgtgcccctgctggggggtgcctcccagttaggctgctcgggggtcaggagtcagggacccacttgaggaggcagtctgtctgcccgttctcagatctccagctgcgtgctgggagaaccactgctctcttcaaagctgtcagacagggacacttaagtctgcagaggttactgctgtctttttgtttgtctgtgccctgcccccagaggtggagcctacagaggcaggcaggcctccttgagctgtggtggctccacccagttcgagcttcccggctgctttgtttacctaagcaagcctgggcaatggcgggcgcccctcccccagcctcgttgccgccttgcagtttgatctcagactgctgtgctagcaatcagcgagattccgtgggcgtaggaccctccgagccaggtgtgggatatagtctcgtggtgcgccgtttcttaagccggtctgaaaagcgcaatattcgggtgggagtgacccgattttccaggtgcgaccgtcacccctttctttgactcagaaagggaactccctgaccccttgcgcttcccaggtgaggcaatgctcgccctgcttcggctcgcgcacggtgcgcacacacactggcctgcgcccactgtctggcactccctagtgagatgaacccggtacctcagatggaaatgcagaaatcaccgtcttctgcgtcgctcacgctgggagctgtagaccggagctgttcctattcggccatcttggctcctcccccat

SEQ ID NO: 10662 - DNA, 4857 bp, Homo sapiens
  SITE (4682): n equals a,t,g, or c
atactttaagttctagggtatatgtgcacaacgtgcaggtttgttatatatgtgtacgtgtgccatgttggtttgctgcacccatcaactcatcatttacattaggtatttctcctaacgctatccctcccccagcctcctaccccacaacaggccccggtgtgtgatgttcccctccctgtgtccatgtgttctcattggtcaactcccacttaagagtgagaacatgcggagtttggttttctgtccttgtgatattttgctgagaatcacaatttctagcttcatgcatgtccctgcaaaagacaagaactcatccttttttatggctgcatagtattctttggtgtatatgtgccacattttctttatctagtctattattgatggacatttgggttagttccaagtctttgctattgtgaatagtgcctcaataaacataggtgtgcacatgtctttatagtagcatgatttataatcctttgggtattcacccggtaatgagattgctgggtcaaatggtatttctagttctagatccttgaggaattgccacactgtcttccacaatggttgaactaatttatactcccaccaagagtgtaaaagcgttcctatttctccacatcctctacagcatctgttgtttcctgactttttaatgatcgtcattctaactggcatgagtggtatctcattgtggttttgatttgcatttctctgatgaccagtgatgatgagcattttttcatatgtctgttggctgcataaatgtcttcttttgagaagtgtctgttcatatcctttgccctctttttgatggggttgtttttttttcctgtaaatttgtttgagttctttgtagattctggatattagccctttgtcagatgagtagattgcaaaaattttctcccattctgtaggttgcctgttcactctgatggtagtttgttttgctgtgcagaagctttttagtttaattagatcccatttgtcaattttggcttttgttgccattgcttttggtgttttagacatgaagtccttgcccatgcctatgtcctgaatggtattgcctaggttttcttctagggtttttatggttttacatctaacatttaagtctttaatccaccttgaattaatttttgtataagatgtaaggaagggatccagtttcagctttctgcatatggctagccagttttcccagcaccatttgttaaatagggaatcctttccccatttcttgtttttgtcaggtttgtcaaagatcagatagttgtagatgtgtggtgttatttctaagggctctgttctgttccattggtctgtatctccgttttggtaccagcaccatgctgttttgtttactgtagccttgtagtatagtttaaagtcaggtagtgtgatgcctccagctttgttcttttggcttaggattgacttggcaatgcgggctcttttttggttacatatgaactttaaagtagttttttctaattctgtgaagaaagtcattggtagcttgatggggatggcattgaatctataaattaccttgggcagtatggccattttcacgatattgtttattcctctccatgagcatggaatgttcttccatttgtttgtgtcctcttttatttccatgaacagtggtttgtagtcctccttgaagaggtccttcacatcccttgtaagttggattcccaggtattttattctgtttgaagcaattgtgaatgggagttcactcatgatttggctctctgtttgtctgttattggtgtataagaatgcttgtgatttttgcacattgattttgtatcctgagactttgctgaagttgcttatcagcttaaggagattttgggctgaggtgatggggggttctagataaacaatcatgtcatctgcaaacagggacagtttgacttcctcttttcctaattgaggaaaagactctctatttctttctcctgcctgattgccctggccagaacttccaacactatgttgaataggagtggtgggagagggcatccctgtcttgtgccagttttcaaagggaatgcttccagtttttgcccattcagtatgatattggctgtgggtttgtcataaatagctctcattatttttagatacgtcccatcaatacctaatttattgagagtttttagcatgaagtgctgttgaattttgtcgaaggccttttcggcctccattgaaatactcgtggtttttgtcattggttctgtttatatgctggatcacgtttattgatttgtgtatgttgaaccagccttgcatcccagggatgaagcccacttgatcatggtggataagctttttgatgtgttgctggattcggtttgccagtattttattgaggatttttgcatcaatgttcatcagggatattggcctaaaattctccttttttgttttgtctctgccaggctttggtatcaggatgatgctggcctcataaaatgagttagggaggattctctctttttctattgattggaatagtttcagaaggaatgatatcagctcctccttgtacctctgatagaattcggctgtgaatccatctggtcctggactttttttggttggtaagctattaattattgcccgaatttcagagcctgttattggtctattcagagattcagcttcttcctggtttagtcttgcgagggtgtatgtgtcaaggaatttatccatttcttctagattttcttgtttatttgcagagaggtgtttatagtattctctgaaggtagtttgtatttctgtgggatcagtggtgttatcccctttatcattttttattgtgtctatgtgattctgctctcttttcttctttattagtcttgctggcagtctataaattttgttgatcttttcaaaaaaccagctcctggattcattgattttttgaagggatttttgtgtctctatatccttcagctctgctctgatcttagttatttcttgctttctgctagcttttgaatgtgttttctcttgcttctctacttcttttaatggtgatgttagggtgtcgattttagatctttcgtgctttctcttgtgggcatttattgctataaatttccctctacacactactttaaatgtgtcccagagattctgatttgttgtgtctttgttcccgtggattccaaagaacctctttatttctgccttcatttcattatttacccagtagtcattcaggagcaggttgttcagtttccatgtagttgagtggttttgagtgagtttcttaatcctgagttctagtttgattgcactgtagtctgacagacagtttgttataatttctgttcttttacattttctgaggagtgcttttcttccaactatgtggtcaattttggaacaggtgcagtgcggtgctgagaagaatgtatattctgttgacttggggtggagagttctgtagatgtctattaggtccacttggtacagagctgaattcaattcctggatatccttgttaactttctgtcttgttgatctgtctaatgttgacagtggggtgttaaaggctcccattattattgtgtgggagtctaagcctctttgtaggtctctaaggacttgcattatgaatctgggtgctcctgtattgggtgcatatatatttaggatagttagctcttcttgttgaattgatccctttaccattatatagtggccttctttgtctcttttgatctttgttggtttaaagtctgttttttcagagactaggattgcaacccctgcctttttttgttttccatttgcttggtagatcttcctccatccctttattttgggcctgtgtgtgtctctgcatgtgagatggttttcctgaatgcagcacactgatgggtcttgactctttatccaatatgccagtctgtgtcttttaattggagcatttagcccatttacatttaaggttaatattgttatgtgtgaatttgatcctgtcattatgatgttagctggttattttgttcattagttgatgcagtttcttcctagcatcgatggtctttacaatttggcatgtttttgcagtggctggtactagtttttcctttccatatttagtgcttccttcaggagctcttttagggcaggcctggtggtgacaaaatctctcagcatttgcttgtctgtaaagtattttatttctccttcacttatgaagcttcatttggctggatatgaaattctgggttgaaaattcttttctttaagaatgtcgaatattagcccccactccctcctggcttgtagagtttctgccaagagatcacttgttagtctgatgggcttccctttgtgggtatcccgacctttctctctggctgcccttaacattttttccttcatttcaactttggtgaatctgacaattatgtgtcttggagttgctcttctcgaggagtatctttgtggcgttctctgtatttcctgaatttgaatgttggcctgccttgctaggtgtggggaagttctcctggataatatcctgcagagtgttttccaacttggttccattctccctgtcactttcaggtacaccaattagacatagatttggtcttttcacatagtcccatatttcttggaggctttgntcatttctttttattcttttttctctaaacttctcttctcacttcatttcattcatttgatcttgaatcaccaataccctttcttccgttgatcgaatcggccactgaagcttgtgcatttatcatgtagctctcatgccatggttttcagctccacctggtcctttaaggactt

SEQ ID NO: 10663 - DNA, 4911 bp, Homo sapiens; identical to SEQ ID NO: 10618

SEQ ID NO: 10664 - DNA, 6085 bp, Homo sapiens
ttctatttttcaatatttatttatttatttatttattattattattatttttttaattatactttaagttttagggtacatgtgcacatagtgcaggttagttacatatgtatacatgtgccatgctggtgcgctgcacccactaactcgtcatctagcattaggtatatctcccaatgctatccctcccccctcccacctccccaccacagtccccagagtgtgatattccccttcctgtgtccatgtgatctcattgttcaattcccacctatgagtgagaatatgcggtgtttggttttttgttcttgcgatagtttactgagaatgatggtttccaatttcatccatgtccctacaaaggacatgaactcatcattttttatggctgcctagtattccatggtgtatatgtgccacattttcttaatccagtctatcattgttggacatttgggttggttccaagtctttgctattgtgaataatgccgcaataaacatacgtgtgcatgtgtctttatagcagcatgatttatagtcatttgggtatatacccagtaatgggatggctgggtcaaatggtatttctagttctagatccctgaggaatcgccacactgacttccacaatggttgaactagtttatagtcccaccaacagtgtaaaagtgttcctatttctccacatcctctccagcacctgttgtttcctgactttttaatgattgccattctaactggtgtgagatgatatctcatagtggttttgatttgcatttctctgatggccagtgatgatgagcattttttcatgtgttttttggctgcataaatgtcttcttttgagaagtttctgttcatgtccttcgcccactttttgatggggttgtttgtttttttcttgtaaatttgtttgagttcattgtagattctggatattagccctttgtcagatgagtaggttgcgaaaattttctcccatgttgcaggttgcctgttcactctgatggtagtttcttttgctgtgcagaagctctttagtttaattagatcccatttgtcaattttggctttggttgccattgcttttggtgttttggacatgaagtccttgcccacgcctatgtcctgaatggtaatgcctaggttttcttctagggtttttatggttttaggtctaacgtttaaatctttaatccatcttgaattgatttttgtataaggtgtaaggaagggatccagtttcagctttctacatatggctagccagttttcccagcatcgtttattaaatagggaatcctttccccattgcttgtttttctcaggtttgtcaaagatcagatagttgtaggtaagtggtgttatttctgaggactctgttctgttccattgatctatatctctgttttggtaccagtaccatgctgttttggttactgtagccttgtagtatagtttgaagtcaggtagtgtgatgcctccagctttgttcttttggcttaggattgacttggcgatgcgggctcttttttggttccatatgaactttaaagtagttttttccaattctgtgaagaaaggcattggtagcttgatggcaatggcattgaatctgtaaattaccttgggcagtatggccattttcacgatattgattcttcctacccatgagcatggaatgttcttccatttgtttgtatcctcttttatttccttgagcagtggtttgtaattctccttgaagaggtccttcacatcccttgtaagttggattcctaggtattttattctctttgaagcaattgtgaatgggagttcactcatgatttggctctctgtttgtctgttgttggtgtataggaatgcttgtgatttttgtacattgattttgtatcctgagactttgctgaagttgcttatcagcttaaggagattttgggctgagatgatggggttttctagataaacaatcatgtcgtctgcaaacaaggacaatttgacttcctcttttcctaattgaataccctttatttccttctcctgcctgattgccctggccagaacttccagcactatgttgaataggagcggtgagagagggcatccctgtcttgtgccagttttcaaagggaatgcttccagtttttgcccattcagtatgatattggctgtgggtttgtcatagatagctcttattattttgaaatacgtcccatcaatacctaatttattgagagtttgtagcatgaagggttgttgaattttgtcaaaggctttttctgcatctattgagataatcatgtggtttttgtctttggctctgtttatatgctggattacatttattgatttgcgtatattgaaccagccttgcatcccagggatgaagcccacttgatcatggtggataagctttttgatgtgctgctggattcgttttgccagtattttattgaggatttttgcatcaatgttcatcaaggatattggtctaaaattctcttttttggttgtgtctctgcccggctttggtatcagaatgatgctggcctcataaaatgagttagggaggattccctctttttctattgattggaatagtttcagaaggaatggtaccagttcctccttgtacctctggtagaattcggctgtgaatccatctggtcctggactctttttggttggtaaactattgattattgctacaatttcagctcctgttattggtctattcagagattcaacttcttcctggtttagtcttgggagagtgtatgtgtccaggaatttatccatttcttctagattttctagtttatttgcgtagaggtgtttgtagtattctctgatggtagtttgtatttctgtgggatcggtggtgatatcccctttatcattttttattgtgtctatttgattcttctctctttttttctttattagtcttgctagcagtctatcaattttgttgatcctttcaaaaaaccagctcctggattcattgattttttgaagagttttttgtgtctctatttccttcagttctgctctgattttagttatttcttgccttctgctagcttttgaatgtgtttgctcttgcttttctagttcttttaattgtgatgttagggtgtcaattttggatctttcctgctttctcttgtgggcatttagtgctataaatttccctctacacactgctttgaatgcgtcccagagattctggtatgttgtgtctttgttctcgttggtttcaaagaacatctttatttctgccttcatttcgttatgtatccagtagtcattcaggagcaggttgttcagtttccatgtagttgagcggctttgagtgagattcttaatcctgagttctagtttgattgcactgtggtctgagacatagtttgttataatttctgttcttttacatttgctgaggagagctttacttccaactatgtggtcaattttggaataggtgtggtgtggtgctgaaaaaaatgtatattctgttgatttggggtggagagttctgtagatgtctattaggtctgcttggtgcagagctgagttcaattcctgggtatccttgttgactttctgtctcgttgatctgtctaatgttgacagtggggtgttaaagtctcccattattaatgtgtgggagtctaagtctctttgtaggtcactcaggacttgctttatgaatctgggtgctcctgtattgggtgcatatatatttaggatagttagctcctcttgttgaattgatccctttaccattatgtaatggccttctttgtctcttctgatctttgttggtttaaagtctgttttattagagactaggattgcaacccctgcctttttttgttttccatttgcttggtagatcttcctccatccttttattttgagcctatgtgtgtctctgtacgtgagatgggtttcctgaatacagcacactgaatacagctcttgactctttatccaatttgccagtctgtgtcttttaattggagcatttagtccatttacatttaaagttaatattgttatgtgtgaatttgatcctgtcattatgatgttagctggtgattttgctcgttagttgatgcagtttattcctagtctcgatggtctttacattttggcatgattttgcagcggctggtaccggttgttcctttccatgtttagcgcttccttcaggagctcttttagggcaggcctggtggtgacaaaatctctcagcatttgcttgtctgtgaagtattttatttctccttcacttatgaagcttagtttggctggatatgaaattctgggttgaaaattcttttctttaagaatgttgaatattggcccccactctcttctggcttgtagggtttctgccaagagatccgctgttagtctgatgggcttccctttgagggtaacccgaactttttctctggctgcccttaacatttttttccttcatttcaactttggtgaatctgacaattatgtgtcttggagttgctcttctcgaggagtatctttgtggcgttctctgtatttcctgaatctgaacgttggcctgccttgctagattggagaagttctcctggataatatcctgcagagtgttttccaacttggttccattctccgcatcactttcaggcacaccaatcagacgtagatttggtcttttcacatagtcccatatttcttggaggctttgctcatttctttttattcttttttctctaaacttcccttcttgcttcatttcattcatttcatcttccattgctgataccctttcttccagttgatcgcatcggctcctgaggcttctgcattcttcacttagttctcgagccttgggtttcagctccatcagctcctttaagcacttctctgtattggttattctagttatacattcttctaaatttttttcaaagttttcagcttctttgcctttggtttgaatgtcctcccgtagctcagagtaatttgatcgtctgaagccttcttctctcagctcatcaaaatcattctccatccagctttgttccgttgctggtgaggaactgcgttcctttggaggaggagaggcgctctgcattttagagtttccagtttttctgttctgttttttccccatctttgtggttttatctacttttggtctttgatgatggtgatgtacagatgggtttttggtgtggatgtcctttctgtttgttagttttccttctaacagacaggaccctcagctgcaggtctgttggaataccctgccgtgtgaggtgtcagtgtgcccctgctggggggtgcctcccagttaggctgctcgggggtcaggggtcagggacccacttgaggaggcagtctgcccattctcagatctccagctgcgtgctgggagaaccactgctctcttcaaggctgtcagacagggacatttaagtctgcagaggttactgctgtctttttgtttgtctgtgccctgcccccagaggtggagcctacagaggcaggcaggcctccttgagctgtggtgggctccacccagtttgagcttcccggctgctttgtttacctaatcaagcctgggcaatggcgggcgcccctcccccagcctcgctgccgccttgcagtttgatctcagactgctgtcctagcaatcagcgagattccgtgggcataggaccctccgagccaggtgtgggatatagtcttgtggtgcgccgttttttaagccggtctgaaaagcgcaatattcgggtgggagtgacccgattttccaggtgcgtccgtcacccctttctttgactcggaaagggaactccctgaccccttgcgcttcccaggtgaggcaatgcctcgccctgcttcggctcacgcacggtgcgcacacccactggcctgcgcccactgtctggcactccctagtgagatgaacccggtacctcagatggaaatgcagaaatcacccgtcttctgcgtcgctcacgctgggagctgtagaccggagctgttcctattcggccatcttggctcctcccaccttcaat

SEQ ID NO: 10665 - DNA, 6073 bp, Homo sapiens
tttatctttttttatgttgtttgtgcttttttttttcttttttttcttattatactttaagttttagggtacatgtgcacattgtgcaggttagttacatatgtatacatgtgccatgctggtgcgctgcacccactaactcgtcatctagccttaggtatatctcccaatgctatccctccccgctccccccaccccaccacagtccccagagtgtgatattccccttcctgtgtccatgtgatctcattgttcaattcccacctatgagtgagaatatgcggtgtttggttttttgttcttgcgatagtttactgagaatgatgatttccaatttcatccatgtccctacaaaggacatgaactcatcattttttatggctgcatagtattccatggtgtatatgtgccacattttcttaatccagtctatcattgttggacatttgggttggttccaagtctttgctattgtgaataatgccgcaataaacatacgtgtgcatgtgtctttatagcagcatgatttatagtcatttgggtatatacccagtaatgggatggctgggtcaaatggtatttctagttctagatccctgaggaatcgccacactgacttccactatggttgaactagtttacagtcccaccaacagtgtaaaagtgttcctatttctccacatcctctccagcacctgttgtttcctgactttttaatgattgccattctaactggtgtgagatgatatctcacagtggttttgatttgcatttctctgatggccagtgatgatgagcatttcttcatgtgttttttggctgcataaatgtcttcttctgagaagtgtctgttcatgtcccttgcccactttttgatggggttgtttgtttttttcttgtaaatttgtttgagttcattgtagagtccggatattagccctttgtcagatgagtaagttgtgaaaattttctcccatgttgtaggttgcctgttcactctgatggtagtttcttttgctgtgcagaagctctttagtttaattagatcccatttgtcaattttgtcttttgttgccattgcttttggtgttttggacatgaagtccttgcccatgcctatgtcctgaatggtaatgcctaggttttcttctagggtttttagggttttaggtctaacgtttaaatctttaatccatcttgaattgatttttgtataaggtgtaaggaagggatccagtttcagctttctacatatggctagccagttttcccagcaccatttattaaatagggaatcctttccccattgtttgtttttctcaggtttgtcaaagatcagatagttgtaggtatgcggcgttatttctgagggctctgttctgttccattgatctatatctctgttttggtaccagtaccatgctgttttggttactgtagccttgtagtatagtttgaagtcaggtagtgtgatgcctccagctttgttcttttggcttaggattgacttggccatgcgggctcttttttggttccatatgaactttaaagtagttttttccaattctgtgaagaaagtcattggtagcttgatggggatggcattgaatctgtaaattaccttgggcagtatggccattttcacgatattgattcttcctacccatgagcatggaatgttcttccatttgtttgtatcctcttttatttccttgagcagtggtttgtagttctccttgaagaggtccttcacatcccttgtaagttggattcctaggtattttattctctttgaagcaattgtgaatgggagttcactcatgatttggctctctgtttgtctgttgttggtgtataagaatgcttgtgatttttgtacattgattttgtatcctgagactttgctgaagttgcttatcagcttaaggagattttgggctgagacgatggggttttctagataaacaatcatgtcgtctgcaaacagggacaatttgacttcctcttttcctaattgaataccctttatttccttctcctgcctgattgccctggccagaacttccaacactatgttgaataggagtggtgagagagggcatccctgtcttgtgccagttttcaaagggaatgcttccagtttttgcccattcagtatgatattggctgtgggtttgtcatagatagctcttattattttgaaatacgtcccatcaatacctaatttattgagagtttttagcatgaagcgttgttgaattttgtcaaaggctttttctgcatctattgagataatcatgtggtttttgtctttggctctgtttatatgctggattacatttattgatttgtgtatattgaaccagccttgcatcccagggatgaagcccacttgatcatggtggataagctttttgatgtgctgctggattcggtttgccagtattttattgaggatttttgcatcaatgttcatcaaggatattggtctaaaattctcttttttggttgtgtctctgcccggctttggtatcagaatgatgctggcctcataaaatgagttagggaggattccctctttttctattgattggaatagtttcagaaggaatggtaccagttcctccttgtacctctggtagaattcggctgtgaatccatctggtcctggactctttttggttggtaaactattgattattgccccaatttcagctcctgttattggtctattcagagattcaacttcttcctggtttagtcttgggagagtgtatgtgtcgaggaatgtatccatttcttctagattttctagtttatttgcgtagaggtgtttgtagtattctctgatggtagtttgtatttctgtgtgatcagtggtgatatcccctttatcattttttattgtgtctatttgattcttctctctttttttctttattagtcttgctagcggtctatagattttgttgatcctttcaaaaaactagctcctggattcattgattttttgaagggttttttgtgtctctatttccttcagttctgctctgattttagttatatcttgccttctgctagcttttgaatgtgtttgctcttgcttttctagttcttttaattgtgatgttagggtgtcaattttggatctttcctgctttctcttgtgggcatttagtgctataaatttccctctacacactgctttgaatgcgtcccagagattctggtatgttgtgtctttgttctcgttggtttcaaagaacatctttatttctgccttcatttcgttatgtacccagtagtcattcaggagcaggttgttcagtttccatgtagttgagcggctttgagtgagattcttaatcctgagttctagtttgattgcactgtggtctgagagatagtttgttataatttctgttcttttacatttgctgaggagagctttacttccaactatgtggtcaattttggaataggtgtggtgcggtgctgaaaaaaatgtatattctgttgattaggggtggagagttctgtagatgtctattaggtccgcttggtacagagctgagttcaattcctgggtatccttgttgactttctgtctcgttgatctgtctaatgttgacagtggggtgttaaagtctcccattattaatgtgtgggagtctaagtctctttgtaggtcactcaggacttgctttatgaatctgggtgctcctgtattgggtgcatatatatttaggatagttagctcttcttgttgaattgatccctttaccattatgtaatggccttctttgtctcttttgatctttgttggtttaaagtctgttttatcagagactaggattgcaacccctgcctttttttgttttccatttgcttggtagatcttcctccatccttttattttgagcctatgtgtgtctctgcacgtgagatgggtttcctgaatacagcacactgatgggtcttgactctttatccaacttgccagtctgtgtcttttaattggagcatttagtccatttacatttaaagttaatattgttatgtgtgaatttgatcctgtcattatgatgttagctggtgattttgctcgttagttgatgcagtttcttcctagtcttgatggtctttacattttggcatgattttgcagcggctggtaccggttgttcctttccatgtttagcgcttccttcaggagctcttttagggcaggcctggtggtgacaaaatctctcagcatttgcttgtctgtaaaggattttatttctccttcacttatgaagcttagtttggctggatatgaaattctgggctgaaaattcttttctttaagaatgttgaatattggcccccactctcttctggcttgtagggtttctgccgagagatccgctgttagtctgatgggcttccctttgtgggtaacccgacctttctctctggctgcccttaacattttttccttcatttcaactttggtgaatctgacaattatatgtcttggagttgctcttctcgaggagtatctttgtggcgttctctgtatttcctgaatctgaacgttggcctgccttgctagattggggaagttctcctggataatatcctgtagagtgttttccaacttggttccattctccgcatcactttcaggtacaccaatcagacgtagatttggtcttttcacatagtcccatatttcttggaggctttgctcatttctttttattcttttttctctaaccttcccttctcgcttcatttcattcatttcatcttccatcgctgataccctttcttccagttgatcgcatcggctcctgaggcttctgcattcttcacgtagttctcgagccttggtttcagctccatcagctcctttaagcacttctctgtgttggttattctagttatacattcttctaaatttttttcaaagttttcaacttctttgcctttggtttgactgtcctcccatagctcagagtaatttgatcgtctgaagccttcttctctcagctcgtcaaagtcattctccatccagctttgttccgttgctggtgaggaactgcgttcctttggaggaggagaggcgctctgtgttttagagtttccagtttttctgttctgttttttccccatctttgtggttttatctacttttggtctttgatgatggtgatgtacagatgggttttcggtgtggatgtcctttctgtttgttagttttccttctaacagacagcaccctcagctgcaggtctgttggaataccctgccctgtgaggtgtcagtgtgccctgctggggggtgcctcccagttaggctgctcgggggtcaggggtcagggacccacttgagggagcagtctgcccgttctcagatctccagctgcgtgctggagaaccactgctctcttcaaagctgtcagacagggacatttaagtctgcagaggttactgctgtctttttgtttgtctgtgccctgcccccagaggtggagcctacagaggcaggcaggcctccttgagctgtggtggctccacccagttccagcttccgggctgctttgtttacctaagcaagcctgggcaatggcgggcgcccctcccccagcctcgctgccgccttgcagttcgatctcagactgctgtgctagcaatcagcgagattccgtgggcgtaggaccctccgagccaggtgtgggatatagtctcgtggtgtgccgttttttaagccggtctgaaaagcgcaatattcgggtgggagtgacccgattttccaggtgcgtccgtcacccctttctttgactgggaaagggaactccctgaccccttgcgcttcccaggtgaggtaatgcctcgccctgcttcggctcgcgcccggtgcgcgcacccactggcctgcgcccactgtctggcactccctagtgagatgaacccggtacctcagatggaaatgcagaaatcacctgtcttctgcattgctcacgctgggagctgtagactggagctgttcctattcggccatcttggctcctcctcccgttgtttgt

SEQ ID NO: 10666 - DNA, 6042 bp, Homo sapiens
gaatcaaaacttttttttttttattatactttaagttttagggtacatgtgcatattgtgcaggttagttacatatgtatacatgtgccatgctggtgcgctgcacccactaactcatcatctagcattaggtatatctcccaatgctatccctccccgctcccgccaccccaccacagtccccagagtgtgatattccccttcatgtgtccatgtgatctcattgttcaattcccacctatgagtgagaatatgcggtgtttgattttttgttcttgtgatagtttactgagaatgatgatttccaatttcatccatgtccctacaaaggacatgaactcatcattttttatggctgcatagtattccatggtgtatatgtgccacattttcttaatccagtctatcattgttggacatttgggttggttccaagtctttgctattgtgaataatgccgcaataaacacacgtgtgcatgtgtctttatagcagcatgatttatagtcctttgggtatatacccagtaatgggatggctgggtcaaatggtatttccagttctagatccctgaggaatcgccacactgacttccacaatggttgaactagtttacagtcccaccaacagtgtaacagtgttcctatttctccacatcctctccagcacctgttgtttcctgactttttaatgattgccattctaactggtgtgagatgatatctcatagtggttttgatttgcatttctctgatggccagtgatgaagagcattttttcatgtgttttttggctgcataaatgtcttcttttgagaagtgtctgttcatgtccttcgcccactttttgatggggttgtttgtttttttcttgtaaatttgtttgagttaattgtagattctggatattagcgctttgtcagatgagtaggttgcgaaaattttctcccattttgtaggttgcctgttcactctgatggtagtttcttttgctgtgcagaagctctttagtttaattagatcccatttgtcaattttggcttttgttgccattgcttttggtgttttggacatgaagtccttgcccatgcctatgtcctgaatggtaatgcctaggttttcttctagggattttatggttttaggtttaacgtttaaatctttaatccatcttgaattgatttttgtataaggtgtaaggaagggatccagtttcagctttctacatatggctagccagttttcccagcaccatttattaaatagggaatcctttccccattgcttgtttttctcaggtttgtcaaagatcagatagttgtaggtatgcggcgttatttctgagggctctgttgtgttccattgatctatatctctgttttggtaccagtaccatgctgttttggttactgtagccttgtagtatagtttgaagtcaggtagtgtgatgcctccagctttgttcttttggcttaggattgacttggcgatgtgggctcttttttggttccatatgaactttaaagtagttttttccaattctgtgaagaaagtcattggtagcttgatggggatggcattgaatctgtaaattaccttgggcagtatggccattttcacgatattgattcttcctacccatgagcatggaatgttcttccatttgtttgtatcctctttgatttccttgagcagtggtttgtagttctccttgaagaggtccttcacatcccttgtaagttggattcctaggtattttattctgtttgaagcaattgtgaatgggagttcactcatgatttggctctctgtttgtctgttgttggtgtataagaatgcttgtgatttttgtacattgattttgtatcctgagactttgctgaagttgcttatcagcttaaggagattttgggctgagatgatggggttttctagataaacaatcatgtcgtctgcaaacagggacaatttgacttcctcttttcctaattgaataccctttatttccttctcctgcctgattgccctggccagaacttccaacactatgttgaataggagcggtgagagagggcatccctgtcttgtgccagttttcaaagggaatgcttccagtttttgcccattcagtatgatattggctgtgggtttgtcatagatagctcttattattttgaaatacgtcccatcaattcctaatttattgagagtttttagcatgaagggttgttgaattttgtcaaaggctctttctgcatctattgagataatcatgtggtttttgtctttggctctgtttatatgctggattacatttattgatttgcatatattgaaccagccttgcatcccagggatgaagcccacttgatcatggtggataagcttcttgatgtgctgctggattcggtttgccagtattttattgaggatttttgcatcaatgttcatcaaggatattggtctaaaattctctttgttcattgtgtcgttgtccagctttggtatcaggatgatgctggcctcataaaatgagttagggaggattccctctttttctattcattggaatagtttcagaaggaatggtaccagttcctccttgtacctctggtagaatttggctgtgaatccatctggtcctggactctttttggttggtaaactattgattattgccccaatttcagctcctgttattggtctattcagagattcaacttcttcctggtttagtcttgggagagtgtatgtgttgaggaatgtatccatttcttctagattttctagtttatttgagtagaggtgtttgtagtattctatgatggtagtttgtatttctgtgggatcagtggtgatatcccctttatcattttttattgtgtctatttgattcttctctctttttttctttattagtcttgctagcggtctatcaattttgttgatcctttcgaaaaaccagctcctggattcattgattttttgaagggttttttgtgtctctatttccttcagttctgctctgattttagttatttcttgccttctgctagcttttgaatgtgtttgctcttgcttttctagttcttttaattgtgatgttagggtgtcaattttggatctttcctgctttctcttgtgggcatttagtgctataaatttccctctacacactgctttgaatgcatcccagagattctggtatgttgtgtctttgttctcgttggtttcaaagaacatctttatttctgccttcatttcattatgtacccagtagtcattcaggagcaggttgttcagtttccatgtagttgagcggctttgagtgagattcttaatcctgagttctagtttgattgcactgtggtctgagagatagtttgatataatttctgttcttttacatttgctgaggagagctttacttccaagtatgtggtcaattttggaataggtgtggtgtggtgctgaaaaaaatgtatattctgttgatttggggtggagaattctgtagatgtctattaggtccgcttggtacagagctgagttcaattcctgggtattcttgttgactttctgtctcgttgatctgtctaatgttgacagtggggtgttaaagtctcccattattaatgtgtgggagtctaagtctctttgtaggtcactcaggacttgctttatgaatctgggtgctcctgtattgggggcatatatatttaggatagttagctcctcttgttgaattgatccctttaccattatgtaatggccttctttgtctcttttgatctttgttggtttaaagtctgttttatcagagactaggattgcaacccctgcctttttttgttttccatttgcttggtagatcttcctccatccttttattttgagcctatgtgtgtctctgcatgtgagatgggtttcctgaatacagcacactgatgggtcttgactctttatccaacttgccagtctgtgtcttttaattggagcatttagtccatttacatttaaagttaatattgttatgtgtgaatttgatcctgtcattatgatgttagctggtgattttgctcgttagttgatgcagtttcttcctagtctcgatggtctttacattttggcatgattttgcagcggctggtaccggttgttcctttccatgtttagtgcttccttcaggagctcttttagggcaggcctggtggtgacaaaatctctcagcatttgcttgtctgtaaagtattttatttctccttcacttatgaagcttagtttggctggatatgaaattctgggttgaaaattcttttctttaagaatgttgaatattggcccccactctcttctggcttgtagggtttctgccgagagatccgctgttagtctgatgggcttccctttgagggtaacccgacctttctctctggctgcccttaacattttttccttcatttcaactttggtgaatctgacaattatgtgtcttggagttgctcttctcgaggagtatctttgtggcgttctctgtatttcctgaatctgaatgttggcctgccttgctagattggggaagttctcctggataatatcctgtagagtgttttccaacttggttccattcttcccatcactttcaggtacaccaatcagatgtagatttggtcttttcacatagtcccatatttcttggaggctttgctcatttctttttattcttttttctctaaccttcccttctcgcttaatttcattcatttcatcttccatcgctgataccctttcttccagttgatcgcatcggctcctgaggcttctgcattcttcacgtagttctcgagccttggttttcagctccatcagctcctttaagcacttctctgtattggttattctagttatacattcttctaaatttttttcaaagttttcaacttctttgcctttggtttgaatgtcctcccgtagctcagagtaatttgatcgtctgaagccttcttctctcagctcatcaaagtcattctccatccagctttgttccgttgctggtgaggaactgcgttcctttggaggaggagaggtgctctgcgttttagagtttccagtttttctgttctgttttttccccatctttgtggttttatctacttttggtctttgatgatggtgatgtacagatgggtttttggtgtggatgtcctttctgtttgttagttttccttctaacagacagcaccctcagctgcaggtctgttggaataccctgccgtgtgaggtatcagtgtgcccctgctggggggtgcctcccagttaggctgctcgggggtcaggggtcagggacccacttgaggaggcagtctgcccgttctcagatctccagctgcgtgctgggagaaccactgctctcttcaaagctgtcagacagggacatttaagtctgcagaggttactgctgtcttttcgtttgtctgtgccctgcccccagaggtggagcccacagaggcaggcaggcctccttgagctgtggtgggctccacccagttcgagcttcccggctgctttgtttacctaatcaagcctgggcaatggcgggcgcccctcccccagcctcgctgccgccttgcagtttgatctcagactgctgtgctagcaatcagcgagattccgtgggcgtaggaccctccgagccaggtgtgggatatagtctcgtggtgcgccgttttttaagccggtctgaaaagcgcaatattcgggtgggagtgacccgattttccaggtgcgtccgtcacccctttctttgactcggaaagggaactccctgaccccttgcccttcccaggtgaggcaatgcctcgccctgcttcggctcgcgcccagtgcgtgcacccactggcctgcgcccactgtctggcactccctagtgagatgaacccggtacctcagatggaaatgcagaaatcacccgtcttctgcgtcgctcacgctgggagctgtagaccagagctgttcctattcggccatcttggctcctcctcct

SEQ ID NO: 10667 - DNA, 6268 bp, Homo sapiens
attttcttttttaaaaaattttattattattttactttaagttttagggtacatgtgcacaatgtgcaggtttgttacatatgtatacatgtgccatgttggtgtgctgcacccattaactcgtcatttagcattaggtatatctcctaatgctatccctcccctcttcccccaccccacaacagtccccagagtgtgatgttccccttcctgtgtccatgtgttctcattgttcaattcccatgtatgagtgagaacatgtggtgtttggttttttgtccttgcgacagtttgctgagaatgatggtttccagcttcatccatgtccctacaaaggacatgaactcatcatttttttatggctgcatagtattccatggtgtatatgtgccacattttcttaatccagtctatcattgttggacatttgggttggttccaagtctttgctattgtgaatagtgccacaataaacatatgtatgcatgtgtctttatagcagcatgatttataatcctttgggtatatacccagtaatgggatggctgggtcaaatggtatttctagttctagatccttgaggaatcaccacactgtcttccacaatggttgaactagtttacagtcccaccaacagtgtaaaagtgttcctatttctccacatcctctccagcacctgttgtttcctgactttttttttttattattatactttaagttttagggtacatgcgcacattgtgcaggttagttacatatgtatacatgtgccatgctggtgcactgcacccactaactcgtcatctagcattaggtatatctcccaatgctatccctcccccctccccccaccccaccacagtccccagagtgtgatattccccttcctgtgtccatgtgatctcattgttcaattcccacctatgagtgagaatatgcggtgtttggttttttgttcttgcaatagtttactgagaatgatgatttccaatttcatccatgtccctacaaaggacatgaactcatcattttttatggctgcatagtattccgtggtgtatatgtgccacattttcttaatccagtctatcattggtggacatttgggttggttccaagtctttgctattgtgaataatgctgcaataaacatacgtgtgcatgtgtctttatagcagcatgatttataatcctttgggtatatacccagtaatgggatggctgggtcaaatggtatttctagttctagatccttgaggaatcaccacactgtcttccacaatggttgaactagtttacagtaccaccaacagtgtaaaagtgttcctatttctccacatcctctccagcacctgttgttccctgactttttaatgattgccattctaactggtgtgagatggtatctcattgtgttttgatttgcatttctctgatggccagtgatgatgagcattttttcacgtgttttttgtctgcataaatgtcttcttttgagaagtgtctgtttatatcctttgcccactttttgatggggttgtttttttcttgtaaatttgtttgagttcattgtagattctggatattagccctttgtcagatgagtaggttgcaaaatttttctcccattctgtatgttgcctattcactctgatggtggtttcttttgctgtgcagaagctctttagtttaattagatcccatttgtcaattttgtcttttgttgccattgcttttggtgttctagacatgaagtccttgcccatgcctatgtcctgaatggtattgcctaggttttgttctagggtttttatggtgttaggtctaacatgtaagtctttaatccatcttgaattaatttttgtataaggtgtaaggaagggatccagtttcagctttctacatatggcgagccagttttcccagcaccatttattaaacatggaatgctttccccattgcttgtttttgtaaggtttgtcaaagatcagatagttgtagatatgcggcattgtttctgagggctctgttccgttccattggtctatatctctgttttggtaccagtaccatgctgttttggttactgtagccttgtagtatagtttgaagtcaggtagtgtgatgcctccagctttgttcttttggcttaggattgacttggcgatgtgggctcttttttggttccatatgaaccttaaagtgtttttttccaattctgtgaagaaagtcattggtagtttgatggggatggcactgaatctataaattaccttgggcagtatggccattttcacgatattgattcttcctacccatgagcatggaatgttcttccatttgtttgtatcctcttttatttcattgagcagtggtttgtagttctccttgaagaggtccttcacatcccttgtaagttggattcctaggtatttgattctctttgaaacaattgtgaatgggagttcactcatgatttggctctctgtttgtctgttattggtgtataagaatgcttgtgatttttgtacattgattttgtatcctgagacgttgctgaagttgcttatcagcttaaggagattttgggctgagacaatggggttttccagatatacaatcatgtcatctgcaaacagggacaatttgacttcctcttttcctaattgaatgccctttatttccttctcctgcctaaatgccctggccagaacttccaacactatgttgaataggagtggtgagagagggcatccctgtcttgtgcccgttttcaaagggaatgcttccagtttttgtccattcagtatgatattggctgtgggtttgtcatagatagctcttattattttgagatatgtcccatcaatacctaatttattgagagtttttagcatgaaggattgttggattttgtccaaggccttttctgcaactatggagataaccatgtggtttttgtctttggttctgtttatatgctggattacgtgtattgattttcgtatggtgaaccagccttgcatcccagggatgaagcccacttgatcatggtggataggctttttgatgtgttgctggattcggtttgccagtattttattgaggatttgtgtatcaatgttcatcaaagatattggtctaaaattctctttttttgctgtgtctctaccaggctttggtatcaggattatgctggcctcataaaatgagttagggaggattctctctttttctattgattggaatagtttcagaaggaatggtactagctcctccttgtacctctggtagaattcagctgtgaatccatctggtcctggacttttttgttgttggtaggctattaattattgcctcaatttcagatcctgttattggtctattcagagattcaatttcttcctggtttagtcttgggagggtgtatgtgtcaaggaatttatccatttcttctagattttctagtgtatttgtgtagaggtgtttatagtattctctgatggtagtttgtatttctgtgggatcggtggtgatatcccctttatcatgttttattgcatgtatttgattcttctctcttttcttctttattagtcttgctagcggtctatcagttttgttgatcttttcaaaaaaccagctcctggattcactgattttttttgaagggttttttgtgtctctatttccttcagttctgctctgatcttagttatttcttgccgtctgctagcttttgaatgtgtttgctcttgcttctctagttcttttaattgtgatgttagggtgtcaattttagatctttcctgctttctcttgtgggcatttagtgctataaatttccctctacacactgctttaaatgtgtcccagagattctggtatgttgtgtctttgttctcattggtttcaaagaacatctttatttctgccttcatttcgttatgtacccagcagtcattcaggagcaggttgttcagtttccatgtagttgagtggttttgagtgagtttcttaatcctgagttctagtttgattgcactgtggtctgagagatagcttgttataatttcttttattttacatttgctgaggagtgctttacttccaactatgtggtcaattttggaataggtatggtgtggtgctgaaaagtatgtatattctgttgatttggggtggagagttctgtagatgtctattaggtctgcttggtgcagagctgagttcaattcctggatatccttgttaactctctgtctcgttgatctgtctaatgttgacagtggggtgttaaagtctccctttattattgtgtgggagtctaagtctctttgtaggtcactaaggacttgctttatgaatctgggtgctcctgtattgggtgcatatatatttaggatagttagctcttcttgttgaattgatccctttaccattatgtaatggccttctttgtctcttttgatcttttttggtttaaagtctgtcttatcagagactaggattgcaacccctgcctttttttgttttccatttgcttggtagatcttcctccatccctttattttgagcctatgtgtgtctctctgcacatgagatgggtttcctgaatacagcacactgatgggtcttgactctttatccaatttgctagtctgtgtcttttaattggagcatttagcccatttacatttaatgttaatattgttacgtgtgaatttgatcctgtcattatgatgttagctggttattttgctcgttagttgatgcagtttcttcctagccttgatggtctttacaatttggcatgtttttgcagtggctgataccggttgttcctttccatgtttagtgcttccttcatgagctcttttagggcaggcctcgtggtgacaaaatctctcagcatttgcttgtctgtaaagtatcttatttctccttcacttatgaagtttagtttggctggatatgaaattctcggttgaaaattcttttctttaagaatgttgaatattggcccccactctcttctggcttgtagagtttctgccaagagatccactcttagtctgatgggcttccctttgtgggtaacccgacctttctccctggctgcccttaacattttttccttcatttccactttggtgaatctgacaattatgtgtcttggagttgctcttctccagaagtatctctgtggtgttctctttatttcctgaatttgaatgttggcctgccttgctagattggggaaattctcctggataatatcctgcagaatgttttctaacttggttccattctccccgtcactttcaggtacaccaatcagacgtagatttggtcttttcacacagtcccatattttttggaggctttgttcatttatttttattcttttttctctaaacttatcttctcacttcatttcattcattttatcttccattgctgataccctttcttccagttgattgcatcggctactgaggcttgtgcattcgtcacgtagttctcatgccatggctttcagctccatcaggtcctttaaggacttctcttcattggttattctagttagccattagtctaattttttttcaagatttttaacttctttgccattggttcgaacttcctcctttagcttggagtagtttgatcttctgaagccttcttctctcaacttgtcaaagtcattctccatccagctttgttccattgctggtgaggagctgtgttcctttggagaaggagaggcactctgatttttagagtttctggtttttctgttctgttttttccccatctttgtggttttatctacctttggtctttgatgatggtgatgtacagatgggtttttggtgtggatgtcctttctgtttgttcgttttccttctaacagtcaggaccctcagctgcaggtctgttggagtttgctggaggtccactccaacaaactcctgggtatcagcagcagtggctgcagaacagcagatattggtgaaccgcaaatgctgctgcctgattgttcctctggaagttttgtctcagaggagtacccggctgtgtgaggtgtcagtccacccctactggggggtgcctcccagttaggctactcggggttcagggacccacttgaggaggcagtccgcctgttctcagatctcaagctgcatgctgggagaaacactactctcttcaaagctgtcagacagggatatttaagtctgcagaggttactgctgccttttgt

SEQ ID NO: 10668 - DNA, 6038 bp, Homo sapiens
tttttttttaaattttattattatactttaagttttagggtacatgtgcacaatgtgcaggttagttacatatgtatacatgtgccatgctggtgtgctgcacccattaactcgtcatttagcattaggtatgtctcctaaagctatccctccccactctccccaccctacaacagaccccagagtgtgatgttccccttcctgtgtccatgtgttcccattgttcaattcccacctatgagtgagaatatgcagcgtttggtttcttgttcttgcgatagttcactgagaatgatgatttccaattcatccatgtccctataaaggacatgaactcatcattttttatggctgcataatattccatggtgtatatgtgccacattttcttaatccagtctatcattgttggacatttgggttggttccaagtctttgctattgtgaatagtgccgcaataaacatacgtgtgcatgtgtctttagagcagcatgatttataatcctttgggtatatacccagtaatgggatggctgggtcaaatggtatttctagttctagatccctgaggaatcgccacactgacttccacaatggttgaactagtttacagtcccaccaacagtgtaaaagtgttcctatttctccacatcctctccagcacctgttgtttcctgagtttttaatgattgccattctaactggtgtgagatgatatctcatagtggttttgatttgcatttctctgatggccagtgatgatgagcatttcttcatgtgttttttggctgcataaatgtcttcttttgagaagtgtctgttcatgtccttcgcccactttttgatggggttgtttgtttttttcttgtaaatttgtttgagttcattgtagattctggatattagccctttgtcagatgagtaggttgcgaaaattttctcccatgttgtaggttgcctgttcactctgatggtagtttcttttgctgtgcagaagctcttgagtttaattagatcccatttgtcaattttggcttttgttgccattacttttggtgttttggacatgaagtccttgcccacgcctatgtcctgaatggtaatgcctaggttttcttctagggtttttatggttttaggtctaacgtttaaatctttaatccatcttgaattgatttttgtataaggtgtaaggaagggatccagtttcagctttctacatatggctagccagttttcccagcaccatttattaaatagggaatcctttccccattgcttgtttttctcaggtttgtcaaagatcagatagttgtagatatgtggcattatttctgagggctctgttctgttccattgatctatatctctgttttggtaccagtaccatgctgttttggttactgtagccttgtagtatagtttgaagtcaggtagtgtgatgcctccagctttgttcttttggcttaggattgacttggcgatgcgggctcttttttggttccatatgaactttaaagtagttttttccaattctgtgaagaaagtcattggtagcttgatggggatggcattgaatctgtaaattaccttgggcagtatggccattttcacgatattgattcttcctacccatgagcatggaatgttcttccatttgtttgtgtcctcttttatttccttgagcagtggtttgtagttctccttgaagatgtccttcacatcccttgtaagttggattcctaggtattttattctctttgaagcaattgtgaatgggagttcactcatgatttggctctctgtttgtctgttgttggtgtgtaagaatgcttgtgatttttgcacattgattttgtatcctgagactttgctgaagttgcttatcagcttaaggagattttgggctgagacgatggggttttctagataaacaatcatgtcgtctgcaaacagggacaatttgacttcctcttttcctaattgaataccctttatttccttctcctgcctgattgccctggccagaacttccaacactatgttgaataggagcggtgagagagggcatccctgtcttgtgccagttttcaaagggaatgcttccagtttttgcccattcagtatgatattggctgtgggtttgtcatagatagctcttattattttgaaatacgtcccatcaatacctaatttattgagagtttttagcatgaagggttgttgaattttgtcaaaggctttttctgcatctattgagataatcatgtggtttttgtctttggctctgtttatatgctggattacatttattgatttgcgtatattgaaccagccttgcatcccagggatgaagcccacttgatcatggtggataagctttttgatgtgctgctggattcggttggccagtattttattgaggatttttgcatcaatgttcatcaaggatattggtctaaaattctcttttttggttgtgtctctgcccggctttggtatcagaatgatgctggcctcataaaatgagttagggaggattccctctttttctattgattggaatagtttcagaaggaatggtaccagctcctccttgtacctctggtagaattcggctgtgaatccatctggtcctggactctttttggttggtaaactattgattattgccacaatttcagagcctgttattggtctattcagagattcaacttcttcctggtttagtcttgggagagagtatgtgtcgaggaatgtatccatttcttctagattttctagtttatttgcgtagaggtgtttgtagtattctctgatggtagtttgtatttctgtgggatcggtggtgatatcccctttatcattttttattgtgtctatttgattcttctctctttttttctttattagtcttgctagcggtctatcaattttgttgatcctttcaaaaaaccagctcctggattcattgattttttgaagggttttttgtgtctctattctccttcagttctgctctgattttagttatttcttgccttctgctagcttttgaatgtgtttgctcttgcttttctagttcttttaattgtgatgttagggtgtcaattttggatctttcctgctttctcttgtaggcatttagtgctataaatttccctctacacgctgctttgaatgcgtcccagagattctggtatgtggtgtctttgttctcgttggtttcaaagaacatctttatttctgccttcatttcgttatgtacccagtagtcattcaggagcaggttgttcagtttccatggagttgagcggctttgagtgagattcttaatcctgagttctagtttgattgcactgtggtctgagagatagtttgttataatttctgttcttttacatttgctgaggagagctttacttccaactatgtggtcaattttggaataggtgtggtgtggtgctgaaaaaaatgtatactctgttgatttggggtggagagttctgtagatgtctattaggtctgcttggtgcagagctgagttcaattcctgggtatccttgttgactttctgtctcgttgatctgtctaatgttgacagtggggtgttaaagtctcccattattaatgtgtgggagtctaagtctctttgtaggtcactgaggacttgctttatgaatctgggtgctcctgtattgggtgcataaatatttaggatagttagctcttcttgttgaattgatccctttaccattatgtaatggccttctttgtctcttttgatcttgttggtttaaagtctgttttatcagagactaggattgcaacccctgcctttttttgttttccattggcttggtagatcttcctccatccttttattttgagcctatgtgtgtctctgcacgtgagatgggtttcctgaatacagcacactgatgggtcttgactctttatccaacttgccagtctgtgtcttttaattgcagaatttagtccatttacatttaaagttaatattgttatgtgtgaatttgatcctgtcattatgatgttagctggtgattttgctcattagttgatgcagtttcttcctagtctcgatggtctttacattttggcatgattttgcagcggctggtaccggttgttcctttccatgtttagcgcttccttcaggagctcttttagggcaggcctggtggtgacaaaatctctcagcatttgcttgtctataaagtattttatttctccttcacttatgaagcttagtttggctggatatgaaattctgggttgaaaattcttttctttaagaatgttgaatattggcccccactctcttctggcttgtagggtttctgccgagagatccgctgttagtctgatgggctttcctttgagggtaacccgacctttctctctggctgcccttaacattttttccttcatttcaactttggtgaatctgacaattatgtgtcttggagttgctcttctcgaggagtatctttgtggcgttctctgtatttcctgaatctgaacgttggcctgccttgctagattggggaagttctcctggataatatcctgcagagtgttttccaacttggttccattctccacatcactttcaggtacaccaatcagacgtagatttggtcttttcacatagtcccatatttcttggaggctttgctcatttctttttattcttttttctctaaacttcccttctcgcttcatttcattcatttcatcttccatcgctgataccctttcttccagttgatcacatcggctcctgaggcttctgcattcttcacgtagttctcgagccttggttttcagctccatcagctcctttaagcacttctctgtattggttattctagttatacattcttctaaatttttttcaaagttttcaacttctttgcctttggtttgaatgtcctcccgtagctcagagtaatttgatcgtctgaagccttcttctctcagctcgtcaaaatcattctccatccagctttgttctgttgctggtgaggaactgcgttcctttggaggaggagaggcgctctgcgttttagagtttccagtttttctgttctgttttttccccatctttgtggttttatctacttttggtctttgatgatggtgatgtacagatgggttttcggtgtagatgtcctttctggttgttagttttccttctaacagacaggaccctcagctgcaggtctgttggaataccctgctgtgtgaggtgtcagtgtgcccctgctggggggtgcctcccagttaggctgctcgggggtcaggggtcagggacccacttgaggaggcagtctgcccgttctcagatctccagctgcgtgctgggagaaccactgctctcttcaaagctgtcagacagggacacttaagtctgcagaggttactgctgtctttttgtttgtctgtgccctgcccccagaggtggagcctacagaggcaggcaggcctccttgagctgtggtgggctccacccagttcgagcttcccagctgctttgtttgcctaagcaagcctgggcaatggcgggcgcccctcccccagcctcgttgccgccttgccgtttgatctcagactgctgtgctagcaatcagcgagattccgtgggcgtaggaccctctgagccaggtgtgggatatagtctcgtggtgcgccgtttcttaagccggtctgaaaagcgcaatattcgggtgggagtgacccgattttccaggtgcgtccgtcacccctttctttgactcgaaaagggaactccctgaccccttgcgcttcccaggtgaggcaatgcctcgccctgcttcggctcgcgcacggtgcgcacacacactggcctgcgcccactgtctggcactccctagtgagatgaacccggtacctcagatggaaatgcagaaatcacccgtcttctgcgtcgctcacgctgggagctgtagaccggagctgttcctattcggccatcttggctcctcccccg

SEQ ID NO: 10669 - DNA, 6050 bp, Homo sapiens
ttttttttaagtatgacttttctttttttttattatactttaagtttgagggtacatgtgcacaatgtgcaggttagttacatatgtatacatgtgccatgctggtgcgctgcacccattaactcgtcatctagcattaggtgtatctcccagtgctatccctccccactacccccaccccacaacagtccccagagtgtgatgttccccttcctgtgtccatgtgttctcattgttcaactcccacctatgagtgagaatatgcggtgtttggttttttgttcttgcaagagtttactgagaatgatgatttccaatttcatccatgtccctatgaaggacatgaactcatcattttttatggctgcataatattccatggtgtatatgtgccacattttcttaatccagtctatcattgttggacatttcggttggttccaagtctttgctattgtgaataatgccgcagtaaacatacgtgtgcatgtgtctttatagcagcatgatttatagtcctttgggtatatacccagtaatgggatggctgggtcaaatggtatttctagttctagatccctgaggaatcgccacactgacttccacaatgactgaactagtttacagtcccaccaacagtgtaaaagtgttcctatttctccacatcctctccagcacctgttgtttcctgactttttaatgatcgccattctaactggtgtgagatggtatctcattgtggttttgatttgcatttctctgatggccagtgatggtgagcattttttcatgtgttttttggctgcataaatgtcttcttttgagaagtgtctgttcatgtccttcacccactttttgatggggttgtttgtttctttcttgtaaatttgtttgaattcattgtagattctggatattagccctttgtcagatgagtaggttgcgaaaattttctcccattttgtaggttgcctgttcactctgatggtagtttcttttgctgtgcagaagctctttagtttaattagatcccatttgtcaattttggcttttgttgccattgcttttggtgttttagacatgaagtccttgcccatgcctatgtcctgaatggtaaagcctaggttttcttctagggtgtttatggttttaggtctaatgtttaagtctttaatccatcttgaattgatttttgtataaggtgtaaggaagggatccagtttcagctttctacatatggctagccagttttcccagcaccatttattaaatagggaatcctttccccattgcttgtttttctcaggtttgtcaaagatcagatagttgtagatatgcggcattatttctgagggctctgttctgttccattgatctatatctctgttttggtaccagtaccatgctgttttggttactgtagccttgtagtatagtttgaagtcaggtagtgtgatgcctccagctttgttcttttggcttaggattgacttggcgatgtgggctcttttttggttccatatgaactttaaagtcgttttttccaattctgtgaagaaagtcattggtagcttgatggggatggcattgaatctgtaaattaccttgggcagtatgaccattttcacgatattgattcttcctacccatgagcatggaatggtcttccatttgtttgtatcctctttcatttccttgagcagtggtttgtagttctccttgaagaggtccttcacatcccttgtaagttggattcctaggtattttattctctttgaagcaattgtgaatgggagttcactcatgatttggctctctgtttgtctgttgttggtgtttaagaatgcttgtgatttttgtacattgattttgtatcctgagagtttgctgaagttgcttatcagcttaaggagattttgggctgagacaatggggttttctagatatacaatcatgtcatctgcaaacagggacaatttgacttcctcttttcctaattgaataccctttatttccttctcctgcctgactgccctggccagaacttccaacactatgttgaataggagtggtgagagagggcatccctgtcttgtgccagttttcaaagggaatgcttccagtttttgcccattcagtatgatattggctgtgggtttgtcatagatagctcttactattttgaaatatgtcccatcaatacctaatttattgagagtttttagcatgaagggttgttgaattttgtcaaaggccttttctgcatctattgagataatcatgtggtttttgtctttggttctgtttatatgctggtttacatttattgatttgtgtatattgaaccagccttgcatcccagagatgaagcccacttgattatggtggataagctttttgacgtgctgctggattcggtttgccagcattttattgaggatttttgcatcaatgtttatcaaggatattggtctaaaattctcttttttggttgtgtctctgcctggctttggtatcaggatgatgctggcctcataaaatgagttagggaggattccctctttttctattgattggaatagtttcagaaggaatggtaccagttcctccttgtacctctggtagaattcggctgtgaatccatctggtcctggactctttttggttggtaagctattgattattgccacaatttcagatccgttattggtctattcagagattcaacttcttcctggtttagtcttgggagagtgtatgtgtcgaggaatttatccatttcttctagattttctagtttatttgcgtagaggtgtttttagtattctctgatggtagtttgtatttctgtgggatcagtggtgatatcccctttatcattttttattgcgtctatttgattcttctctctttttttctttatttagtcttgctagcggtttatcaattttgttgatcctttcaaaaaactagctcctggattcattaatttttttgaagggttttttgtgtctctatttccttcagttctgctctgattttagttatttcttgcctcctgctagcttttgaatgtgcttgctcttgcttttctagttcttttaattgtgatgttagggtgtcaattttggatctttcctgctttctcttgtgggcatttagcgctataaatttccctctacacactgctttgaatgtgtcccagagattctggtatgttgtgtctttgttctcgttggtatcaaagaacctctttatttctgccttcatttcgttatgtacccagtagtcatccaggagcaggttgttcagtttccatgtagttgagcagttttgagttagattcttaatgctgagttctagtttgattgcactgtggtctgagagatagttttttataatttctgttcttttacatttgctgaggagagctttacttccaagtatgtggtcaattttgtaataggtgtggtgtggtgctgaaaaaatgtatattctgttgatttggggtggagagttctgtagatgtctattaggtctgcttggtgcagagctgagttcaattcctgggtatccttgttgactttctgtctcattgatctgtctaatgttgacagtggggtgttaaagtctcccattattaatgtgtgggagtctaagtctctttgtaggtcactcaggacttgcttatgaatctgggtgctcctgtattgggtgcatatacatttaggatagttagctcttcttgttgaattgatccctttaccattatgtaatggccttctttgtctcttctgatctttgttggtttaaagtctgttttatcagagactaggattgcaacccctgctttttttgttttccatttgcttggtagaccttcctccatccatttattttgagcctatgtgtgtgtctgcacatgagatgggtttcctgaatacagcacactgatgggtcttgactctttatccaatttgccagtctgtgtcttttaattggagcatttagtccatttacattgaaagttaatcgtgttatgtgtgaatttgatcctgtcattatgatgttagctggttattttgttcgttagttgatgcagtttcttcctagtcttgatggtctttacattttgacatgattttgcagcggctggtaccagttgttcctttccatgtttagcgcttccttcaggagctcttttagggcaggcctggtggtgacaaaatctctcagcatttgcttgtctgtaaagtattttatttctccttcacttatgaagcttagtttgactggatatgaaattctgggttgaaaattcttttctttaagaatgttcaatattggcccccactctcttctggcctgtagagtttctgccgagagatccactgttagtctgatgggcttccctttgagggcaacctgacctttctctctggctgcccttaacattttttcctttatttcaactttggtgaatctgacaattatgtgtcttggagttgctcttcttgaggagtatctttgtggcattctctgtatttcctgaatctgaatgttggcctgccttgctagattggggaagttctcctggataatatcctacagagtgttttccaacttggttccattctccccgtcactttcaggtacaccaatcagacgtagatttggtcttttcacatagtcccatatttcttggaggctttgctcatttctttttattcctttttctctaaacttcccttctcgcttcatttcattcattttatcttccattgctgataccctttcttccagttgatcgcatcggctcctgaggcttctgcattcttcacgtagttctcgagccttgtttttcagctccatcagctactttaagcacttctctgtattggttattctagttatacattcttctaaatttttttcaaagttttcaacttctttgcctttggtttgaatgttctcccatagctcagagtaatttgatcgtcagaagccttcttctctcagctcgtcaaagtcattctccatccagctttgttccgttgctggtgaggaactgcgttcctttggaggaggagaggtgctctgctttttagagtttccagtttttctgttctgttttttccccatctttgtggttttatctccttttggtctttgatgatggtgatgtacagatgggtttttggtgtggatgtcctttctgtttgttagttttccttctaacagacaggaccctcagctgcaggtctgttggagtacccagccgtgtgagatgtcagtctgcccctgctggggggtgcctcccagttaggctgcttgggggtcaggggtcagggacccacttgaggaggcagtctgcccattctcagatctccagctgtgtgctaggagaaccactgctctcttcaaagctgtcagacagggacatttaagtctgcagaggttactgctgtctttttgtctgtgccctgcccccagaggtggagcctacagaggcaggcaggcctccttgagctgtggtgggctccacccagttcgagcttcccggctgctttgtttacctaagcaagcctgggcaatggcgggcgcccctcccccagcgtcgctgccaccttgcagtctgatctcagaccgctgggctagcaatcagcgagactccgtgggcgtaggaccctctgagccaggtgcaggatataatctcctggtgcgccgttttttaagcccgtcggaaaagcacagtattcgggtgggagtgacccgattttccaggtgccgtctgtcacccctttctttgactaggaaagggaactccctgaccccttgtgcttcccgagtgaggcaatgcctcgctctgctttggctcatgcatggtgcgcgcacccactgacctgcgcccactgtctggcactccctagtgagatgaacccggtacctcagatggaaatgcagaaatcactcgtcttctgcgtcgctcaggctgggagctgtagaccagagctgttcctattcggccatcttggctcctcctcctagaa

SEQ ID NO: 10670 - DNA, 7172 bp, Homo sapiens
cttttcttttttttttaattatactttaagttttaaggtacatgtgcacaacgtcaggtttgttacatatgtatacatgtgccatgttggtgtgctgcacccattaactcgtcatttaacattaggcatatctcctaatgctattccctcccccgtccccctattccacaacaggccctggtgtgtgatgttccccttcctgtgtccatgtgttctcattgtttaattcccacctatgagtgagaacatgcggtgttttgttttttgtcctggcgatagtttgctgagactggtttccagcttcatccatgtccctacaaaggacatgaactcatcattttttacggctgcacagtattccatggtgtatatgtgccacattttctttttttttttttttaattatactttaagttttagggtacatgtgcacattgcgcaggttagttacatatgtatacatgtgccatgctggtgtgctgcacccactaactcgtcatctagcattaggtatatctcccaatgctacccctcccccctccccccaccccaccacagtccacagagtgtgatattccccttcctgtgaccatgtgatctcattgttcaattcccacctatgagtgagaatatgcggtgtttggttttttgttcttgcgatagtttactgagaatgatggtttccaatttcatccatgtccctagaaaggacatgaactcatccttttttatggctgcatagtattccatggtgtatatgtgccacattttcttcatccagtctatcattgttggacatttgggtcggttccaagtctttgctattgtgaataatgccacaataaacatacgtgtgcatgtgtctttatagcagcatgatttatagtcctttgggtatatacccagtaatgggatggctgggtcaaatggtatttctagttctagatccctgaggaatcgccacactgacttccacaatggttgtactagtttacagtcccaccaacagtgtaaaagtgttcctatttctccacatcctctccagcacctgctgtttcctgactttttaatgattgccattctaactggtgtgagatggtatctcatagtgttttgatttgcatttctctgatggccagtgatgatgagcattttttcatgtattttttggctgcataaatgtcttcttttgagaagtgtctgttcatgtcctttgcccactttttgatggggttgtttgtttttttcttgtaaatttgtttgagttcattgtagattctggatattagccctttgtcagatgagtaggttgcgaaaattttctcccaggttgtaggttgcctgttcactctgatggtagtctcttttgctgtgcagaagctcttgagtttaattagatcccatttgtcaattttggcttttgttgccattgcttttggtgttttggacatgaagtccttgcccacgcctatgtcctgaatggtaatgcctaggttttcttctagggtttttatggttttaggtctaacgtttaaatctttaatccatcttgaattgatttttgtataaggtgtaaggaagggatccagtttcagctttctacatatggctagccagttttcccagcaccatttattaaatagggaatcctttccccattgcttgtttttctcaggtttgtcaaagatcagatagttgtaggtatgcggcgttatttctgagggctctgttctgttccattgatctatatctctgttttggtaccagtaccatgctgttttggttactgtaggcttgtagtatagtttgaagtcaggtagtgtgatgcctccagctttgttcttttggcttaggattgacttggcgatgtgggctcttttttggttccatatgaactttaaagtagttttttccaattctgtgaagaaagtcattggtagcttgatggggatggcattgaatctgtaaattaccttgggcagtatggccattttcacgatattgattcttcctacccatgagcatggaatgttcttccatttgtttgtatcctcttttatttccttgagcagtggtttgtagttctccttgaagaggtccttcacatcccttgtaagttggattcctaggtattttattctctttgaagcaattgtgaatgggagttcactcatgatttggctctctgtttgtctgttgttggtgtataagaatgcttgtgatttttgtacattgattttgtatcctgagactttgctgaagttgcttatcagcttaaggagattttgggctgagacgatggggttttctagataaacaatcatgtcgtctgcaaacagggacaatttgacttcctcttttcctaattgaataccctttatttccttctcctgcctgattgccctggccagaacttccaacactatgttgaataggagcggtgagagagggcatccctgtcttgtgccagttttcaaagggaatgcttccagtttttgcccattcagtatgatattggctgtgggtttctcatagatagctcttattattttgaaatacgtcccatcaatacctaatttattgagagtttttagcatgaagggttgttgaattttgtcaaaggctttttctgcatctattgagataatcatgtggtttttgtctttggctctgtttatatgctggattacatttattgatttgcgtatattgaaccagccttgcatcccagggatgaagcccacttgatcatggtggataagctttttgatgtgctgctggattcggtttgccagtattttattgaggatttttgcatcaatgttcatcaaggatattggtctaaaattctcttttttggttgtgtctctgcccagctttggtatcagaatgatgctggcctcataaaatgagttagggaggattccctctttttctattgattggaatagtttcagaaggaatggtaccagttcctccttgtacctctggtagaattcggctgtgaatccatctggtcctggactctttttggttggtaaactatagattattgccacaatttcagctcctgttattggtctattcagagattcaacttcttcctggtttagtcttgggagagtgtatgtgtcaaggaatgtatccatttcttctagattttctagtttatttgcgtagaggtgtttgtagtattctctgatggtagtttgtatttctgtgggatcggtggtgatatcccctttatcattttttattgtgtctatttgattctcctctctttttttctttattagtcttgctagcagtctatcaattttgttgatcctttcaaaaaaccagctcctggattcattgattttttgaagggttttttgtgtctctatttccttcagttctgctctgattttagttatttcttgccttctgctagcttttgaatgtgtttgctcttgcttttctagttcttttaattgtgatgttagggtgtcaattttggatctttcctgctttctcttgtgggcatttagtgctataaatttccctctacacactgctttgaatgcgtcccagagattctggtatgttgtgtgtttgttctcgttggtttcaaagaacatctttatttctgccttcatttcattatgtacccagtagtcattcaggagcaggttgttcagtttccatgtagttgagcggttttgagtgagattcttaatcctgagttctagtttgattgcactgtggtctgagagatagtttgctataatttctgttcttttacatttgctgaggagagctttacttccaactatgtggtcaattttggaataggtgtggtgtggtgctgaaaaaaacgtatattctgttgatttggggtggagagttctgtagatgtctattaggtccacttggtgcagagatgagttcaattcctgggtatccttgttgactttctgtctcgttgatctgtctaatgttgacagtggggtgttaaagtctcccattattaatgtgtgggagtctaagtctctttgtaggtcactcaggacttgctttatgaatctgggtgctcctgtattgggtgcatatatatttaggatagttagctcctcttgttgaattgatccctttaccattatgtaatggccttctttgtctcttttgatctttgttggtttaaagtctgttttatcagagactaggattgcaacccctgcctttttttgttttccattggcttggtagatcttcctccatccttttattttcagcctatgtgtgtctctgcacatgagatgggtttcctgaatacagcacactgatgggtcttgactctttatccaacttgccagtctgtgtcttttaattggagcatttagtccatttacatttaaagttaatattgttatgtgtgaatttgatcctgtcattatgatgttagctggtgattttgctcattagttgatgcagtttcttcctagtctcgatggtctttacattttggcatgattttgcagtggctggtaccggttgttcctttccatgtttagcgcttccttcaggagctcttttagggcaggcctggtggtgacaaaatctctcagcatttgcttgtctgtaaagtattttatttctccttcacttatgaagcttactttggctggatatgaaattctgggttgaaaattcttttctttaagaatgttgaatattggcccccactctcttctggcttgtagggtttctaccgagagatccgctgttagtctgatgggcttccctttgagggtaacccgacctttctctctggctgcccttaacattttttccttcatttcaactttggtgaatctgacaattatgtgtcttggagttgctcttctcgaggagtatctttgtggcgttctctgtatttcctgaatctgaatgttggcctgccttgctagattggggaagttctcctggataatatcctgcagagtgttttccaacttggttccattctccccctcactttcaggtacaccaatcagacgtagatttggtcttttcacatagtcccatatttcttggaggctttgctcatttctttttattcttttttctctaaacttcccttctcgcttcatttcattcatttcatcttccattgctgataccctttcttccagttgatcgcatcggctcctgaggcttctgcattcttcacgtagttctcgagccttggttttcagctccatcagctcctttaagcacttctctgtattggttattctagttatacattcttctaaatttttttcaaagttttcaacttctttgcctttggtttgaatgtcctcccgtagctcagagtaatttgatcgtctgaaaccttcttctctcagctcgtcaaagtcattctccatccagctttgttccgttgctggtgaggaactgcgttcctttggaggaggagaggcgctctgcgttttagagtttccagtttttctgttctgttttttccccatctttgtggttttatctacttttggtctttgatgatggtgatgtacagatgggtttttggtgtggatgtcctttctgtttgttagttttccttctaacagacaggaccctcagctgcaggtctgttggaataccctgccgtgtgaggtgtcagtgtgcccctgctggggggtgcctcccagttaggctgctcgggggtcaggggtcagggacccacttgaggaggtagtctgcccgttctcagatctccagctgcgtgctgggagaaccactgctctcttcaaagctgtcagacagggacatttaagtctgcagaggttcctgctgtctttttgtttgtctgtgccctgcccccagaggtggagcctacagaggcaggcaggcctccttgagctgtggtgggctccacccagttcgagcttcctggctgctttgtttacctaagcaagcctgggcaatggcgggctcccctcccccagcctcgctgccgccttgcagtttgatctcagactgctgtgctagcaatcagcgagattccgtgggcgtagcaccctccaagccaggtgtgggatatagtctcgtggtgcgccgttttttaagctggtctgaaaagcgcagtattcgggtgggagtgacccgattttccaggtgcgtccgtcacccctttctttgactcggaaagggaactccctgaccccttgcgcttcccaggtgaggcaatcgctcgccctgcttcggctcgcgcacggtgcgcacacccacatggcctgcgcccactgtctggcactccctagtgagatgaacccggtacctcagatggaaatgcagaaatcacctgtcttctgcgtcgctcacgctgggagctgtagaccggagctgttcctattcggccatcttggctcctcccactatgtgccacattttcttaatccagtctatcattgttggacatttggcttggttccaagtctttgctactgttaatagtgtcgcaatgccctctctcaccactcctattcaacatagcgttggaagttctggccagggcaatcaggcaggagaaggaaataaagggtgttcaattaggaaaagaggaagtcaaatagtctctgtttgcagataacatgattgtatatttagaaaaccccatcgtctcagcccaaaatcttaagctgataggcaacttcagcaaagtctcaggatacaaaatcaatgtgcaaaagacacaagcattcttatacaccaataacacacaaacagagagccaaatcatgagtgaactgccattcacaattgcttcaaagacaataaaatacctaggaatccaacttacaagggacgtgaaggacctcttcaaggagaactacaaaccactgctcaaggaaataaaagaggatacaaacaaatggaagaacattccatgctcatgggtaggaagaatcaatatcgtgaaaatggccatactgcccaaggtaatttatagatccaatgccatccccatcaagctaccaatgactttcttcacagaattggaaaaaactactttaaagttcatatggaaccaaaaaggagcccgcatcgccaagtcaatcctaagccaaaagaaaaaagctggaggcatcacgctacctgatttttccccttttcttgcttctcttctc

SEQ ID NO: 10671 - DNA, 5002 bp, Homo sapiens
tattttattagttttttatttttattttttaattatactttaagttctagggtacatgtgcacaatgtgcaggtttgttcatatgtatacacgtgccatgtcggtgtgctgcacccattaactcgtcatttacattaggtatatctcccaatactttccctccccacttccccaacctcacaacaggccccggtgtgtgatgttccccttcctgtgtacaagtgttctcattgttcaattcccacctaggagtgagaacatgcggtgtttgtttttttgttcttgtgatagattgctgagaatgatggtttccagtttcatccatgtccctacaaaggacatgagctcatccttttttatggctgcatagtattccaggatgtatatgtgccacattttctttgttttttttttttttttttttgagacagagtctcgctctgtcgcacattttcttaatccagtctatcattgatggatatttgggttggttccaagtttttcctattgtgaaaaatgctgcaataaacatatgtgtgcatgtgtgtctttatagcagcatgttttataatcctttggatatatacccagtagtgggatggctgggtcaaatggtatttctagttctagatccttgaggaatcgccacactgtcttccacaatggttgaaccagtttacagtcccaccaacagtgtaaaagtattcctatttctccacatcctctccagcacctgttgtttcctgactttttaatgatcaccattctaactggtgtgagatggtatctcgttgtggttttaatttgcatttctctgatggccagtgatgatgagcattttttcatgtgtctgttggctgcataaatgtcttcttttgagaagtgtctgttcatatcctttgcccactttctgatggggttgtttgtttttttcttgtaaatttgtttgagttctttgtagattctggatattagccctttgtcagatgagtagattgcaaaaattttctcccattctgtaggttgcctgttcactctgatggtagtttcttttgctgtgcagaatctccatagtttaattagatcccatttgtcaattttggcttttgttgccattgcttttggtgttttagacatgaagtccttgtccatgcctatgtccggaatggtattgcctaggttttcttctagggtctttatggttttaggtctaacgtttaagtctttaatccatcttgaattaatttttgtataaggtgtcaggaagggatccagttgcagctttctacatatgtctagccagttttcccagcatcatttattaaatagggaaacttttccccatttcttgttcttgccaggtttgtcaaagatcagatggttgtagatgtggggtattatttctgagggctctgttctgttccatttgtctatatctctgttttggtaccagcaccatgctgttttggttactgtagccttgtagtatagtttgaagtcaggtagcatgatgtctccagctttgttcttttggcttaggattgtcttggcagtgtgggctcttttttggttccatatgaactttaaagtagttttttccaattctgtgaagaaactcattggtagcttgatggggatggcactgaatctataaattaccttgggcagtatgtccattttcacgatattgattcttcctacccatgagcatggaatgctcttccatttgtttgtatctttttttattttgttgagcagtggtttgtagttctccttgaagaggtccttcacatcccttgtgagttggattcctaggtattttattctctttgaagccagtgtgaatgagagttcactcatgatttggctctctgtctgttattgctgtataagaatgcttgtgatttttgcacattgattttgtatcttgagactttgctgaagttgcttatcagcttaaggagactttgggctgagacgatggggttgtctaaatatacaatcatgtcatctgcaaacagggacaatttgacttccttttttcttaattgaataccctttatttctttctcctgtctgattgccctggccagaacttccaacactatgttgaataggagtggtgagagaggtcatccctgtctcgtgccagttttcaaagggaatgcttccagtttttgcccattcagtatgaataggcaaacccaataggctgtgggtttgtcataaatagctcttattattttgagatatgtcccatcaatacctaatttattgagagtttttagcatgaaaggctgttggattttgtcaagggccttttctgcatctattgagataatcatgtggtttttgtctttggttctgtttatatgctggattacatttattgatttgtgtatgttgaaccagccttgcatcccagggatgaagcccacttgatcatggtggatgagctttttgatgtgctgctggattcggtttgccagtattttattgaggaattttgcatcgatgttcatcagggacatttgtctaaaattctcctttttgttgtgtctctgccaggctttggtatcaggatgatgctggcctcataaaatgagttagggaggattccctctttttctattgattggaatagtttcagaaggaaaggtaccagctccttcttttacctctggtagaattcggctgtgaatctgtctggtcctggactttttttggttggtaggctattaattattgcctcaatttcagagcctgtttttggtctattcagagattcaacttcttcctggtttagtcttgggagggtgtatgtgttgaggaatttatccatttcttctagattttctagtttatttgcgtagaggtgtttgtagtattctctgatggtagtttgtatttctgtgggatcggtggtgatatcctatttatcattttttattccatctatttgattcttctttgttttcttcattagtcttgctagtggtctctcaattttgttgatcttttcaaaaaaccagctcctggattcgttaattttttgaagggttttttgtgtctctatttccttcagttctgctctgatcttagttatttattgccttctgctagcttttgaatgtatttgctcttgcttctctagttcttttaattgtgatgttagggtgtcaattttagatctttcctgctttctcttgtgggcatttagtgctataagtttccgtctacacactgctttaaatgtgtcccagagattctggtatgttgggtctttgttctcattggtttcaaagaacatctttatttctgccttcatttcgttatgtacccagtagtcattcaggagcaggttgttcagtttccatgtagttgagcagttttgagtgagtttcttaatcctgagttctagtttgattgcactgtggtctgagagacagtttgttataatttctgctcttttacatttgctgaggagtgctttacttccaactatgtagtcaattttggaataagtgcgatgtggtgctgagaagaatgcatattctgttgatttgggatggagagttctgtagatgtctattagatctgcttggtgcagagctgagttcaattcctggatatccttgttaactttctgtctcgttgatctgtctcttgttgacagtggggtgttaaagtctcccattattattgtgcgggagtctaagtctctttgtaggtctctaaggacttgctttatgaatctgggtgctcctgtattgggtgcatatatatttaagatagttagctcttcttgttgcattgatccctttaccattatgtaatggccttctttgtctcttttgatctttgttggtttaaagtctgttttatcagagactaggattgcaacccctgcctttttttgttttctatttgcttggtagatcttcctccatccctgtattttgatcctatgtgtgtctctgcaagtgagatgggtctcctgaatatagcacactgatgggtcttgactctttatccaatttgccggtctgtgtcttttaattggagcatttagcccatttacatttaaggttaatattgttatgtgtgaatttgaccctggcattatgatgttagctggtgattttgctcgttagctgatgcagtttcttcctagccttgatggtctttacaatttgtcatgtttttgcagtggctggtaccggttgttcctttccatgtttagtgcttccttcaggagctcttgtagggcaagcctggtggtgacgacatctctcagcatttcctttctttaaggtatttcatttctccttcgcttatgaagcttagtttggctggatatgaaattctgggttgaaaattcttttctttaagaatgttgaatattggcccccactctcttctggcttgtagagtttctgctgagagatccactgttagtctgatgggtttccctttttgggtaacccaacctttctctctggctgcccttaacattttttccctcatttcaactttggtgaatctgacaattatgtgtcttggagttgctcttctcgaggagtatctttgtggcagtctgtttatttcctgaatttgagtgttggcctgtcttgctaggttggggaagttctcctgcataatatcctgcagagtgttttccaacttggtttcattctccctgtcactttcaggtacaccaatcagacgtagatttggtcttttcacatagtcccctatttcttggaggctttaattcatttcttttcactcttttttctctaaacttcccttgtcgcttcatttcattcatttgatcttcaatcactgacacccttccttccagttgatcaaatcggctactgaagcttgtgcattcatcacatagttctcgtgccttggttttcagctccatcaggtcatttaaggacttctctacactggttattctagttagccattcgtctaatcttttttcaaggtt

SEQ ID NO: 10672 - DNA, 4994 bp, Homo sapiens
  SITE (4720): n equals a,t,g, or c
ttttagggggttattgacattttattttattttattttttattatactttaagttctagggtacatgtgcacagtgtgcaggtttgttacatatgtatacatgtgccatgttggtgtgctgcacctattaacttgtcatttaacattaggtatatctcctaatgctttccttcccccttccccccaccccacaacaggccccagtgtgtgatgttccccttcctatgtccaagtgttctcattgttcagttcccacctatgagtgagaacatgcggtgtttggttttttgtccttgtgacactttgctgagaatgatggtttccagcttcatccatgtccctacaaaggacatgaactcatccttttttatggctgcatagtattccatggtgtatatgtgccacattttcttaatccagtctatcattgatggacatttgggttggttccaagtctttactattgtgaatagtgctgcaataaacatacgcgtgcatgtgcctttatagcagcatgatttataatcctttgggtatatacccagtaatgggatggctgggtcaaatggtatttctagttctagatccctgaggagtcgccacactgacttccacaatggttgaactagtttacagtcccaccaacagtgtaaaagtgttcctatttctccacatcctctccagcacctgtggtttcctgaactttttaatgattgccattgtaactggtgtgagatggtatctcattgtggttttgatttgtatttctctgatagccagggatgatgagcattttttcatgtgtcttttggctgcataaatgtcttcttttgagaagtgtctgttcatatccttcgcccacttgttgatggggttgtttgtttttttcttgtaaatttgttggagttctttgtatattctggatattagccctttgtcagatgagtagattgcaaaaatgttctcccattctgtaggttgcctgttcactctgatggtagtttcttttgctgtgcagaagctctttagtttaattagatcccatttgtcaattttggcttttgttgccattgcttttggtgttttagacatgaagtccttgcccatgcctatgtcctgaatggtattgcctaggttttcctctagggtttttatggttttaggtctaacatttaagtctttaatccatcttgaattaatttttgtataagatgtaaggaagggatccagttccagctttctacatatggctagccagttttcccagcaccatttattaaatagggaatcctttccgcatttcttctttttgtcaggtttgtcaaagatcagatggtcgtagatgtgtggtattatttctgagggctctgttctgttccattggtctatatctctgttttggtaccagtaccatgctgttttggttactgtagccttgtagtatagtttgaagtcaggtagcgtgatgcctccagctttgttctttgggcttaggattgtcttggtaatgcgggctcttttttggttccatatgaactttaaagtagttttttccaattctgtgaagaaagtcattggtagcttgatggggatggcattgaatctataaattaccttgggcagtgtggccattttcacaataatgattcttcctatccatgagcatggaatgttcttccatttgtttgtatcctcttttatttcattgagcagtagtttgtagttctccttgaagaggtccttcacatcccttgtaagttggattcctaggtattttattctctttgaagcaagtgcgaatgggacttcactcatgatttggctctctgtttgtctgttattggtgtataagaatgcttgcgatttttgcacattgattttgtatcctgagactttgctgaagttgcttatcagcttaaggagattttgggctgagatgatggggttttctaaatatacaatcatgtcatctgcaaacagggacaatttgacttcctcttttcctaattgaataccctttatttctttctcctgcctgattgccctggccagaatttccaacactatgttgaataggagtggtgagagagggcatccctgtcttgtgccagttttcaaagggaatgcttccagtttttgcccattcagtatgatattggctgtgggtttgtcataaatagctcttattattttgagatacatctcatcaatgcctaatttattgagagtttttagcatgaagggctgttgaattttgtcaaaggccttttctgcatctattgagataatcatgtggcttttgtctttggttctgtttatatgctggattacgtttattgatttgcatatgttgaaccagtcttgcatcccagggatgaagcccacttgatcatggtgggtaagctttttgatgtgctgctggatttggtttgcccgtattttattgaggatttttgcatcgatgttcatcaaggatattggtctaaaattctctttttttgttgtgtctctgccaggctttggtatcatgatgatgctggcctgataagatgagttagggaggattccctctttttctattgattggaatagtttcagaaggaatggtaccagctcctccttgtacctctgatgaattcggctgtgaatccgtctggtcctggactttttttggttggtaggctattaattattgcctcaatttcagagcctgttattggtctattcagggattcaacttcttcgtggtttaatcttgggagggtgtatgtgtccaggaatttatccatttcttctagattttctagtttatttgcatagagatgtttatagtattctctgatactagtttgtatttctgtgggatcggtggtgatatcccctttgtcactttttattgtgtctatttgattcttctctcttttcttctttattagtcttgctagcggtctatctattttgttgatcttttcaaaaaaccagctcctggattcattgattttttgaagggttttttgtgtctctatctccttcagttcttctgtgatcttagttatttcttgccttctgctagcttttgaatgtgtttgctcttgcttctctagttcttttaattgtgatgttaggttgtcagttttagatgtttcctgctttctcttgtgggcatttagtgctgtaaatttccctctacacactgctttaaatgtcccagagattctggtatgttgtgtcgttgttctcattggtttcaaagaacatctttatttctgccttcatttcattatgtacccagtagtcattcaggagcaggttgttcagtttccatgtagttgagtggttttgagtgagtttcttaatcctgagttctagtttgattgcactgtggtctgaaagactgtttgttataaattctgttctcttacatttgctgaggagtcctttacttccaactatgtggtcaattttggaataagtgtgatgtggtgctgcgaagaatgtatgttctgttgatatgtggtgtagagtgctgtagatgtctattgggtctgcttggtgcagagctgagttcaattcctggatatccttgttaactttctgtctcgttgatctgtctaatgttgacagtggggtgttaaagtctcccattattagtgtgtgggagtctaagtctctttgtagatctctaaggacttgctttatgaatctgggtgctcctatattgggtgcatatatatttaagatagttagctcttcttgttgaattgatccttttaccattatgtaatggccttctttgtctcttttgatctttgttggtttaaagtctgttttatcagagactaggattgcaaccactggtttcttttgctttccatttgcttggtagatcttcctccatccctttattttgagcctatgtgtgtctctgcacgtgagatgggtctcctgaatacagcgcactgatgggtcttgactctttgtccaatttgccagtctgtgtcttttaattggaacatttagcccatttacatttaaggttaatattgttatgtgtgaatttgatccactccttatgatgttagctggttattttgctcgttagttgatgcagtttattcctagcatcgatgatctttacaatttgtcatgtttttgcagtggctggtactggttgttcctttccatgtttagtgcttccttcaggagctcttgtaaggcaggcctggtggtgacaaaatctctcagcatttgcttgtctgtaaaggattttatttctccttcgcttaagaagcttagtttggctggatatgaaattctgggttgaaaattcttttccttaagaatgttgaatattggcccccactctcttctgggttgtagagtttctgctaagagatccgctgttagtctgatgggtttccctttgtgggcaacccgacctttctctctggctgcccttaacattttttccttcatttcaactttggtggatctgacaattgtgtgtcttggagttgctcttctcgaggagtatctttgtggcattctctgtatttcctgaatttgaatgttggcctacctttctgggttggggatgttctcctggataatatcctgcagagtgttttcgaacttggttccattctccccgtcacttttaggtacaccaatcagacgtagatttggtcttttcacatagtcccatatttcttggaggctntgttcatttctctttactcttgtttctctaaacttctcttctcacttcatttcattcatttaatcttcaatcactgataccctttcttccagttgattgaatcggctactgaagcttgtgcattcgtcatgtagttctcgtgccatggttttcagctccgtcaggtcatttaaggacttctctaccccgattattctcgttagccattcttctaatcttttttcaaggtttttagcttctttgccatgggttcgaacttcctcctttagctcgg

SEQ ID NO: 10673 - DNA, 6083 bp, Homo sapiens
tggtcctcttgttttttttttttatttttttatttttttatttatttattttttattatactttaagttttagggtacatgtgcacattgtgcaggttagttacatatgtatacatgtgccatgctggtgcgctgcacccactaactagtcatctagcattaggtatatctcccaatgctatccctccccccctccccccaccccaccacagtccccagagtgtgatattccccttcctgtgtccatgtgatctcattgttcagtccccacctatgagtgagaatatgccgtgattggttttttgttcttgtgatagtttactgagaatgatgatttccagtttcatccatgtccctacaaaggacacgaactcatcattttttatggctgcatagtattccatggtgtatatgtgccacattttcttaatccagtctatcattgttggacatttgggttggttccaagtctttgctattgtgaataatgccgcaataaacatacgtgtgcatgtgtctttatagcagcacgatttatagtcatttgggtatatacccagtaatgggatggctgggtcaaatggtatttctagttctagatccctgaggaatcgccacactgacttccacaatggttgaactagtttacagtcccaccaacagtgtaaaagtgttcctgtttctccacatcctctccagcacctgttgtttcctgactttttaatgattgccattctaactggtgtgagatggtatctcattgtggttttgatttgcatttctctgatggccagtgatgatgagcattttttcatgtgtttcttggctgcataaatgtcttcttttgagaagtgtctgttcatgtcctttgcccactttttgatggggttgtttgtttttttcttgtaaatttgtttgagttcattgtagattctggatattagccctttgtcagatgagtagcttgcgaaaattttctcccattttgtaggttgcctgttcactctgatggtagtttcttttgctgtgcagaagctcttgagtttaatgagatcccatttgtcaattttggcttttgttgccattgcttttggtgttttggacatgaagtccttgcccatgcctatgtcctgaatggtaaatgcctaggttttcttctagggtttttatggttttagctctaatgtttaaatctttaatccatcttgaattgttttttgtataaggtgtaaggaagggatccagtttcagctttctacatatggctagccagttttcccagcaccatttattaaatagggaatcctttccccattgcttgtttttctcaggtttgtcaaagatcagatagttgtagatatgcggtgttatttctgagggctctgttctgttccattgatctatatctctgttttggtaccagtaccatgctgttttggttactgtagccttgtagtatagtttgaagtcaggtagtgtgatgcctccagctttgttcttttggcttaggattgacttggcgatgcgggctcttttttggttccatatgaactttaaagtagttttttccaattctgtgaggaaagtcattggtagcttgatggggatggcattgaatctgtaaattaccttgggcagtacggccatttttatgatactgattcttcctacccatgagcatggaatgttcttccatttgtttgtatcctcttttatttccttgagcagtggtttgtagttctccttgaagaggtccttcacatcccttgtaagttggattcctaggtattttcttctctttgaagcaattgtgaatgggagttcactcatgatttggctctccgtttgtctgttgttggtgtataagaatgcttgtgatttttgtacattgattttgtatcctgagactttgctgaagttgcttatcagcttaaggagattttgggctgagacaatggggttttctagatatacaatcatgtcgtctgcaaacagggacaatttgacttcctcttttcctaattgaataccctttgtttccttctcctgcctaattgccctggccagcacttccaacactatgttgaataggagtggtgagagagggcatccctgtcttgtgccagttttcaaagggaatgcttccagtttttgcccattcagtatgatattggctgtgggtttgtcatagatagctcttattattttgagatatgtcccatcaatacctaatttattgagagtttttagcatgaagggttgttgaattttgtcaaaggctttttctgcatctcttgagataatcatgtggtttttgtctttggctctgtttatatgctggattacatttattgatttgcgtatattgaaccagccttgtgtcccagggatgaagcccacttgatcatggtggataagctttttgaagtgctgctggattcgttttgccagtattttattgaggatttttgcatcaatgttcatcaaggatattggtctaaaattctctttttttgttgtgtctctgcctggctttggtatcagaatgatgctggccctcataaaatgagttagggaggattccctctttttctattgattggaatagtttcagaaggaatggtaccagttcctccttgtacctctggtagaattcagctgtgaatccatctggtcctggactctttttggctggtaagctattgattattgccacaatttcagctcctgttattggtctattcagagattcaacttcttcctggtttagtcttgggagagtgtatgtgttgaggaatttatccatttcttctagattttctagtttatttgcgtagaggtgtttgtagtattctctgatattagtttgtatttctgtgggattggtggtgatatcccctttatcattttttattgtgtctatttgattcttctctctttttttctttattagtcttgctagtggtctatcaattttgttgatcctttcaaaaaaccagctcctggattcattgattttttgaagggttttttgtgtctctatttccttcagttctgctctgattttagttatttcttgccttctgctatcttttgaatgtgtttgctcttgcttttctagttcttttaattgtgatgttagggtgtcaattttggatctttcctgctttctcttgtgggcatttagtgctataaatttccctctacacactgctttgaatgcgtcccagagattctggtatgttgtgtctttgttctcgttggtttcaaagaacatctttatttctgccttcattttgttatgtacccagtagtcattcaggagcaggttgttcagtttccatgtagttgagcggctttgagtgagattcttaatcctgagttctagtttgattgcactgtggtctgagagatagtttgttataatttctgttcttttacatttgctgaggagagctttacttccaagtatgtggtcaattttggaataggtgtggtgtggtgctgaaaaaaatgtatattctgttgatttggggtggagagttctgtagatgtctattaggtccacttggtgcagagctgagttcaattcctgggtatccttgttgactttctgtctcgttgatttgtctaatgttgacagtggggtgttaaagtctcccattattaatgtgtgggagtctaagtctctttgtaggtcactcaggacttgctttatgaatcttggtgctcctgtattgggtgcatatatatttaggatagttagctcttcttgttgaattgatccctttaccattatgtaatggccttctttgtctcttttgatctttgttggtttaaagtctgttttatcagagactaggattgcaacccctgcctttttttgttttccatttgcttggtagatcttcctccatccttttattttgagtctatgtgtgtctctgcacgtgagatgggtttcctgaatacagcacactgatgggtcttgactctttatccaatttgccagtctgtgtcttttaattggagcatttagtccatttacatttaaagttaatattgttatgtgtgaatttgatcctgtcatgatgatgttagctggtgattttgctcgttagttgatgcagtttcttcctagtctcgatggtctttacattttggcatgattttgcagcggctggtaccggttgttcctttccatgtttagtgcttccttcaggagctcttttagggcaggcctggtggtgacaaaatctctcagcatttgcttgtctgttaagtattttatttctccttcacttatgaagcttagtttggctggatatgaaattctgggttgaaatttcttgtctttaagaatgttgaatattggcccccactctcttctggcttgtagggtttctgctgagagatccgctgttagtctgatgggcttccctttgagggtaacccgacctttctctctggctgcccttaacattttttccttcatttcaactttggtgaatctgaccattatgtgtcttggagttgctcttctcgagaagtatctttgtggcattctctgtgtttcctgaatctgaacgttggcctgccttgctagattggggaagttctcctggataatatcctgcagagtgttttccaacttggttccattctccccatcactttcaggtacaccaatcagacgtagatttggtcttttcacatagtcccatatttcttggaggctttgctcatttctttttattcttttttctctaaacttcccttctcgcttcatttcattcatttcatcttccatcgctgataccctctcttccagttgatcgcatcggctcctgaggcttctgcattcttcacgtagttctcgagccttggttttcagctccatcagctcctttaagcacttctctgtattggttattctagttatacattcttctaaatttttttcaaagttttcaacttctttgcctttggtttgaatgtcctcctgtagctgagagtaatttgatcgtctgaagccttcttctctcagctcgtcaaagtcattctccatccagctttgttccgttgttggtgaggaactgcgttcctttggaggaggagaggcgctctgcgttttagagtttccagtttttctgttctgttttttccccatctttgtggttttatgtacttttggtctttgatgatggtgatgtacagatgggtttttggtgtggatgtcctttctgtttgttagttttccttctaacagacaggaccctcagctgcaggtctgttggaataccctgcagtgtgaggtgtcagtgtgcccctgctggggggtgcctcccagttcggctgctaggaggtcaggggtcagggacccacttgaggaggcagtctgccagttctcagatctccagctgcgtgctgggagaaccactgctctcttaaaagctgtcagacagggacatttaagtctgcagaggttactgctgtccttttgtttgtctgtgccctgcccccagaggtggagcctacagaggcaggcaggcctccttgagctgtggtgggctccacccagttcgagcttcctggctgctttgtttacctaatcaagcctgggcaatggcgggtgcccctcccccagcctcactgccgccttgcagtttgatctcagactgcagtgctagcaatgagcgagactccgtgggtgtaggaccctccgagccaggtgcgggatataatcttgtggtgcgccgttttttaagcccgtcggaaaagcgcagtattcgggtatgagtgacccgattttccaggtgccgtccgtcacccctttctttgactcggaaagggaactccctgaccccttgcgcttcccaagtgaggcaatgcctcgccctgtttcggctggcgcacggtgtgcgcacccactctcctgcacccactgtctggcactccctagtgagatgaacccggtacctcagatggaaatgcagaaatcaccatcttctgcgttgctcaggctgggagctgtagacaggagctgttcctattcggccatcttggctcctctcttcaaaaat

SEQ ID NO: 10674 - DNA, 6162 bp, Homo sapiens
gtttcctttttttattattattatactttaagttttagggtacatgtgcacaatgtgcagtttagttacatatttatacatgtgccatgctggtgtgctgcacccattaactcgtcatttagcattaggtatatttcctaaagctatccttccccctccccccacaccacaacagtccccagagtgtgatgttccccttcctgtgttcatgtgttctcattgttcaattcccacctatgagtgagaatatgcggtgtttggttttttcttcttgcgataatagtttactgagaatgatgatttccaatttcatccatgtccctacaaaggacatgaactcatcattttttatggctgcatagtattccatgctgtatatgtgccacattttcttaatccagtctatcattgttggacatttgggttggttacaagtctttgctattgtgaatagtgccgcaataaacatacgtgtgcatgtgtctttatagcagcatgatttatagtcctttgggtatataccgagtaatgggatggctgggtcaaatggtatttctagttctagatccctgaggaatcgtcacactgacttccacaatggttgagctagtttacagtcccaccaacagtgtaaaagtgttcccatttctccacatcctctccagaacctgttgtttcctgactttttaatgattgccattgtaactggtgtgatatgatatctcattgtggttttgatttgcatttctctgatggccagtgatggtgagcattttttcatgtgttttttggctgcataaatgtcttcttttgagaagtgtctgttcatgtccttcgcccactttttgatgaggttgtttgtttttttcttgtaaatttgtttgagtccattgtagattctggatattagccctttgtcagatgagtaggttgcgaaaattttctcccattttgtaggttgcctgttcactctgatggtagtttcttttgctgtgcagaagcgcttgagtttaattagatcccatttatcaattttggcttttgttgccattgcttttggtgttttagacatgaagtatttgcccatgcctatgtcgtgaatggtaatgctaaggttttcttctaggatattttatgattttaggtctaacgtttaagtctttaatccatcttgaattaatttttgtataaggtgtaaggaagggatccagtttcagctttctacatatgtctagccagttttcccagcaccatttattaaatagggaatcctttccccattgcttgtttttctcaggtttgtcaaagatcagatagttgtagataagcggtgttatttctgagggctctgttctgctccattgatctatatctctgttttggtaccagtaccatgctgttttggttactgtatccttgtagtatagtttgaagtcaggtagcatgatgcctccagctttgttcttttggcttaggattgactttgcgatgcgggctcttttttggtttcatatgaactttaaagttgttttttccaattctgtgaagaaagtcattggtagcttgatggggatggcattgaatctataaattaccttgggcagtatggccattttcacgatattgattcttcctacccatgagcatggaatgttcttccatttgtttgtatcctcttttatttccttgaggagtggtttgtagttctccttgaagaggtccttcacatcccttgtaaggtggattcctaggtattttattctctttgaagcaattgtgaatgggagttccctcatgatttggctctctgtttgtctgttattggtgtataagaatgcttgtgatttttgtacattgattttgtatcctgagactttgctgaagttgcttatcagcctaaggagattttgggctgagacaatggggttttctagatatacaatcatgtcatctgcaaacagggacaatttgacttcctcttttcctaatccaataccctttatttccttctcctgcctaattgccctggccagaacatccaacactatgttgaataggagtggtgagagagggcatccctgtcttgtgccagttttcaaagggaatgcttccagtttttgcccattcagtatgatattggctgtgggtttgtcatagatagctcttattcttttgagatatgtcccatcaatacctaatttattgagagtttttagcatgaagcgttgttgaattttgtcaaaggccttttctgcatctattgagataatcatgtggtttttgtctttggttctgtttatatgctggattacatttattgatttacatatattgaaccagcctttcatcccatggatgaagcccacttgatcatggtggataagctttttgatgtgctgctggattcggtttgccagtattttattgaggatttttgcatcaatgttcatcaaggatattggtctaaaattctcttttttggttgtgtctctgcctggctttggtatcaggatgatgctggcctcctaaaatgaggtagggaatcctctttttctgttgattggaatagtttcagaagcaatggtaccagttcctccttatacctctggtagaatttggctgtgaatccatctggtcctggactctttttggttggtaaggtattgattattgccacaatttcagagcctgttattggtctattcagagattcaacttcttcctggtttagtcttgggagggtgcatgtgtcaaggaatttatccatttcttctagattttctagtttatttgtgtagaggtgtttgtagtattctctgatggtagtttgtatttctgtggaatcagtggtgatatcccctttatcattttttattgcatctatttgattcttctctcttttcttctttattagtcttgctagtggtctatcaattttgttgatcctttcaaaaaaccagctcctcgattcattaattttttgaagggttttttgtgtctctatttccttcagttctgctctgattttagttatttcttgccttctgctagcttttgaatgtgtttgctcttgcttttctagttcttttaattgtgatgttagggtgtcaattttagatctttcctgctttctcttgtgggcatttagtgctataagtttccctctacacactgctttgaatgtgtcccagagattctggtatgttgtgtctttgttctcatcggtttgaaagaccatccttatttctgccttcatttcattatgtacccagtagtcattcaggagcaggttgttcagtttccatgtagttgagcggttttgactgagttttgtaatcctgagttctagattgattgcactgtggtctgagagatagtttgttataatttctgttctttacagttgctgaggagagctttgcttccaactatgtggtcaattttgggataggtgtggtgtggtgctggaaaaaatgtatattctgttgatttggggtggagagttctgtagatgtctgttaggtcctcttggtgcagagctgagttcaattcctgagtatccttgttgactttctgtctcgttgatctgtctaatgttgacagtggggtgttaaagtctcccattattaatgtgtgggagtctaagtctctttgtaggtcactcaggagttgctttatgaatctgggtgctcctgtattgggtgcatatatatttaggatagttagctcttcttgttgaattgatccctttaccattatgtaatgtccctctttgtctcttttgatctttgttggtttaaagtctgttttatccgagactaggattgcaacccctgcccttttttgttttccatttgcttggtagatcttcctccatccttttgttttgagcctatgtgtgtctctgcatgtgaggtgggtttcctgaatacagcacactgatgggtcttgactctttatccaatttgccagtctatatcttttaattggagcatttagtccatttacatttaaagttaatattgttatgtgtgaatttgatcctgtcattatgatgttagctggctattttgctcgttagttgatgcagtttcttcctagcctcgatggtctttacaatttggcatgattttacagtgactggtactggttgttcctttccatgtttagtgcttctttcaggagttcttttagggcaggcctggtggtgaaaaaatctctcagcatttgcttgtctgtaaaggattttatttctccttcacttatgaagcttagtttggctggatatgaaattctgggttgaaaattcttttctttaagaatgctgaatattggcccccagtctcttctggcttgtagagtttctgccgagacatctgctgttagtctgatgggcttccctttgtgggtaacccgacctttctctctggctgcctttaacattttttccttcatttctactttggtgaatctgataattatgtgtcttggagttgctcttctcaataagtatctttgtggcattctctgtatttcctgaatctgaatgttggcctgccttgctagattggggaagttctcctggataatatcctgcagagtgttttccatcttggttccattctccctgtcactttcaggtacaccaatcagacgtagatttggtcttttcacatagtcccatatttcttggaggcttttttcgtttctttttattcttttttctctaaactttccttctcacttcatttcattcatttcatcttccatcactgataccctttcttccagttgatcgcattggctcctgaggcttctgcattcttcacgtagttcttgagccttggctttcagctccattagctcctttaagcacttctctgtattggttattctagttatacatttatctaaatttttttcaaattttcaacttccttgcctttggtttgaatttcctcctgtagctcagattagtttgattgtctgaggccttcttctctcaactcgtcaaagtcattctccgtccagctttgttccgttcctggtgaggagctgtgttcctttggaggaggagaggcgctctgctttttagagtttccagtttttctgctctattttttccccatctttgtcgttttatctacttttggtctttgatgatggtgatgtacagatgggtttttggtgtggatgtcctttctgtttgttagttttccttctaacagacaggaccttcagctgcaggtctgttggagtttgctagaggcccactccagaccctatttgcctgggtaccagcaacggtggctgcagaacaggggatttttgtgaaccaaaaatgctgctgtctgatcgttcctctggaagttttgtctcagaggagtacccggccatgtgcagtgtcagtctgcccctacttgggggatgcctcccaggtaggctgctcgtggttcagggatcagggacccacttgaggaggcagtctgcccattctcagatcaccagcttcatgctgagagaaccactgctctcttcaaagctgtcagacagggacatctaagtctgcagacgttactgctgtctttttgtttgtctgtgcccttcccacagaggtggagcctacagaggcaggcaggcctccttgagctgtggtgggctccacccagttcgagcttcctggctgttttgtttacctaagcgagcctgggcaatggcgggtgcccctcccccagccttgctgccaccttgcagtttgatctcagactgctgtgctagcaatcagtgagactccatgggcgtaggaccgtctgagccaggtgcgggatataatctcctggtgcaccattttttaagcccgtctgaaaagcgaagtattagggtgggagtgaccccattttccaagtgccgtctgtcacccctttctttgactaggaaagggaactccctgtccccttgcgcttcccgagtgaggcaatgcctcgccctgctttggctggtgcacggtgtgctgcacccactgtcttgcgcccactgtctggcactccctagtgagatgaacccggtacctcagatggaaatgcagaaatcacgcatcttctgcatcgctcatgctgggagctgtagactggagctgttcctattcggccatcttggctcccg

SEQ ID NO: 10675 - DNA, 6033 bp, Homo sapiens
ttctttttttttattattattattattatactttaagttttagggtacatgtgcacattgtgcaggttagttacatatgtatgtatacatgtgccatgctggtgtgctgcacccactaactcgtcatctagcattaggtatatctcccactgctatccctcccccctccccccaccacaccacagtccccagagtgtgattgttccccttcctgtgtccacgtggtctcattgttcaattcccacctatgagtgagaatatgcggtgtttggttttttgttcttgggatagtttactgagaatgacgatttccaatttcatccatgtccctaaaggacatgaactcatcattttttatggctgcatagtattccatggtgtatatgtgccacattttcttaatccagtctatcattgttggacatttgggttggttccaagtctttgctattgtgaataatgccgcaataaacatacgtgtgcatgtgtctttatagcagcatgatttatagtcctttgggtatatacccagtaatgggatggctgggtcaaatggtatttctagttctagatccctgaggaatcaccacactgacttccacaatggttgaactagtttacagtcccaccaacagtgtaaaagtgttcccatttctccacatcctctccagcacctgttgtttcctgactttttaatgatcgccattctaactggtgtaagatggtatctcattgtggttttgatttgcatttctctgacggccagtgatggtgagcattttttcatgtgtcttttggctgcataaatgtcttcttttgagaagtgtctgttcatgtcctttgcccactttttgatggggttgtttgtttttttcttgtaaatttgtttgagttcattgtagattctggatattagccctttgtcagatgagtaggttgcaaacattttctcccattctgtaggttgcctgttcactctgatggtagtttcttttgctgtgcagaagctctttagtttaattagatcccatttgtcaattttggcttttgttgccattgcttttggtgttttagacatgaagtccttgcccatgcctatgtcctgaatggtaatgcctaggttttcttctagggtttttatggttttaggtctaacgtttaagtctttaatccatcttgaattgatttttgtataaggtgtaaggaagggatccagtttcagctttctacatatggctagccagttttcccagcaccatttattaaatagggaatcctttccccattgcttgtttttctcaggtttgtcaaagatcagatagttgtagatatgcggcgttatttctgagggctctgttctgttccattgatctatatctctgttttggtaccagtaccatgctgttttggttactgtagccttgtagtatagtttgaagtcaggtagtgtgatgcctccagctttgttcttttggcttaggaatgacttggcaatgcgggctcttttttggttccatatgaactttaaagtagtttttcccaattctgtaaagaaaggcattggtagcttgatggggatggcattgaatctgtaaattaccttgggcagtatggccattttcacgatattgattcttcctacccatgagcatggaatgttcttccatttgtttgtgtcctcgtttatttccttgagcagcggtttgtagttctccttgaagaggtccttcacatcccttgtaagttggattcctaggtattttattctctttgaagcaattgtgaatgggagttcactcatgatttggctctctgtttgtctgttgttggtgtataggaatgcttgtgatttttgcacattgattttgtatcctgagactttgctgaagttgcttatcagcttaaggagattttgggctgagacaatggggttttctagatatacaatcatgtcatctgcaaacagggacaatttgacttcctcttttcctaattgaataccctttatttccttctcctgcctaattgccctggccagaacttccaacactatgttgaataggagtggtgagagagggcatccctgtcttgtgccagttttcaaagggaatgcttccagtttttgcccattcagtatgatattggctgtgggtttgtcatagatagctcttattattttgaaatatgtcccatcaatacctaatttattgagagcttttagcatgaagcattgttgaattttgtcaaaggccttttctgcatctattgagataatcatgtggtttttgtctttggctctgtttatgtgctggattacatttattgatttgcgtatattgaaccagccttgcatcccagggatgaagcccacttgatcatggtggataagctttttgatgtgctgctggatttggtttgccagtattttattgaggatttttgcatccatgttcatcaaggatattggtctaaaattctcttttttggttgtgtgtctgcccggctttggtatcagaatgatgctggcctcagaaaatgagttagggaggattccctctttttctattgattggcatagtttcagaaggaatggtaccagttcctccttgtacctctggtagaattcggctgtgaatccatctggtcctggactctttttggttggtaagctattgattattgccacaatttcacatcctgttattggtctattcagagattcaacttcttcgtggtttagtcttggaagagtgtatgtgtcaaggaatttatccatttcttctagattttctagtttatttgcatagaggtgtttgtagtattctctgatggtagtttgtatttctgtgggatcggtggtgatatcccctttatcattttttattgcgtctatttgattcttctctctttttttctttattagtcttgctagcggtctatcaattttgttgatcctttcaaaaaaccagctcctggattcattaattttttcaagggttttttgtgtctctatttccttcagttctgctctgattttagttatttcttgccttctgctagcttttgaatgtgtttgctcttgcttttctagttcttttaattgtgatgttagggtgtcaattttggatctttcctgctttctcttgtgggcatttagtgctataaatttccctctacacactgctttgaatgtgtcccagagattctggtatgttgtgtctttgttctcattggtttcaaagaacatctttatatctgccttcatttcgttatgtacccagtagtcatttaggagcaggttgttcagtttccatgtagttgagcagttttgagtgagattcttaatcctgagttctagtttgattgcactgtggtctgagagacagtttgttttaatttctgttattttacatttgctgaggagagctttacttccaagaatgtggtcaattttggaataggtgtggtgtggtgctgaaaaaaatgtatattctgttgatttggggtggagagttctgtagatgtctattaggtcctcttggtgcagagctgagttcaattcctgggtatccttgttgactttctgtctcgttgatctgtctaatgttgacagtggggtgttaaagtctcccattattaatgtgtgggagtctaagtctctttgtaggtcactcaggacttgctttatgaatctgggtgctcctgtattgggtgcatatatatttaggatagttagctcttcttattgaattgatccctttaccattatgtaatggccttctttgtctcttttgatctttgttggtttaaagtctgttttatcagagactaggattgcaacccctgcctttttttgttttccatttgcttggtagatcttcctccatccttttattttgagcctatgtgtgtctctgcacgtgagatgggcttcctgaatacagcacactgatgggtcttgactctttatccaatttgccagtctgtgtcttttaattggagcatttagtccatttacatttaaagttaatagtgttatgtgtgaatttgatcctgtcattatgatgttagctggttattttgctcgttggttgatgcagtttcttcctagtctcgatggtctttacattttggcatgattttgcaagcggctggtaccagttgttcctttccatgtttagcacttccttcaggagctcttttagggcaggcctggtggtgacaaaatctctcagcatttgcttgtctgtaaagtattttatttctccttcacttatgaagcttagtttggctggatatgaaattctgggttgaaaattcttttctttaagaatgttgaatattggcccccactctcttctggcttgtagggtttctgccaagagattcgctgttaagtctgatgggcttccctttgagggtaaccgacctttctctctggctgcccttaacaattttttccttcatttcaactttggtgaatctgacaattatgtgtcttggagttgctcttctcgaggagtatctttgtggcgttctctgtatttcctgaatctgaatgttggcctgccttgctagattggggaaattctcctggataatatcctgcagagtgttttccaacttggttccattctccccatcactttcaggtacaccaatcagacgtagatttggtcttttcacatagtcccatatttcttggaggctttgctcgtttctttttcttttttctctaaactttccttctcgcttcatttcattcatttcatcttccattgctgataccttttcttccagttgatcgcagcggctcctgaggcttctgcattcttcacgtagttctcgagccttggttttcagctccatcagctcctttaagcacttctctgtattggttattctagttatacattcttctaaatttttttcaaagttttcaacttctttgcctttggtttgaatgtcctcccatagctcagagtaatctgatcgtctgaagccttcttctctcagctcgtcaaagtcattctccgtccagctttgttccgttgctggtgaggagctgcgttcctttggaggaggagaggcactctgatttttagagtttccagtttttctgttcagttttttccccatctttgtggttttatctacttttggtctttgatgatggtgatgtacagatgggtttttggtgtggatgtcctttctgtttgttagttttccttctaacagacaggaccctcagctgcaggtctgttggagaaccctgcagtgtgaggtatcagtgtgcccctgctggagggtgcctcccagttaggctgctcggggctcaggggtcacggacccacttgaggaggcagtctgcccgttctccgatctccagctgcctactgggagaaccactgctctcttcaaagctgtcagacagggacatttaagtctgcagaggttactgctgtctttttgtctgtgccctgcccccagaggtggagcctacagaggcacgcaggcctccttgagctgtggtgggctctacccagttcaagcttcccggctgctttgtttacctaagcaagcctgggcaatggtgggtgcccctcccccagcctcggtgctgccttgcagtttgatctcagactgctgtgctagcaatcagcgagactccatggggtaggaccctccgagccaggtgcgggatataatctcgtggtgcgccgttttttaagcccgtcggaaaagcgcagtattcgggtcgggtgggagtgacccgattttccaggtgccgtcggtcacccctttctttgattaggaaaggcaactccctgacctcttgcacttcccaagtgaggcaatgcctcgccctgcttcggctcacacacggtgcgcgcacccactgacctgcgcccactgtctggcactccctagtgagatgaacctggtaccacagatggaaatgcagaaatcacccgtcttctgcgtagctcaggctgggagctgtagaccggagctgttcctattcggtcatct

SEQ ID NO: 10676 - DNA, 6147 bp, Homo sapiens; identical to SEQ ID NO: 10420

SEQ ID NO: 10677 - DNA, 6069 bp, Homo sapiens
taatagttttttttttcttttttttttttttaatttttttttttattatactctaagttttagggtacatgtgaacattgtgcaggttagttacatatgtatacatgtgccatgctggtgcgctgcacccactaacgtgtcatctagcattaggtatatctcccaatgctatccctcccccctcccccgaccccaccacagtccccagagtgtgatattccccttcctgtgtccatgtgatctcattgttcaattcccacctatgagtgagaatatgcggtgtttggttttttgttcttgcgatagtttactgagaatgatggtttccaatttcatccatgtccctacaaaggacatgaactcatcattttttatggctgcatagtattccatggtgtatatgtgccacattttcttaatccagtctatcattgttggacatttgggttggttccaagtctttgctattgtgaatagtgccgcaataaacatacgtgtgcatgtgtctttatagcagcatgatttatagtcatttgggtatatacccagtaatgggatggctgggtcaaatgggatttctagttctagatccctgaggaatcgccacactgacttccacaatggttgaactagtttacagtcccaccaacagtgtaaaagtgttcctatttctccacatcctctccagcacctgttgtttcctgactttttaatgattgccattctaactggtgtgagatgatatctcatagtggttttgatttgcatttctctgatggccagtgatgatgagcattttttcatgtgttttttggctgcataaatgtcttcttttgagaagtgtctgttcatgtccttcgcccactttttgatggggttgtttgtttttttcttgtaaatttgtttgagttcattgtagattctggatattagccctttgtcagatgagtaggttgcgaaaattttctcccatgttgtaggttgcctgttcactctgatggtagtttcttttgctgtgcagaagctctttagtttaattagatcccatttgtcaattttggcttttgttgccattgcttttggtgttttggacatgaagtccttgcccacgcctatgtcctgaatggtaatgcctaggttttcttctagggtttttatggttttaggtctaacgtttaaatctttaatccatcttgaattgatttttgtataaggtgtaaggaagggatccagtttcagctttctacatatggctagccagttttcccagcaccatttattaaatagggaatcctttccccattgcttgtttttctcaggtttgtcaaagatcagatagttgtagatatgcgacattatttctgagggctctgttctgttccattgatctatatctctgttttggtaccagtaccatgctgttttggttactgtagccttgtagtatagtttgaagtcaggtagtgtgatgcctccagctttgttcttttggcttaggattgacttggcgatgcgggctcttttttggttccatatgaactttaaagtagttttttccaattctgtgaagaaaggcattggtagcttgatggggatggcattgaatctgtaaattaccttgggcagtatggccattttcacgatatcgattcttcctacccatgagcatggaatgttcttccatttgtttgtgtcctcttttatttccttgagcagtggtttgtagttctccttgaagaggtccttcctatcccttgtaagttggattcctaggtattttattctctttgaagcaattgtgaatgggagttcactcatgatttggctctctgtttgtctgttgttggtgtataagaatgcttgtgatttttgcacattgattttgtatcctgagactttgctgaagttgcttatcagcttaaggagattttgggctgagacgatggggttttctagataaacagtcatgtcgtctgcaaacagggacaatttgacttcctcttttcctaattgaataccctttatttccttctcctgcctgattgccctggccagaacttccaacactatgttgaataggagtggtgagagagggcatccctgtcttgtgccagttttcaaagggaatgcttccagtttttgcccattcagtatgatattggctgtgggtttgtcatagatagctcttattattttgaaatacgtcccatcaatacctaatttattgagagtttttagcatgaagggttgttgaattttgtcaaaggctttttctgcatctattgagataatcatgtggtttttgtctttggctctgtttatatgctggattacatttattgatttgcgtatattgaaccagccttgcatcccagggatgaagcccacttgatcatggtggataagctttttgatgtgctgctggattcggtttgccagtattttatggaggatttttgcatcaatgttcatcaaggatattggtctaaaattctcttttttggttgtgtctctgcccggctttggtatcagaatgatgctggcctcataaaatgagttagggaggattccctctttttctattgattggaatagtttcagaaggaatggtaccagttcctccttgtacctctggtagaattcggctgtgaatccatctggtcctggactctttttggttggtaaactattgattattgccacaatttcagagcctgttattggtctattcagagattcaacttcttcctggtttagtcttgggagagtgtatgtgtcgaggaatgtatccatttcttctagattttctagtttatttgcgtagaggtgtttgtagtattctctgatggtagtttgtatttctgtgggatcggtcgtgatatcccctttatcattttttattgtgtctatttgattcttctctctttttttctttattagtcttgctagcggtctatcaattttgttgatcctttcaaaaaaccagctcctggattcattgattttttgaagggttttttgtgtctctatttccttcagttctgctctgattttagttatttcttgccttctgctagcttttgaatgtgtttgctcttgcttttctagttcttttaattgtgatgttagggtgtcaattttggatctttcctgctttctcttgtaggcatttagtgctataaatttccctctacacactgctttgaatgtgtcccagagattctggtatgtggtgtctttgttctcgttggtttcaaagaacatctttatttctgccttcatttcgttatgtacccagtagtcattcaggagcaggttgttcagtttccatgtagttgagcggctttgagtgagattcttaatcctgagttctagtttgattgcactgtggtctgagagatagtttgttataatttctgttcttttacatttgctgaggagagctttacttccaactatgtggtcaattttggaataggtgtggtgtggtgctgaaaaaaatgtatattctgttgatttggggtggagagttctgtagatgtctattaggtctgcttggtgcagagctgagttcaattcctgggtatccttgttgactttctgtctcgttgatctgtctaatgttgacagtggggtgttaaagtctcccattattaatgtgtgggagtctaagtctctttgtaggtcactcaggacttgctttatgaatctgggtgctcctgtattgggtgcataaatatttaggatagttagctcctcttgttgaattgatccctttaccattatgtaatggccttctttgtctcttttgatctttgttggtttaaagtctgttttatcagagactaggattgcaacccctgcctttttttgttttccatttgcttggtagatcttcctccatccttttattttgagcctatgtgtgtctctgcacgtgagatgggtttcctgaatacagcacactgatgggtcttgactctttatccaacttgccagtctgtgtcttttaattgcagaatttagtccatttatatttaaagttaatattgttatgtgtgaatttgatcctgtcattatgatgttagctggtgattttgctcattagttgatgcagtttcttcctagtctcgatggtctttacattttggcatgattttgcagcggctggtaccggttgttcctttccatgtttagcgcttccttcaggagctcttttagggcaggcctggtggtgacaaaaatctctcagcatttgcttgtctataaagtattttatttctccttcacttatgaagcttagtttggctggatatgaaattctgggttgaaaattcttttctttaagaatgttgaatattggcccccactctcttctggcttgtagggtttctgccaagagatccgctgttagtctgatgggctttcctttgagggtaacccgacctttctctctggctgcccttaacgttttttccttcatttcaactttggtgaatctgacaattatgtgtcttggagttgctcttctcgaggagtatctttgtggcgttctctgtatttcctgaatctgaacgttggcctgccttgctagattggggaagttctcctggataatatcctgcagagtgttttccaacttggttccattctccacatcactttcaggtacaccaatcagacgtagatttggtcttttcacatagtcccatatttcttggaggctttgctcatttgtttttattcttttttctctaaacttcccttctcgcttcatttcattcatttcatcttccattgctgataccctttcttccagttgattgcatcggctcctgaggcttctgcattcttcacgtagttctcgagccttggttttcagctccatcagctcctttaagcacttctctgtattggttattctagttatacattcttctaaatttttttcaaagttttcaacttctttgcctttggtttgaatgtcctcccgtagctcagagtaatttgatcgtctgaagccttcttctctcagctcgtcaaaatcattctccatccagctttgttctgttgctggtgaggaactgcgttcctttggaggaggagaggcgctctgcgttttagagtttccagtttttctgttctgttttttccccatctttgtggttttatctacttttggtctttgatgatggtgatgtacagatgggttttcggtgtagatgtcctttctggttgttagttttccttctaacagacaggaccctcagctgcaggtctgttggaataccctgccgtgtgaggtgtcagtgtgcccctgctggggggtgcctcccagttaggctgctcgggggtcaggggtcagggacccacttgaggaggcagtctgcccgttctcagatctccagctgcgtgctgggagaaccactgctctcttcaaagctgtcagacagggacacttaagtctgcagaggttactgctgtctttttgtttgtctgtgccctgcccccagaggtggagcccacagaggcaggcaggcctccttgagctgtggtgggctccacccagttcgagcttcccggctgctttgtttacctaagcaagcctgggcaatcaatggcgggcgcccctcccccagcctcgttgccgccttgcagtttgatctcagactgctgtgctagcaatcagcgagattccgtgggcgtaggaccctctgagccaggtgtgggatatagtctcgtggtgcgccgtttcttaagccggtctgaaaagcgcaatattcgggtgggagtgacccgattttccaggtgcgtccgtcacccctttctttgactcggaaagggaactccctgaccccttgcgcttcccaggtgaggcaatgcctcgccctgcttcggctcgcgcacggtgcgcacacacactggcctgcgcccactgtctggcactccctagtgagatgaacccggtacctcagatggaaatgcagaaatcacccgtcttctgcgtcgctcacgctgggagctgtagaccggagctgttcctattcggccatcttggctccacatcca

SEQ ID NO: 10678 - DNA, 6050 bp, Homo sapiens
gttataaataattcatgtgatttttttttattattatactttaagttttagggtacatgtgcacattgtgcaggttagttacatatgtatacatgtgccatgctggtgcgctgcacccactaactcgtcatctagcattaggtatatctcccgatgctatcccgcccccctccccccaccccacaacagtccccagagtgtgatattccccttcctgtgtccatgtgatctcattgttcaattcccacctatgagtgagaatatgcggtgtttggttttttgttcttgtgatagtttactgagaatgatgatttccaatttcatccatgtccctacaaaggacatgaactcatcattttttatggctgcatagtattccatggcgtatatgtgccacattttcttaatccagtctaccatagatggacatttgggttggttccaagtctttgctattgtgaataatgccgcaataaacatacgtgtgcatgtgtctttatagcagcatgatttattctcctttgggtatatacccagtaataggatggctgggtcaaatggtatttctagttctagatccctgaggaattgccacactgacttccaccatggttgaactagtttacagtccccccaacagtgtaaaagtgttcctatttctccacgtcctccccagcacctgttgtttcctgactttttaatgattgccattctaactggtgtgagatggtatctcattgtggttttgatttgcatttctctgatggccagtgatgatgagcattttttcatgtgttttttggctgcataaatgtcttcttttgagaagtgtctgttcatgtccttcgcccactttttgatggggttgtttttttcttgtaaatttgtttgagttcattgtagattctggatattagccctttgtcagatgagtaggttgcaaaaattttctcccattttgtaggttgcctgttcactctgatggtagtttcttttgctgtgcataagctctttagtttaattagatcccatttgtcaattttgtcttttgttgccattgcttttggtgttttagacatgaagtccttgcccatgcctatgtcctgaatggtaatgcctaggttttcttctagggtttttatggttttaggtctaacgtttaagtctttaatccatcttgaattgatttttgtataaggtgtaaggaagggatccagtttcacctttctacatatggctagccagttttcccagcaccatttattaaatagggaatcctttccccattgcttgtttttctcaggtttgtcaaagatcagatagttgtagatatgcggtgttatttctgagggctctgttctgttccattgatctatatctctgttttggtaccagtaccatgctgttttggttactgtagccttatagtatagtttgaagtcaggtagtgtgatgcctccagctttgttcttttggcttaggattgacgtggcgatgcgggctccttttttggttccatatgaactttaaagtagttttttccaattctgtgaagaaagtcattggtagcttgatggggatggcattgaatctgtaaattaccttgggcagtatggccattttcacgatattgattcttcctacccatgagcatggaatgttcttccatttgtttgtgtcctcttttatttccttgagcagtggtttgtagttctccttgaagaggtccttcacatcccttgtaagttggattcctaggtattttattctctttgaagcaattgtgaatgggagttcactcatgatttgtctctctgtttgtctgttgttggtgtataagaatgcttgtgatttttatacattgattttgtatcctgagactttgctgaagttgcttatcagcttaaggagattttgggctgagacaatggggttttctagatatacaatcatgtcgtctgcaaacagggacaatttgacttcctcttttcctaattgaataccctttatttccttctcctgcctaattgccctggccagaacttccaacactatgttgaataggagtggtgagagagggcatccctgtcttgtgccagttttcaaagggaatgcttccagtttttgcccattcagtatgatactggctgtgggtttgtcatagatagctcttattattttgaaatacgtcccatcaatacctaatttattgagagtttttagcatgaagggttgttgaattttgtcaaaggctttttctgcatctattgagataatcatgtggtttttgtctttggctctatttatatgctggattacatttattgatttgcgtatattgaaccagccttgcatcccagggatgaagcccacttgatcatggtggataagctttttgatgtgctgctggattcgttttgccagtattttattgaggatttttgcatcaatgttcatcaaggatattggtctaaaattctctttttttgttgtgtctctgcctggctttggtatcagaatgatgctggcctcataaaatgagttagggaggattctctctttttctattgattggaatagtttcagaaggaatggtaccagttcctccttgtacctctggtagaattcggctgtgaatccatctggtcctggactctttttgattggtaagctattgattattgccacaatttcagctcctgttattggtctattcagagattcaacttctacctggtttagtcttgggagagtgtatgtgtccaagaatttatccatttcttctagattttctagtttatttgcgtagaggtgtttgtagtattctctgatggtagtttgtatttctgtgggatcagtggtgatatcccctttatcattttttattgcatctatttgattcttctctctttttttctttattagtcttgctagcagtctatcaattttgttgaccctttcaaaaaaccagttcctggattcattaattttttgaagggttttttgtgtctctatttccttcagttctgctctgatcttagttatttcttgccttctgctagcttttgaatgtgtttgctcttgcttttctagttcttttaattgtgatgttagggtgtcaatttgggatctttcctgctttctcttgtgggcatttagtgctataaatttccctctacacactgctttgaatgcgtcccagagattctggtatgttgtgtctttgttctcgttggtttcaaagaacatctttatttctgccttcatttcgttatgtacccagtagtcattcaggagcaggttgttcagtttccatgtagttgagcggttttaagtgagattcttaatcctgagttctagtttgattgcactgtggtctgagagatagtttgttataatttccgttcttttacatttgctgaggagagctttacttcccagtatgtggtcaattttggaataggtgtggtgtggtgctgaaaaaaatgtatattctgttgatttggggtggagagttctgtagatgtctattaggtccgcctggtgcagagctgagttcaattcctgggtatccttgttgactttctgtctcgttgatctgtctaatgttgacagtggggtgttaaagtctcccattattaatgtgtgggagtctaagtctctttgtaggtcactcaggatttgctttatgaatcttggtgctcctgtattgggtgcatatatatttaggatagttagctcttcttgttgaattgatccctttaccattatgtaatggccttctttgtctcttttgatctttgttggtttaaagtctgttttatcagagactaggattgcaacccctgcctttttttgttttccattggctgggtagatcttcctccacccttttattttgagcctatgtgtgtctctgcacgtgagatgggtttcctgaatacagcacactgatgggtcttgactctttatccaatttgccagtctgtgtcttttaattggagcatttagtccatttacatttaaagttaatattgctatgtgtgaatttgatcctgtcatgatgatgttagctggttattttgctcgttagttgatgcagtttcttcctagtctcgatggtctttacattttggcatgattttgcagcagctggtaccggttgttcctttccatgtttagtgcttccttcaggagctcttgtaaggcaggcctggtggtgacaaaatctctcagcatttgcttgtctgtaaaggattttatttctccttcacttatgaagcttagtttggctggatatgaaattctgggttgaaaattctttcctttaagaatgttgaatattggcccccactctcttctggcttgtagggtttctgctgagagatctgctgttagtctgatgggcttccctttgagggtaacccgacctttctctctggctgcccttaacattttttccttcatttcaactttggtgaatctgacaattatgtgtcttggagttgctcttctcgaggagtatctttgtggcattctctgtattttctgaatctgaacgttggcctgccttgctagattggggaagttctcctggataatatcctacagagtgttttccaacttggttccattctccccatcacttttaggtacaccaatcagacgtagatttggtcttttcacatagtcccatatttcttggaggctttgctcatttctttttattcttttttctctaaacttcccttctcgcttcatttcattcatttcatcttccattgctgataccctttcttccggttgatcacatcagctcctgaggcttctgcattcttcacgtagttctcgagccttggttttcagctccatcagctcctttaagcacttctctgtattggttattcttgttatacattcttctaaatttttttcaaagttttcaacttctttgcctttggtttgaatgtcctcccatagctcagagtaatttgatcgtctgaagccttcttctctcagcttgtcaaagtcattctccatccagctttgttccgttgctggtgaggaactgcgttcctttggaggaggagaggtgctctgctttttagagtttccagtttttctgttctgttttttccccatctttgtggttttatctacttttggtctttgatgatggtgatgtacagatgggtttttggtgtggatgtcctttctgtttgttagttttccttctaacagagaggaccctcagctgcaggtctgttggagtaccctgccgtgtgaggtgtcagtgtgcccctgctggggggtgcctcccagttaggctgctcgggggtcaggggtcagggacccacttgaggaggcagtctgcccgttctcagttctccagctgcgtgctgggagaaccactgctctcttcaaagctgtcagacagggacatttaagtctgcagaggttactgctgtctttttgtttgtctgtgccctgcccccagaggtggagcctacagaggcaggcaggcctccttgagctgtggtgggctccacccagttcgagcttcctgtctgctttgtttacctaatcaagcctgggcaatggcgggcgcccctcccccagcctcactgccgctttgcagtttgatctcagactgctgtgctagcaatcagcgagactccgtgggcgtaggaccctccgagccaggtgcaggatataatctcgtggtgcgccgttttttaagcccgtcggaaaagcgcagtattcgggtgggagtgacccgattttccaggtgccgtccgtcacccctttctttgactcagaaagggaactccctgaccccttgcgcttcccaagtgaggcaatgcctcgccctgcttcggctcgcgcacagtggacgcacccactgacctgcacccactgtctggcactccctagtgagatgaacccggtacctcagatggaaatgcagaaatcacccgtcttctgcgtcgctcacgctgggagctgtagaccagagctgttcctattcggccatcttggctcctcctcga

SEQ ID NO: 10679 - DNA, 30515 bp, Homo sapiens
tttacatttttattttatttttttttaatttttttttattatactttaagttttagggtacatgtgcacattgtgcaggttagttacatatgtatacatgtgccatgctggtgcactgcacccactaactcgtcatctagcattaggtatatctcccaatgctatccctcccccctccccccaccccacaacagtccccagagtgtgatattccccttcctgtgtccatgtaatctcattgttcaattcccacctatgagtgagaatatgcggtgtttgctttttgttcttgcgatagtttactgagaatgatgatttccaatttcatccatgtccctacaaaggacatgaactcatcattttttatggctgcatagtattccatggtgtatatgtgccacattttcttaatccagtctatcattgttggacatttgggttggttccaagtctttgctattgtgaatagtgccgcaataaacatacgtgtgcatgtgtctttatagcagcatgatttatagtcctttgggtatatacccagtaatgggatggctgggtcaaatggtatttccagttctagatccctgaggaattgccacactgacttccacaatggttgaactagtttacagtcccaccaacagtgtaaaagtgttcctatttctccacatcctctccagcacctgttgtttcctgactttttaatgattgccattctaactggtgtgagatggtatctcattgtggttttgatttgcatttctctgatggccagtgatgatgagcattttttcatgtgttttttggctgcataaatgtcttcttttgagaagtgtctgttcatgtcctttgcccactttttgatggggttgtttgtttttttcttgtaaatttgtttgagttcattgtagattctggatattagccctttgtcagatgagtaggttgcaaaaattttctcccattttgtaggttgcctgttcattctgatggtagtttcttttgctgtgcagaagctctttagtttaattagatcccatttgtcaattttgtcttttgttgccattgcttttggtgttttagacatgaagtccttgcccatgcctatgtcctgaatggtaatgcctaggttttcttctagggtttttatggttttaggtctaacgtttaagtctttaatccatcttgaattgatttttgtataaggtgtaaggaagggatccagtttcagctttctacgtatggctagccagttttcccaccaccatttattaaatagggaatcctttccccattgcttgtttttgtcaggtttgtcaaagatcagatagctgtagatatgtggcgttatttctgagggctctggtctgttccattgatctatatctctgttttggtaccagtaccatgctgttttggttactgtagccttgtagtatagtttgaagtcaggtagtgtgatgcctccagctttgttcttttggcttaggattgacttggtgatgcgggctcttttttggttccatatgaactttaaagtagttttttccaattctgtgaagaaagtcattggtagcttgatggggatggcattgaatctgtaaattaccttgggcagtatggccattttcacgatattgattcttcctacccatgagcatggaatgttcttccatttgtttgtgtcctcttttatttccttgagcagtggtttgtagttctccttgaagaggtccttcacatcccttgtaagttggattcctaggtattttattctctttgaagcaattgtgaatgggagttcactcatgatttggctctctgtttgtctgttgttggtgtataagaatgcttgtgatttttgtacattgattttgtatcctgagactttgctgaagttgcctgtcagcttaaggagattttgggcttgagacaatggggttttctagatatacaatcatgtcgtctgcaaacagggacaatttgacttcctcttttcccaattgaataccctttatttccttctcctgcctaattgcccaggccagaacttccaacactatgttgaataggagtggtgagagagggcatccctgtcttgtgccagttttcaaagggaatgcttccagtttttgcccattcagtatgatattggctgtgggtttgtcatagatagctcttattattttgaaatacgtcccatcaatgcctaatttattgagagtttttagtatgaagggttgttgaattttgtcaaaggcttttttctgcatctattgagataatcatgtggtttttgtctttggctctgtttatatgctggattacatttattgatttgcgtatattgaaccagccttgcatcccagggatgaagcccagttgatcatggtggataagctttttgatgtgctgctggattcgttttgccagtattttactgaggatttttgcatcaatgttcatcaaggatattggtctaaaattctctttttttgttgtgtctctgcctggctttggtatcagaatgatgctggcctcataaaatgagttagggaggattccctctttttctgttgattggaatagtttcagaaggaatggtaccagttcctccttatacctctggtagaattcggctgtgaatccatctggtcctgtactctttttggttggtaagctattgattattgccacaatttcagctcctgttattggtctattcagagattcaacttcttcctggtttagtcttgggagagtttatgtgcagaggaatttatccatttcttctagattttctagtttatttgcatagaggtgtttgtagtattctctgatggtagtttgtatttctgtgggatcagtggtgatatcccctttatcattttttattgcgtctatttgattcttctctctttttttctttattagtcttgctagcggtctatcaattttgttgatcttttcaaaaaacaagctcctggattcattaatttattgaagggttttttgtgtctctgtttccttcagttctgctctgagtttagttatttcttgccttctgctagcttttgaatgtgtttgctcctgcttttctagttcttttaattgtgatgttaggttgtcaattttggatctttcctgctttctcttgtgggcatttagtgctataaatttccctctacacactgctttgaatgcgtcccagagattctggtatgttgtgtctttgttctcgttggtttcaaagaacatctttatttctgccttcatttcgttatgtacccagtagtcattcaggagcaggttgttcagtttccatgtagttgagtggttttgagtgagattcttaatcctgagttctagtttgattgcactgtggtctgagagatagtttgttataatttctgttcttttacatttgctgaggagagctttacttcccagtatgtggtcaattttggaataggtgtggtgtggtgctgaaaaaaatgtatattctgttgatatggggtggagagttctgtagatgtctattaggtctgtttggtgcagagctgagttcaattcctgggtatccttgttgactttctgtctcgttgatctgtctaatgttgacagtggggtgttaaagtctcccattattaatgtgtgggagtctaagtctctttgtaggtcactcaggacttgctttatgaatcttggtgctcctgtattgggtgcatatatatttaggatagttagctcttcttgttgaattgatccctttaccattatgtaatgtccttctttgtctcttttgatctttgttggtttaaagtctgttttatcagagactaggattgcaacccctgcctttttttgttttccattggcttggtagatcttcctccatccttttattttgagcctctatgtgtctctgcacgtgagatgggtttcctgaatacagcacactgatgggtcttgactctttattcaatttgccagtctgtgtcttttaattggagcatttagtccatttacatttaaagataatattgttatgtgtgaatttgatcctgtcattatgatgttagctggttattttgctcgttagttgatgcagtttcttcctagtctcaatggtctttacattttggcatgattttgaagtggctggtaccggttgttcctttccatgtttagtgcttccttcaggagctcttttagggcaggcctggtggtgacaaaatctctcagcatttgcttgtctgtaaagtattttatttctccttcacttatgaagcttagtttggctggatatgcaattctgggttgaaaattcttttctttaagaatgttgaatattggcccccactctcttctggcttgtagggtttctgccgagagatccgctgttagtctgatgggcttccctttgagggtaacccgacctttctctctggctgcccttaacattttttccttcatttcaactttggtgaatctgacaattatgtgtcttggagttgccttctcgaggagtatctttgtggtgttctctgtatttcctgaatctgaacattggcctgccttgctagattggggaagttctcctggataatatcctgcagagtgttttccaacttggttccattctccacatcactttcaggtacaccaatcagacgtagatttggtcttttcacatagtcccatatttcttggaggctttgctcatttctttttattcttttttctctaaacttcccttctcgcttcatttcattcatttcatcttccattgctgataccctttcttccagttgatcgcatcggctcctgaggcttctgcattcttcacgtagttctcgagccttggttttcagctccatcagctcctttaagcacttctctgtattggttattctagtaatacattctcctaaatttttttcaaagttttcaactgctttgcctttggtttgaatgtcctcccgtagctcagagtaatttgatcatctgaagtcttctctcagcttgtcaaagtcattctccatccagctttgttccgttgctggtgaggaactgcgttcctttggaggaggagaggtgctctactttttagagtttccagtttttctgttctgttttttccccatctttgtggttttatctacttttggtctttgatgatggtgatgtacagatgggtttttggtgtggatgtcctttctgtttgttagttttccttctaacagagaggaccctcagctgcaggtctgttggaataccctgccgtgtgaggtgtcagtgtgcccctgctggtgcctcccagttaggctgttctggggtcaggggtcagggacccacttgaggaggcagtctgcccgttctcagatttccagctgcgtgctgggagaaccacagctcttttcaaagctgtcagacagggacatttaagtatgcaaaagttactgctgtctttttgtttgtctgtgccctgcccccagaggtggagcctatagaggcaggcaggcctccttgagctgtggtgggctccacccagttcgagcttcccggctgctttgtttacctaagcaagcctgggcaatggcgggcacccctcccccagccttgctgccgccttgcagtttgatctcagactgctgtgctaacaatcagcgagactccgtgggcgtaggaccctccgagccaggtgcgggatataatcttgtggtgcgcagttttttaagcccgtccgaaaagcgcagtgttcgggtgggagtgacccgactttccaggtgccgtccatcacccctttctttgactcagaaagggaaccccctgaccccttgcgcttcccaagtgaggcagtgcctcgccctgcttcggctgaggcacggtgcgtgcgcccactgacctgcgcccactgtctggcactccctaatgagatgaacccggtacctcagatggaaatgcagaaatcacccgtcttctgcgtcgctcacgctgggagctgtagaccggagctgttcctattcggccatcttggctcctcccctcaggaaatgtcttaagtaacataaaatgtgctttgtgagtaaatgttaacagtaaagttactgggaatgtaaaatccctcttattttatgcagtgtatgcactgagatctacatgcctcagtctcagtgtagatctgtgtacttttcattagtgtttgtactttcattaatttcctgtatgttgattttcttttccttttcttttttcctagtttacttctacaatttcggatggaaggattatggtgtagcgtctcttactactatcctagatatggtgaaggtgatgacatttgccttacaggaaggaaaagtagctatccattgtcatgcagggcttggtcgaacaggtaggtcctaagaggtggtttattgcctgtaggcatatttaaacataaaaggaataagatttcctaatttgagggtaaatgtttctcagaatcctatcaaagctttggagtcaggtggaagaagggaataagttctagtgttctgtaccactgtagggtgtctatagttaaaatgatatatagtttcaaatagctagaaggaggatattgaatgttcccaacacaaatgcatgataaatgttgaagattatgcgtatactaaatacactgatctgatcactatacattatatgtattaaaacatcactatataccccatagatatgtataattattatgttaacattaaaaattaaatcaaaaaaaattttaagatatttgaaataccgtaaacaggtagttacaatgaccgtatatatatcattttaaagtctttagcaacaatgtgagttggagaaactgcaatttgagagaagtaatttgctacatttagtaagtgccagggccacactttaaatccatggttgtctgactccagagttcatgtgctttccatttttggaggtataaggattttgtttgtgaagaagagtctatctgtgcccagaattctattaaaaagtcagtgattttacttaaaacattcagctgaatttcattacagtgctgatattggggcaaaaatgaaggccgtagggctgaaattttcattgtcatctgatccaaccacatgcagctcagctctgtccgcagtgtacctgtgctcctgccaggggatctgccacatacctggaagcatgcgcaggggaggggactcagctctgcttgagattagtagctcttaggatcaagccaaaatctcactgtttctagacattgacatgatagctctgcagacattttacatttatactaagatcttctgtgtcctagtgagaaaggtatgttgttaccgactgtgaactggagagcatgcagttttcagaggttctgattttcatatgtaacaagatgttcacaaacttggggatcacacaggtgtatttgatttgccttttactttaatattaattgactgttatatttgaattaatttattaattattaccttttaactagtaataaccttactagttattccttttaattagatgttagtaagaatacctaatgtttataccactaagcctggcttccttaagattgcttaattttccataattgcttatggaaaaatagaattatatcatggtctgaaggaaaacacatattagtataggcacaatctggaaaaagaattgccaagaagaaaagtaggctgcaaatatgaataatccctaaagaagaaactgccgtggtagggagagtgccaagctgggatgtgccagcagttgatggcaaagatagcagggtgggaggttccaaacacaaagtgtatggattgattggatggaaattctcaagaactgttcagagtggaaaatagaaacaggatttgctttcttctgatggagttaagtagaacaaggaggatagatgggccagatgatcagtttcccttccctcctgcacacttactcacctaccttgtgcctgtgctggcacagctctgggctactgagatgactcagtcatggggaggcggtgccacatagacatttaataaagttctgtgcagtaaggaacgtgcaaaataacacctctacaaaaagtcacaaagttatcatcataattgtccttaaaatgtgtctctatttatatggtttcttaacacatattcaaattgtaaatcatcaaagagtgataaataaaataaataaaaatgtaagcttttctcataccagtcttctcttcttcactgtttaggtgttttaatagcctgttacttagtttttgcaacgagaatgactgctgaccaagcaattatatttgtgcgggcaaagcgacccaattccatacaaaccaagagacagctcctctgtgtaagggaatttactcagtttctaactcctctccgcaatatattctcttgctgtgatcccaaagcacatgctgtcaccttacctcaatatctaattcgccagcgtcatctgcttcatggttatgaggcacgacttctgaaacacgtgccaaaaattatccacctagtttgcaaattgctgctggacttagcggagaacaggccagtgatgatgaaggatgtgtccgaaggacctggtctctctgctgaaatagaaaagacaatgtctgagatggtcaccatgcagctggataaagagttactgaggcatgacagtgatgtgtccaacccgcctaaccccactgcagtggcagcagattttgacaatcgaggcatgattttctccaatgagcaacagtttgaccctctttggaaaaggcggaatgttgagtgccttcaacccctgactcatctgaaaaggcggctcagctacagtgactcagatttaaagagggccgagaacctcctggagcaaggggagactccacagacagtgcctgcccagatcttggttggccacaagcccaggcagcagaagctcataagccattgttacatcccacagtctccagaaccagacttacacaaggaagccttggttcgcagcacactttctttctggagtcagtcaaagtttggaggcctggaaggactcaaagataatgggtcaccaattttccatggaaggatcattccaaaggaagcacagcagagtggagctttctctgcagatgtttcaggctcacacagccctggggagccagtttcacccagctttgcaaatgtccataaggatccaaaccctgctcaccagcaagtgtctcactgtcagtgtaaaactcatggtgttgggagccctggctctgtcaggcagaacagcaggacaccccgaagccctctggactgtggctccagtcccaaagcacagttcttggttgaacatgaaacccaggacagtaaagatctgtctgaagcagcttcacactctgcattacagtctgaattgagtgctgaggcaagaagaatactggcggccaaagccctagcaaatttaaatgaatctgtagaaaaggaggaactaaaaaggaaggtagaaatgtggcaggtattattagtacttaatttaattatagatatgtgggaaatatttatgtcagggcaaaagtgtgatacattttcccaaacttatttattatagaaatgtgaagatacgtttgcataatactttctaacttcaggtttctcgtctctgatgcgaacctgatgttatagaaaaaacacagggtgtttgtatggtttcatttaaatctgcatactcaagaaagcacttggtgtgatgcttgacccacacaaggcattgatattagtagtttccttcttcctgggcctatgggggcaactggcccacagcagacagcattcgaaactgactagaagcatctttatgaggcctggcagagggaatcatactttgagaactactgacgtgcagacataaataaaatgtttatttttcaaagctcatcaacactggtgctgagcaaggtcagaagagtgaggctgtctctttggcatcctctccttcagacttgccaatcctgccctaatagggcaactatgggaaatcaggagagcaagtgggtgaaaccacagattactacgtgccattcactttagctgagttgaggtctttggggtccatttcttagcttttacttcaattagaatgtaaatgtttaactcttttttgtgttgtgcttttactaggatacagtcataagtcagccacactttctttgccctgaatgagcacctgttctcgagaaaagataggccttataaacctagctatgagaaacagctaaactaccccaaaaggaggctgacttggacagtcgtgaatcaccgagatcttgacttttgagcccataacctactgtgaattattttaatagctcgctttcatagtctgccattgattaaacaaggcatataaaatttctgagtgccagtatctcttcagttgcagaggcatgaaaattaagtttggagcttcacattaacttttaattatatgatgggaggagagaacttttgataaaaattttgttcttcagaattgtgtttcgcctatccaatagttaaatgtattgctttcttccaaaatgaattgttttctttattttctgctccaaactgaaaaagtctttcattcagtcagcaaatatttcctgggcattactgtgtgttaagagttagcaagaaagagagtcttctattttagatgaaaatctcgcacccccactcctgggtcagccccagtgcccatgcaagctctgctgtggtgatgaagcgttcaggacttggtttgggccagaccgtatgtagtgtatatgaaagcattttctggaggtgaacacagacctttaatcaggatagttttgcatttttttccattctagattttattttaggacttttagttatcaaaaaaatcagttgaattctggaaaagaataaaatgaacattatttgaatagtataatgccacccatgcctgtactagaccatttcacatatattatttcatgtgatttttcacagttatcatagaacatatctgtaaggcagatgatactatttctacagtctttgttaatcttgtgaattcagtatcacagatgaggatgctaaaggtcatgaaggttagagggtaagtgacttgctcagggtcacgtggcatgcgtgtggcagagtcagggtacagcacatgtgtttaacactttccattatcccaagattcttggctaacctccctggagagcctcaggaaacatcatgataagatagtcattttgctaagagcatttttgattagtgtcagttctgcccagcttgtctccttcataagattgaatcaagagctactttgttttatacatgatctatgggatatgaaggactgtgaataacaaagtattggtgtattcataagataataaagagaagcccagtaccagagggcccttgtggcataatagaaacagcacagactctggagtaaggcagaactgggtatgaacaccccctttgccattttctagcttttggctcctaggtgagttatttcatctttcttgagccccattatatgtattggtgaggaagctccctgctgggtgccatttgagagttagagataagacatgtattacagtctctgtcccactgtgtgcatgtagtaaatattgggtaggtgaatgaatgagtgaatggtagcaattattacacttaacttctattttgttaaaatgtatttgactcactaaaacataaatctgaaccctgtcagaaattcatgaaaatccttatctcacttttcccttgctctctgtgaggtaaagtattaaaatctcatgcttaaattttctctaggcatttggagtattagaaaaactttccagttatcttccctatgtcaaatttcaggactcggggcttattgttaaatcctacataggatgctaaaaagatatttcaaagaagtacatatgccccatttaccagctttcaagcacctttattttatttttgcagacttcgaagctcaaagcttttccttttccttagaccccaggttaatgtataaatgttcccttatttctactttctcatctaccatctactttattgcaaaaaaatagttctgttttgttcaccagaaggctgaaaaggaagactcttgtgaactgtttctgtggtttctgaataaagtagagaacttggattaactaagccctttccctgtgctataagctttaaccgaccttatctcagtcaatcagcccaacagcttgtgaagcaggggatgagtttcatagagagaaactggggcttacagaattcagtgtcttagtccagtgtccagcctggaagtggagaggctgggaggggtcccagttctgcactctggagcctgagtctttcactcttgtgggcagcgcaagaatcatgcagtgtcaaatggtgcacctccctctcctctccctgtctctgtctctgtctgtctgtctctttctcttcctttttagaaagagcttaattcccgagatggagcttgggaaagaatatgtggcgagagggaccctttcatcctatgcagcttgatgtggtcttgggtggagcaactgaaggagcctgtaatcaccaaagaggatgtggacatgttggttgacaggcgagcagatgccgcagaagcactttttttattagagaaggtaaagtggctgtaggaccagttaatgactgtaactgaggcccttagtttttcacgcagaaaaaaaaaatccattataaaaaaagagaattcacacagaatcccaaatctagatctaatttaatagtttttccaagagaagagaagaaactgatacccagtgtaaacacttagaaaatacaaaaataaaaacgagaactatccatagtcctgggagaggcactgcaaacattttcaaacattttaaacttaccaatatgtatattaacttgttaaaaatcattttaacatacaagtttatatttcatttttgcttaaagttataacatagctattttcctgtgaataatgtaagcttttcataaatattgactcttaacggatatgatgctgtaacacgagactgtgccataattaagcactgtttcactgttggttgtttgtttctacttatttgctgtgagcatgcatatgggaaaaattatgaattaggttgggatatgcactcattcgtatttttaaaaaggggtaggtgtcacacatatatacatgtatatataatttttatttgtaaaatatagatgttttctatattttatatataaaagatatatgtttaaaatagaggaaatatgtatatatgtataaaatatagaaggagaaataagaaactggtaatagtggtcacctttaggaaaagatattagaagacaatggatctaggaaacgggagaaattgtatgaatccttttatataatttatcatttttatccatacagagatactaaattttcagtttaaaacagggtttgtttttgtttttgtttttgtttgtttctttttttgagacatagttttgctcttgttgcccaggctggagtgcaatggcgcgatctcagctcactgcaacctctgccccccgggttcaagcgattctcctgcctcagcctcccgagtagctgggattacagcatgtgccaccacgcccggctaattttgtaattttagtggagacaggatttctccatgttggtcaggctggtctcaaactcccaacctcatgtgatccacccaccttggcctcccaaagtgctgggattacaggcatgagccaccatgccaggcctgtttttgttttaacaaacaatgttattgaataaccagccttgagttacctgctatgctccatgtaaacatctcctcagtttctaaatttcactaaaaatcttctgctgttactacacacacacacacacacacacacacacacggacacatggacggatgcacatgcagacatgcagatacatgtgttcacacacatgcacacagatacaatacacaatacacagacatgtgcgtgcctgcacacacacacatacactcacataccacagttatgcaatacatatcttttaagaagtgatttttcctgtatccgaagtccttttcttaggatattttctcagcaattaaatcacagagttaaaacaggagatggtgaaaaggcagattaatgtttggtaggtgactgggccaagcccttcaggacataatttacattttctcttctgtttatctcaataccccttagaggtagaggcccatttcacagacaaggaaagctgaggttgcatgcccaaggttggcaccacatgtcagagcagaattcaagctcagaccactttggcacaaagcccatgtgctttctattacataaggctgcctgttttatcctaattcaccctcgggcaattcacctagggcatttatattgcttcaggttttttactttcataggcgtcattgtaatgataatttgtgcttgcaggtgtttctttattatagattatgctcttagagtagattttcagagttgaaatttatgggtccctgtacattacatcttggatatgtattgctgaaggtgatggaatttcttctttgctaaggtaaacagcccccaggagtcaagtcagtggacacatttttaagtatcttacccccttaggttggaggctaagcacttaagcactgcattgctcctgggggactggggttgtccttgtccttttctttgtctacctgcctccctccatatcatatgcagtggctgggtacccagatcctgaccactcagtgcccagttaattagtccatgtatctctatgacatgtcaccatctactagactactgacatatccagaaacaacaagaatgggaaaatctattcagttcactgcaagagaaacacttggtttaaaagtgcactgatcttcaaatttagttttactttgtacaatagctagccagctttgatattatctcctgaaagcttttcaaattatattaacacataacaataaacatttgttgatgtttagatattttgttagatattttggcatttgacattatgagtacttggtcacaaaccaattcttgactctacgatagttttgaattgatttattgaggcattttttgaaaaattttttaaattttgatttctacaaaaacagggacagcaccagactattctctgcgtgttgcactgcatagtgaacctgcagacaattcccgtggatgtggaggaagctttccttgcccatgccattaaggcattcactaaggtgggtcatactcttcctttcccctctctgaaccacagatcagcatcatctttgtaaatcagaatccagaggtcaccgtcctcctctaaaataaaacatgtatgtgtatgttttcccttcatggaaatctgtttgacatttcttctaagtagttgcagagtcttgaccaaaaaaaaagtttccaaacaatgatcttaggaaaagctgaattgtgagttttttgaaggagaacgttggaacaaagagcttttatataaaagaaagagagaaacaactgagtgttgaatacatatttttagatcatgtgcctaatcagagtcagagaatctttgcttgtcgagtcagttctaccttgggtgtaagtaagaagccatctattgagaattaaacatcccacattgctaattcagtactgagtcctggttggcaaatcctaaggaaagagttaaaaaaaaggtttcctttctaaaagcccatccttttggatgcagcagtttttcctggctgaagaaagaagaagcagccaggttcatactgagagaaaagtttccccttaccccatcagctataatttgtttattacttctcattgatatgaaagtatctataatttgtttgttacctctcattgatatgaaagtgtcattaaacaaagaacccagcttttgaatgacaacatctgtggtaacattaatgataagaagttattatttatactcattaacaagttataaagattcttcctttttaatatttgtccagtctccttcccctccactctttccggagtgatgttcttacttcaggccttccttgttcctcatctggattctatggcactaaccactgacatcttttcaatctgttctccactgtttccagagtcagtagtctcaaatccaaaccgcgtggtcctttacatctgtatttacactttcatagactgagaggctacccaccatgtgaagaaggttgtggtttggtgtttaagaaagtaaacagagctgggagtggtggcttacgcctgtgatcccagcactttgggaggctgagatgggtggatcatgagatcaggagattgagaccatcctggccaacatggtgaaaccccatctctactaaagtacaaaaatttagctgggcatggtggtgtgcgcctgcagtcccagctactcaggaggctgaggtggaagaatggcttgaacccgggaggtggaggttgcagtgagccgaaatcgcgccactgcactccggcctggcaacagagcgagactctgtctcaaaaaaaaaaaaaaaaaagtggccaggcatggtggctcaagcctgtaatccaagcactttgggaggccaaggtgggcagatcacgaggtcaggagatcaagaccatcctggataacatggtgaaaccccatctctactaaaaagaaatacaaaaaaattaactgggtatggtggcaggcgcctgtagtcccagctactcgggaggctgaggcaggagaatggtgtgaacccgggaggcggagcttgcagtgagccaagattgcaccactgcactccagcctgggcgacagagcaagactccatctcaaaaaaaaaaaagtaaacaattcacaccattattaatgttaataaggagttttttgcaaaggggatagataatatagttatagataaaattaaattcctgagcttaactgaaaaaaatccttacgattggtctctctgaaagcagtaggaattctttacaacttcttttggccttttaaggggatacgaatgaaaagttagagataacagttgttcaaaatctgtctatagaaaatgttaggagacagttttccttgggtctctcatgtctcttcatagtctgatgagcagatgccctgaccactctctttgaggatcaactcttcactaatgtctggagagctctgcctggagagcagaaggcacacgttctgacttccaggataataaaaatgtttcccttcagggcaaaggttggcagatttgcttgcagcccccttgtgaaacattggagtttcctaagcttggggctcctcagctatgaggcaaaccccgtgcttgtgcagcctccacctaggcccttctgcattgcctccatgagacttgagagacaaggagaacccatgtgaacatgaagcacatgcagctgtgagaaataaaagttgtctgtctctgacccaggaatctcgtatcttctaccagtatccataacactggcaagctaacaggttaaggtctcagatcctttacagttgttgacagagggaacaacctttcatttgtcaaaatttatcagagagggagaaattccagaagcagagaagcagtgattgtgtgaccctgattctttcccagggagttacacattactctgggaatggggttgagggtgggtacttgctctggttctctgtcctgccatcactgctaacccagagtatggtaaacttgggtgaaaaatgcaaatatgtgtaaatagtgcgctcccatcaaggggaaaggaaatttactttatcaaggtggggtttgtttgtttgtttgtttgtttgtttgttttttgagacaaggtctcactctgtcacccagtctggagtgcagtggcacaatctcagctcactgcatcctctgcctcctgggctccggcaatcctcccacctcagcctcccaagtagctgggactacaggcatgtgccaccatgcctggctaaatttttaattttttgtagagatgaggttttgccatgttgcccaggctggtctcaacctcctgggctcaagcaactctcccacctcggcctcctaaagtgctgggattacaggcatgagccaccacacccagccagttgaggtttgtatatatgtgccaaacatgttagactcatagatacgctatcctatgaaggtgggtatcattatctctgttttacaaaggaggagatcaaggtccagagaggttgggtatgagatgaggacatgtagctggcaggtggggagctgggcttctattcaggtcactctgaccctgtccagagtggccgtagggcctctcagcaggacgtatacagctgatgtgctgttttaatatgggaaacttttctcttataccatcaatgattagtctcaaaaaattcacttcacacccactgttgacttgcttcatgactgggtgtatataattagactaaatatccaggcactagatttaattttggggttttcattcataagtttgatattgacatggttggcagttctaatagtctttcaaataaaatgtgtgaaatttattatgtgtattttatatagagttttgtttgtaagtctgttttttttctccaccccctccttctctcaaaatagaaactagttcaaattcttgttacagtgtcctgaatataaatttctttgtcaccaggttaattttgattctgaaaatggaccaacagtttacaacaccctgaagaaaatatttaagcacacgctggaagaaaaaagaaaaatgacaaaagatggccctaagcctggcctctagctttcactcgtggtgaatatttcagacctaaagatccagatagtatctctgttcatatgtgaataagttgaagattgtggggctactttttctcatagcactttattttgaatgttgttagtttgtgctgagaatggtcgtccgtatttgaaccaattatttattttaaaatatatttaagctacatttttgttttgaaaaattgccataaatttggtgccactttcttttatttatttgactgagttaatattattgtattaacattttaagtatatggtgtttacattcttatttcttttgacattttggaaataatcataacttgtctttccaaaataaccattttcttgatggaactcttcctagagtttttaccaaatagctaactttagtagtaaaacctcattgtgtatccattcccccacagatgaactaagaaagtcaccaagtgtcttaagctgttttatatttgttacgaagaaggctattgctacaatatttttaaaggtttcttttttaactttgaaattttttgtttttccttttctttttataaatgtaacagagggtttcaaagcatattatttttcagagagatttagttttactttaatggagtgactgtgaagtggttgggattttttgcttgtagaaagtagacttgctctttgtcagatttccaaacaaccttgccagccttggctgtcaaaaggaggcaggagcagttctcaacacaccaagccttattcccactcccttgggttgctgctgagccaaatagcatctttacagaggaagtgggatcagaggcaggaagtgtggaaagttgctaagaagcagggcttgcctctgtcctcccggggactccacagggatattcgtgcagggcaggggctctgtgccagccctgctctctcagatgccacagccactctgcagaggtgactcttggagctggaggaagtcaaaactgggccactgtttgtactgatggtgtattagcatgagcagcgtggccctggccccacactcccaaatctgccactccatagacccacttgcctcaaggctttatatttggctgctttcttacaatgagaattaagatttttaaactgaagttgaccatacaggttgcattagccctaactggcttcatgtaagaagggtgactgcctaaactagttccttgtaagctgaaccatcaattatcagttgaagccatacttttatttaaattaatatacgtagataccagaggccaagccacagagaggataatagttcttcccaataaaggtgatattaatcagactaatttcgaactaaagaagttactgcttaaagacggaatttcaggggaagcaagactcatttagaacaaatgaaatttctccagtcctacatttctgaattgacttctagcacatcaaaaatatttcagtcattatcagtctcattaactgaaatgccaaatgctaaatgcagtgttctttcacactgttttaattttcttgggaaattgagtccagtggatgttaatggagtgggttgcccatccctgaaatgtcttattttcaagtgcctggcctgggaaagaaggggaagaaacaattgcattatatccaaagatacactataaaaatagagtttttaccaaaaaaagatgtttgttctcatctcagtaggcctcatttgggcaagtgacccacaggtcttttggcgagtttgctatttgcctgttgaaatacttgtttcaacttagagaacagttatgatgtgaccatagcatggcacaactaaaaatctaagcctgaaacctgaaaaaagagatatgacaagggaaattaatcaggctatacataagtattgtatttatttgaataaaaataaaaagagcaacccataatcctagtcctgtacttctttaccttgatgctctaggacatctgatgataaagacaaggttttgtcttagattatcctaataggcagattgagttgtcggctgattcagtgagccaagctctagttagtgcagactccttccatcagttcagcatgaccaaacactggggggttgggataggtgagttctaagaggaatagctggggaaaatctccaagctgacaagattcctaacttcccatatttggatgaggagttctttgtagcccagaggacagaaatctcacatattgggagaagtgataaggttgaaaaattcagttcaacagaaataggaaggttaagggcacacacatattaagaacttaccatgggccagccgtatccattacctcactgaattatcttgacagaagtcttttttatttcatttatttatatatatttttttgagacgggggtctcgctccgtagcccaagctggaatgcagtggcatgatcttggctgactgcaacctccgctcccagcctgaagccatcctcccacctcagcttcctgagtagctgggactacaggcacatgcaatcacatctggctaattttttgtttttttgtttttttggtattttttgtagagatagggtttcaccatgttacccaggcttgtcttgaactcctgagctcaagtgatcctcccacctcggcctcccagagtgctgggattacaggtgtgagccaccgcacctggcctcagaagtcttaatcataactgtgtgacgtgagatgtggagtccaatggaccccgtgctgtgccctcctctctgctcatgttacctgcctataggactcttaacctggcaaagctgcccgtcaaagtgccttctcagggaccttgaggtccctttagcactaaattttatgatggcattaagagaacactgtgctgtccataacttagtgaaaatatcacacatctgtcctggaaaaggctgaaccagctctattattatcctatgatgttctctagtatatcacacttagaggaagtacatgatttcttgccactgttgccttttcttacttcagagagcttactaatgccctttgagacaaattgctgctggtggtagagctcgcttcatttatttatgtaactcagaaaatctgtgctgagttacttagtcatatcttcatccagcttgccagtcttatctgagaaaaagtacttgcttcatcgttctggattccatgaaaaccaccatatatcataattcaacagaggtaaagtgtctctattttctcttaaatggagaatgcttgctgatatgattgggtgctatttcaggctagtctccacatgtccgaaaaaatatccagggacagtgtaatgtagatagaatgcaagccccaagttcttgacatctgacagccccatgtaatttggggggtcaatttaaaaatgacagcttactcataggatctttattattattccaaattagcaagcattaatatattttcagtgcaggtaaatcaagaacaatgttctctttgatgctttttatgaatggcacaagattagcatgttacctaagagagcttttctcaatgctagatggctgcaaattgtttatagataaagtagcaggagaaaaattcaacaaaatcctgtttctcagtgggtcattatttttttagttatgcttttaggcatgagctaatctctgattacctcaacactgacaataaaactgatttataaataatcacaatggaaccattcagtattggagcttgacaagcctttgttcaaagcccttcagtcactaaaaataatgtcccaataagacttaaatgtcataaaaccttttgcaacgaaaataaaagtttcatacatccactgaaacttgtacagtaagagaagcctgctaagcccttacctctcggctttcttgattaaaatgaaaagatattttactcttgagattgcctattttagagaaaaattacattttgaggatgggctcctgcttacccgatctctagaaagtggtctgacagtagcctctggttttgatttaatgagttgctttatcatttttttttctccttttaaaaatgaaaacagactgggcacggtggctataatctcagcactttgggaggccaagccaggcagatcacaaggtcaggagtttaagaccagctgggccaatatggtgaaaccctgtctgtactaaaaatacaaaaatcagccaggcgtggtgggcacctgtattcccagctacttggaaggctgagacaggagaatcgcttgaacctgggaggcggaggttgcagtgagccgagagcacaccactgcactccagcctgggcaacaaagcgagactccatctccagaaaaaaaaaaaaagaaagaaagaaaagaaaagaaaacaaactactcaggctcttgatttaggctgaaccatagggagtggccattttttttttggtaaaaaaatgatcaagtactggccattttatgtggttcaacctaaaatcaaactcagtatttccaggacaagtaggtgacatttcctgaattaattttggtaagtttagattaggtgatcaattattttctaagactatcctgtatgcttacagtagagttccaatacaactgtaagtgacaaatatgaaacattcttttagcaacacgtctgtgcctattctgcttggccctctgctaattctggggacacacaggaattatttattcagtcattcatccctctaggagtcacgttgcctatccctcaaaattcatgtgttggaaacttaattcccaatgcaatagagtaggaaggtgcagccttttaggaggtgtttaggtcgtcagagctccaccctcatgaatgaactaatattattagtaaaagacctgatggagggaattctttttttgcccttccactttctgtcatgtgaggacacagcatgctcccctccagatgatgcagcatgtaaggcaccatcttggaagcagagagcagccctcaccagatggcagtgccttaatcttggcctatccagcctccagaactgtgagaatcaatgtctgttgtttaagttgcccagcctgtgctattctgttatagcagcacaaaatggactaagacagcgattggtaccaggggagtggggtgttgctaaaacatacctaaaaatgtggaagcggctttggaactgggtaatgggttgaggctagaagagttgtgaaatgaaagcaggaaaaagcttgtattgccacgagtggagcattaagagtgattctggtgagggctcagaagaagaggagagctgtaaggaaattatcactcattcttctgagaaactacgtaagtggttttgaacagaatgctgataaaaacttggacagtaaagaccattccgattaggtcatagacagaaatgaggactatcattggaaactggggaaaaggccatctttgttacaaagtggcaaagaacgtggctgaattatgtccatgtccatgttctaggactttgtaaggggcagaacttagcgatgaaccagaatatttggcagaagaaatttctaagcaggaaagtgtgcaggatgctgtgtggtttctcttttttttttttttttttgaattgtgttgtcttttttttttttttttttattatactctaagttttagggtacatgttcacattgtgcaggttagttacatatgtatacatgtgccatgctggtgcgctgcacccactaacgtgtcatctagcattaggtatatctcccaatgctatccctcacccctcccccgaccccaccacagtccccagagtgtgatattccccttcctgtgtccatgtgatctcattgtttaattcccacctatgagtgagaatatgcggtgtttggttttttgttcttgcgatagtttactgagaatgatggtttccaatttcatccatgtccctacaaaggacatgaactcatcattttttatggctgcatagtattccatggtgtatatgtgccacattttcttaatccagtctatcattgttggacatttgggttggttccaagtctttgctattgtgaatagtggccgcaataaacatacgtgtgcatgtgtctttatagcagcatgatttatagtcctttgggtatatacccagtaatgggatggctgggtcaaatggtatttctagttctagatgcctgaggaatcgccacactgacttccacaatggttgaactagtttacagtcccaccaacagtgtaaaagtgttcctatttctccacatcctctccagcacctgttgtttcctgactttttaatgattgccattctaactggtgtgagatgatatctcatagtggttttgatttgcatttctctgatggccagtgatgatgagcatttcttcatgtgttttttggctgcataaatgtcttcttttgagaagtgtctgttcatgtccttcgcccactttttgatggggttgtttgtttttttcttgtaaatttgtttgagttcattgtagattctggatattagccctttgtcagatgagtaggttgcgaaaattttctcccatgttgtaggttgcctgttcactctgatggtagtttcttttgctgtgcagaagctccttagtttaattagatcccatttgtcaattttggcttttgttgccattgcttttggtgttttggacatgaagtccttgcccacgcctatgtcctgaatggtaatgcctaggttttcttctagggtttttatggttttaggtctaacgtttaaatctttaatccatcttgaattgatttttgtataaggtgtaaggaagggatccagtttcagctttctacatatggctagccagttttcccagcaccatttattaaatagggaatcctttccccattgcttgtttttgtcaggtttgtcaaagatcagatagttgtagatatgcggcattatttctgagggctctggtctgttccattgatctatatctctgttttggtaccagtaccatgctgttttggttactgtagccttgtagtatagtttgaagtcaggtagtgtgatgcctccagctttgttcttttgtcttaggattgacttggcgatgcaggctcttttttggttccatatgaactttaaagtagttttttccaattctgtgaagaaagtcattggtagcttgatggggatggcattgaatctgtaaattaccttgggcagtatggccattttcacgatattgattcttcctacccatgagcatggaatgttcttccatttgtttgtgtcctcttttatttccttgagcagtggtttgtagttctccttgaagaggtccttcacatcccttgtaagttggattcctaggtattttattctctttgaagcaattgtgaatgggagttcactcatgatttggctctctgtttgtctgttgttggtgtataagaatgcttgtgatttttgtacattgattttgtatcctgagactttgctgaagttgcttatcagcttaaggagattttgggctgagacgatggggttttctagataaacaatcatgtcgtctgcaaacagggacaatttgacttcctcttttcctaattgaataccctttatttccttctcctgcctgattgccctggccagaacttccaacactatgttgaataggagcggtcagagagggcatccctgtcttgtgccagttttcaaagggaatgcttccagttattgcccattcagtatgatattggctgtgggtttgtcatagatagctcttattattttgaaatacgtcccatcaatgcctaatttattgagagtttttagcatgaagggttgttgaattttgtcaaaggctttttctgcatctattgagataatcatgtggtttttgtctttggctctgtttatatgctggattacatttattgatttgcgtatattgaaccagccttgcatcccagggatgaagcccacttgatcatggtggataagctttttgatgtgctgctggattcggtttgccagtattttattgaggatttttgcatcaatgttcatcaaggatattggtctaaaattctcttttttggttgtgtctctgcccggctttggtatcagaatgatgctggcctcataaaatgagttagggaggattccctctttttctattgattggaatagtttcagaaggaatggtaccagttcctccttgtacctctggtagaattcggctgtgaatccatctggtcccggactctttttggttggtaaactattgattattgccacaatttcagctcctgttattggtctattcagagattcaacttcttcctggtttagtcttgggagagtgtatgtgtcgaggaatgtatccatttcttctagattttctagtttatttgcgtagaggtgtttgtagtattctctgatggtagtttgtatttctgtgggatcggtggtgatatcccctttatcattttttattgtgtctatttgattcttctctctttttttctttattagtcttgctagcggtctatcaattttgttgatcctttcaaaaaaccagctcctggattcattgattttttgaagggtttttgtgtctctatttccttcagttctgctctgattttagttatttcttgccttctgctagcttttgaatgtgtttgctcttgcttttctagttcttttaattgtgatgttagggtgtcaattttggatctttcctgctttctcttgtaggcatttagtgctataaatttccctctacacactgctttgaatgcgtcccagagattctggtatgtggtgtctttgttctcgttggtttcaaagaacatctttatttctgccttcatttcgttatgtacccagtagtcattcaggagcaggttgttcagtttccatgtagttgagcggctttgagtgagattcttaatcctgagttctagtttgattgcactgtggtctgagagatagtttgttataatttctgttcttttacatttgctgaggagagctttacttccaactatgtggtcaattttggaataggtgtggtgtggtgctgaaaaaaatgtatattctgttgatttggggtggagagttctgtagatgtctattaggtctgcttggtgcagagctgagttcaattcctgggtatccttgttgactttctgtctcgttgatctgtctaatgttgacagtggggtgttaaagtctcccattattaatgtgtgggagtctaagtctctttgtaggtcactcaggacttgctttatgaatctgggtgttcctgtattgggtgcataaatatttaggatagttagctcctcttgttgaattgatccctttaccattatgtaatggccttctttgtctcttttgatctttgttggtttaaagtctgttttatcagagactaggattgcaacccctgcctttttttgttttccattggcttggtagatcttcctccatccttttattttgagcctatgtgtgtctctgcacgtgagatgggtttcctgaatacagcacactgatgggtcttgactctttatctaacttgccagtctgtgtcttttaattgcagaatttagtccatttatatttaaagttaatattgttatgtgtgaatttgatcctgtcattatgatgttagctggtgattttgctcattagttgatgcagtttcttcctagtctcgatggtctttacattttggcatgattttgcagcggctggtaccggttgttcctttccatgtttagcacttccttcaggagctcttttagggcaggcctggtggtgacaaaatctctcagcatttgcttgtctataaagtattttatttctccttcacttatgaagcttagtttggctggatatgaaattctgggttgaaaattcttttctttaagaatgttgaatattggcccccactctcttctggcttgtagggtttctgccgagagatccgctgttagtctgatgggctttcctttgagggtaacccgacctttctctctggctgcccttaacattttttccttcatttcaactttggtgaatctgacaattatgtgtcttggagttgctcttctcgaggagtatctttgtggcgttctctgtatttcctgaatctgaacgttggcctgccttgctagattggggaagttctcctggataatatcctgcagagtgttttccaacttggttccattctccacatcactttcaggtacaccaatcagacgtagatttggtcttttcacatagtcccatatttcttggaggctttgctcatttctttttattcttttttctctaaacttcccttctcgcttcatttcattcatttcatcttccattgctgataccctttcttccagttgatcgcatcggctcctgaggcttctgcattcttcacgtagttctcgagccttggttttcagctccatcagctcctttaagcacttctctgtattggttattctagttatacattcttctaaatttttttcaaagttttcaacttctttgcctttggtttgaatgtcctcccgtagctcagagtaatttgatcgtctgaagccttcttctctcagctcgtcaaaatcattctccatccagctttgttctgttgctggtgaggaactgcgttcctttggaggaggagaggcgctctgcgttttagagtttccagtttttctgttctgttttttccccatctttgtggttttatctacttttggtctttgatgatggtgatgtacagatgggttttcggtgtagatgtcctttctggttgttagttttccttctaacagacaggaccctcagctgcaggtctgttggaataccctgctgtgtgaggtgtcagtgtgcccctgctggggggtgcctcccagttaggctgctcgggggtcaggggtcagggacccacttgaggagtcagtctgcccgttctcagatctccagctgcgtgctgggagaaccactgctctcttcaaagctgtcagacagggacacttaagtctgcagaggttactgctgtctttttgtttgtctgtgccctgcccccagaggtggagcctacagaggcaggcaggcctccttgagctgtggtgggctccacccagttcgagcttcccggctgctttgtttacctaagcaagcctgggcaatggcgggcgcccctcccccagcctcgttgccgccttgcagtttgatctcagactgctgtgctagcaatcagcgcgattccgtgggcgtaggaccctctgagccaggtgtgggatatagtctcgtggtgcgccgtttcttaagccggtctgaaaagcgcaatattcgggtgggagtgacccgattttccaggtgcgtccgtcacccctttctttgactcggaaagggaactccctgaccccttgcgcttcccaggtgaggcaatgcctcgccctgcttcggctcgcgcacggtgcgcacacacactggcctgcgcacactgtctggcactccctagtgagatgaacccggtacctcagatggaaatgcagaaatcacccgtcttctgcgtcgctcacgctgggagctgtagaccggagctgttcctattcggccatcttggctcctcccctgt

SEQ ID NO: 10680 - DNA, 11838 bp, Homo sapiens
aagatgagttttctttttattttattttattttattttattttattatactttaagttttagggtacatgtgcacaatgtgcaggtttgttacatatgtatacatgtgccatgctggtgtgctgcacccactaactcatcatctagcattaggtatatctcccgatgctatccctcccccctccccccaccccacaacagtccccagagtgtgatgttccccttcctgtgtccatgtgttctcattgttcaattcccacctatgagtgagaacatgcggtgtttggtttgttgttcttgtgatagtttgctgagaatgatggtttccagctccatccatgtccctacaaaggacatgaactcatcattttttatggctgcatagtattccatggtgtatatgtgccacattttctttatccagtctatcgttgttggacatttgggttggttccaagtctttgctattgtgaatagtgccacagtaaacatacgtgtgcatgtgtctttatagcagcatgatttataatcctttgggtatatacccagtaatgggatggctgggtcaaatggtatttctagttctagatccctgaggaatcgccacactgacttccacaatggttgaactagtttacagtcccaccaacagtgtaaaagtgttcctatttcttcacatcctctccagcacctgttgtttcctgactttttaatgattgccattctaactggtgtgagatggtatctcattgtggttttgatttgcatttctctgatggccagtaatgatgagcattttctcatgtgttttttggctgcataaatgtcttcttttgagaacttaaaaatattttattcctaggagtctgatatagtttggatatttatccccaccaaaatctcatgttgaattgtaatctccagtgctggaggtagggcctggtggaagtgtttagctcatggaggtggataactgatggcttggtgctgtcttcagatagtgagtgagttcctgtgacagctagctgtttaaaagtgtgtggcacctcctccctgactctctctcacttgctcctgtttttgccatgtgaactgtttgctccccgctcaccttccaccatgattggaagctccctgaggcctccccagaagaagatgctgctatgctttctgtatagcctgcagaaccatgagacaattaaatctctcttttttttttttataaattacccagtctcaggtatttatttatagcaatgcaagaatggcctaatacagaatctaaaaactgagttaaggtatttcaaaatgatcatgtttctaggggaagagaaagtcatacaaatctgcaggagcagatatgatcttggttcgaacagaatggaaaataattaagaaaccactcaagactatcacatataaagactttacactgtaaaagtctaatccacctacccacagggctcttgaaaataggtagtgtcagtgtgccgatccagagctagcttggtgtacgcagtgtcacctctggagaagtctgaagtgaaataccacatcctcccataaatggtttctctgttagttgaaataaagaaagacctgttagctatttgaaatgttcattcttgtctttcaaaactccttccaataccttctttagttactcacaaataacagtagatttttttggttccagaatttaatccataaggtgaaaatgacagttgaacatgctagtcttgacaattctgtcacttattaacattctagaaagttggggagaaaactgtggaagtataatattgtattatgaaagcttggagaatcatcccactctgattatgtgcccagttttcatagccttcataaattcaaggttcttttctatgctcacctttctttcacagaaaaagatatagctgcttctggaagtgatttttttattttattttattaattattattatactttaagttttagggtacatgtgcacaatgtgcaggtttgttacatatgtatacatgtgccatgctggtgcgctgcacccactaactcatcatctagcattaggtatatctcccaatgctatccctccccccttccccccaccccacaacagtccccagagtgtgatgttccccttcctgtgtccatgtgttctcattgttcaattcccacctatgagtgagaatatgcggtgtttggttttttgtccttgcgatagtttactgagaatgaggatttccaatttcatccatgtccctacaaaggacatgaactcatcattttttatggctgcatagtattccatggtgtatatgtgccacattttcttaatccagtctatcattgttggacatttgggttggttccaagtctaactttatttactatttttatagctgttgtcttttattagtaccattttttcaataatggtggtcatttcctaatattttggataatccaatttgcaaggatgactgaagagttctcatattatttataagacacagaagtgattaatgtagatcctcactcatcttttggacatggaggaataaagaaaagagaaaaggatagtttgtgttagcaagtatttagtgagacttgctgtaccattgttgttgtgtctctccttgaagtatacatcatatattttgattttgtaattattttcctgttcggctcaaatctgactaaaggtcactttaattctttagctttcaaagttcatcttattttctgaacccttgaagttcaaataggaaatgctcttccttttgaactatcatccctaaaactgtctcaatttatcacttaccagcacagtttctttcacttgaaagttctcaaactgtgattcaaactgaatggctcacagatgctgttgattatgctctaccagcacagggaagaagacccagcatactatctactacaaaatgagctatatctggatcttattaagtaaaaggaaagtactaattataataaagtaggttgacatcacacttaatactatagaagatcaatctatataccacccaaaagtgcgtaatggtaatgaaaaaaacaatgtatttaggattaggaaacctgggctatttgaattcaagttctattgtttactagtagagcactcctgggcaagacacttggtatatttgagtgtcagtgcctcagcagtaaaacggggacaaaacacacactgatcagggttcctataataattaaaagaaaataatgggtgggaatgtgctggctgaatgctatatagccttttaaggcagtgttattaacaatcagtctctgaatcaagccacaggaatcacagaaggtcaaattgaacagatgggaaaatagaggacagtgggggtcgagggggtgtgtgtgtgtgtgtgtgtgtgtaatggacatgcctatggtcacacaactacttgatggtagaactcagactactatccagttctccttacagtcagtgtttttttccagtgtacaataatacctgtcacttgggatcactgggctagaaacatattaccaatgactctgcagtcatcattatattttacacataagtgtatttagagattagaaatccagacctcaaataaagtactgcaagtgagagtcccttattcatgctacaaaatattctggattgaaaacgagggtgaccatacctgttacatttatttattggtgttcatgctctggaaattaattataatactgtggattttaggaaacaaatgaattacctgattaagctgatcctttctgccaacttctctgtgtgctcttgagtgggagggacattttctacgaatgcaattccatagagcagaaagttttgcagaaacttcttcagtccctcgttggtttctaagaagctctggcaatctaccgatggaacttgggcttgctggtagatttcagcattccatagtattctaggctggatgactttttgtttctgcccttcatagctgtttttcaccagccaattcaaatcatatttagtcacatgaccatctggcccttttaaggggaaaaataaaaggcactataataattacaaataatgtcaatatttgtaattggttacaactagttaagaatctttttcctagcaatcagttatccagtactgtattgtttatgaaaccaaattaaaatgaatgcctagaatgtttctgagaaagaaatatgtgtggtttgagtggtatgcatgaataaatgaatgaacaaataaatcttcccagaggctaaataagtttacagaattatagttatatagtaaaagatcttctggaaaattcatcaagtcatcaaagaatgataatccaagtaggcttttacaagcctacttggcactctctccccttgcccccatccctgtcttccatctatataggaactcagaatgtttgagctagaaggggctaatctttattttacagatggagaaaaagtcagtgactcactcaagatcacacaactaagtactataggtggaactagaaccccaccttcttgctgctacaagttcagtactattcaatgctgccttcctcttctacatgatgtaggacattgctgtctaattatatgacatcaacacaatacaataaaattactttgtaagtggcttcacctgctgtgcacaccccacccaaaaaaagttgaaaaccaaccctgaaatgctttagaaaatcttcaggataagcaaaggaagcagcagaaggagtgaaagactatgttgacaacttgtctctcctttttacttctctctcttttcctccctccccttggtaaaaaagtatcacactttggataatttggaaagcataaaaaagtatgaggaaattaaaagtcaccatgtttatcattctatcacccagatgaaactatgattgacagcctggcatcattccttccagtttttctgtacattctcttattttatgtaatttatgtatataaatatagtttatgtaatttatatatataaaatttgggactctgccattgtcacttaacattttaacaatttttaaaattaaattttatcattttaaaaattcaaccttcattaaaattaatttttaaagcttacaaaatatacattaccaagatttacctaacccatctgttattctgggtatgtacatttatttttaaaaaatttcctattatttattagtgatcatctttaaccatatttctataatttagaaatagaatgtatattacatttcttaaaagttcgtatctttgtatttagaaatttcaaagatataaacttttaagagttctgatatacataatcaaattactttttagaaagtctacttatcttcattccctccaacagtacatatgtgtccatcaaaatggagtattcttatttttaaaatatatttttttctaatttggtaactaaagtggaactgctatcttgtaataattttaacttatttgcttactaaggctaataagaatactttctatatttgttagacatctatgtttctttaatgcagggactaccaaactatggttgatgagtcaaatctggtgcttggttttgtaatgcctgtttcagaacacatgctgtccatgttgttacatattgtctatagctccattcactcatatagcccacaaagtttgaaaatatttaccatctggctctttatagaaaatgtttgctgactcctgctttaatgatttgtctgttcagtcctttctcacatttttctattggaacaattgtacttttcttcttttttttttttttttattatactctaagttttagggtacatgtgcacattgtgcaggttagttacctatgtatacatgtgccatgctggtgcgctgcacccactaatgtgtcatctagcattaggtatatctcccaatgctatccctcccccctcccccgaccccaccacagtccccagagtgtgatattccccttcctgtgtccatgtgatctcattgttcaattcccacctatgagtgagaatatgcggtgtttggttttttgttcttgcgatagtttactgagaatgatggtttccaatttcatccatgtccctacaaaggatatgaactcatcattttttatggctgcatagtattccatggtgtatatgtgccacattttcttaatccagtctatcattgttggacatttgggttggttccaagtctttgctattgtgaatagtgccgcaataaacatacgtgtgcatgtgtctttatagcagcatgatttatagccctttgggtatatacccagtaatgggatggctgggtcaaatggtatttctagttctagatccctgaggaatcgccacactgacttccacaatggttgaactagtttacagtcccaccaacagtgtaaaagtgttcctatttctccacatcctctccagcacctgttgtttcctgactttttaatgattgccattctaactggtgtgagatgatatctcatagtggttttgatttgcatttctctgatggccagtgatgatgagcatttcttcatgtgttttttggctgcataaatgtcttcttttgagaagtgtctgttcatgtcctttgcccactttttgatggggttgtttgtttttttcttgtaaatttgttggagttcattgtagattctggatattagccctttgtcagatgagtaggttgcgaaaattttctcccatgttgtaggttgcctgttcactctgatggtagtttcttttgctgtgcagaagctctttagttgaattagatcccatttgtcaattttggctttggttgccattgcttttggtgttttggacatgaagtccttgcccatgcctatgtcctgaatggtaatgcctaggttttcttctagggtttttatggttttaggtctaacatttaaatctttaatccatcttgaattgatttttgtataaggtgtaaggaagggatccagtttcagctttctacatatggctagccagttttcccagcaccatttattaaatagggaatcctttccccattgcttgtttttctcaggtttgtcaaagatcagatagttgtagatatgcggcattatttctgagggctctgttctgttccattgatctatatctctgttttggtaccagtaccatgctgttttggttactgtagccttgtagtatagtttgaagtcaggtagtgtgatgcctccagctttgttcttttggcttaggattgacttggcaatgcgggctcttttttggttccatatgaactttaaagtagttttttccaattctgtgaagaaagtcattggtagcttgatggggatggcattgaatctgtaaattaccttgggcagtatggccattttcacgatattgattcttcctacccatgagcatggaatgttcttccatttgtttgtgtcctcttttatttccttgagcggtggtttgtagttctccttgaagaggtccttcacatcccttgtaagttggattcctaggtattttattctctttgaagcaattgtgaatgggagttcacccatgatttggctctctgtttgtctgttgttggtgtataagaatgcttgtgatttttgtacattgattttgtatcctgagactttgctgaagttgcttatcagcttaaggagattttgggctgagacgatggggttttctagataaacaatcatgtcgtctgcaaacagggacaatttgacttcctcttttcctaattgaataccctttatttccttctcctgcctgattgccctggccagaacttccaacactatgttgaataggagcggtgagagagggcatccctgtcttgtgccagttttcaaagggaatgcttccagtttttgcccattcagtatgatattggctgtgggtttgtcatagatagctcttattattttgaaatacgtcccatcaatacctaatttattgagagtttttagcatgaagggttgttgaattttgtcaaaggctttttctgcatctattgagataatcatgtggtttttgtctttggctctgtttatatgctggattacatttattgatttgtgtatattgaaccagccttgcatcccagggatgaagcccacttgctcatggtggaaaagctttttgatgtgctgctggattcggtttgccagtattttattgaggatttttgcatcaatgttcatcaaggatattggtctaaaattctcttttttggttgtgtctctgcccggctttggtatcaggatgatgctggcttcataaaatgagttagggaggactccctctttttctattgattggaatagtttcagaaggaatggtaccagttcctccttgtacctctggtagaattctgctgtgaatccatctggtcctggactcttttcggttggtaagctattgattattgccacaatttcagagcctgttattggtctattcagagattcaacttcttcctggtttagtcttgggagagtgtatgtgtcgaggaatgtatccatttcttctagattttctagtttatttgcgtagaggtgtttgtagtattctctgatggtagtttgtatttctgtgggattggtggtgatatcccctttatcattttttattgtgtctatttgattcttctctctttttttctttattagtcttgctagcggtctatcaattttgttgatcttttcaaaaaaccagctcctggattcattgattttttgaagggttttttgtgtctctatttccttgagttctgctctgattttagttatttcttgccttctgctagcttttgaatgtgtttgctcttgcttttctagttcttttaattgtgatgttagggtgtcaattttggatctttcctgctttctcttgtaggcatttagtgctataaatttccctctacacactgctttgaatgcgtcccagagattctggtatgtgatgtctttgttctcgttggtttcaaagaacatctttatttctgccttcatttcgttatgtacccagtagtcattcaggagcaggttgttcagtttccatgtagttgagcggctttgagtgagattcttaatcctgcgttctagtttgattgcactgtggtctgagagatagtttgttataatttctgttcttttacatttgctgaggagagctttacttccaactatgtggtcaattttggaataggtgtggtgtggtgctgaaaaaaatgtatattctgttgatttggggtggagagttctgtagatgtctattaggtctgcttggtgcagagctgagttcaattcctgggtatccttgttgactttctgtctcgttgatctgtctaatgttgacagtggggtgttaaagtctcccattattaatgtgtgggagtctaagtctctttgtaggtcactgaggacttgctttatgaatctgggtgctcctgtattgggtgcataaatatgtagaatagttagctcctcttgttgaattgatccctttaccattatgtaatggccttctttgtctcttttgatctttgttggtttaaagtctgttttatcagagactaggattgcaacccctgcctttttttgttttccattggcttggtagatcttcctccatccttttattttgagcctatgtgtgtctctgcacgtgagatgggtttcctgaatacagcacactgatgggtcttgactctttatccaacttgccagtctgtgtcttttaattgcagaatttagtccatttatatttaaagttaatattgttatgtgtgaatttgatcctgtcattatgatgttagctggtgattttgctcattagttgatgcagtttcttcctagtctcgatggtctttacattttggcatgattttgcagcggctggtaccggttgttcctttccatgttgagcacttccttcaggagctcttttagggcaggcctggtggtgacaaaatctctcagcatttgcttgtctataaagtattttatttctccttcacttatgaagcttagtttggctggatatgaaattctgggttgaaaattcttttctttaagaatgttgaatattggcccccactctcttctggcttgtagggtttctgccgacagatccgctgttagtctgatgggctttcctttgagggtaacccgacctttctctctggctgcccttaacattttttccttcatttcaactttggtgaatctgacaattatgtgtcttggagttgctcttctcgaggagtatctttgtggcgttctctgtatttcctgaatctgaacgttggcctgccttgctagattggggaagttctcctggataatatcctgcagagtgttttccaacttggttccattctccacatcactttcaggtacaccaatcagacgtagatttggtcttttcacatagtcccatatttcttggaggctttgctcatttctttttattcttttttctctaaacttcccttctcgcttcatttcattcatttcatcttccattgctgataccctttcttccagttgatcgcatcggctcctgaggcttctgcattcttcacgtagttctcgagccttggttttcagctccatcagctcctttaagcacttctctgtattggttattctagttatacattcttctaaatttttttcaaagttttcaacttctttgcctttggtttgaatgtcctcccgtagctcagagtaatttgatcgtctgaagccttcttctctcagctcgtcaaaatcattctccatccagctttgttctgttgctggtgaggaactgcgttcctttggaggaggagaggcgctctgcgttttagagtttccagtttttctgttctgttttttccccatctttgtggttttatctacttttggtctttgatgatggtgatgtacagatgggttttcggtgtagatgtcctttctggttgttagttttccttctaacagacaggaccctcagctgcaggtctgttggaataccctgccgtgtgaggtgtcagtgtgcccctgctggggggtgcctcccagttaggctgctcgggggtcaggggtcagggacccacttgaggaggcagtctgcccgttctcagatctccagctgcgtgctgggagaaccactgctctcttcaaagctgtcagacagggacacttaagtctgcagaggttactgctgtctttttgtttgtctgtgccctgcccccagaggtggagcctacagaggcaggcaggcctccttgagctgtggtgggctccacccagttcgagcttcccggctgctttgtttacctaagcaagcctgggcaatggcgggcgcccctcccccagcctggttgccgccttgcagtttgatctcagactgctgtgctagcaatcagcgagattccgtgggcgtaggaccctctgagccaggtgtgggatatagtctcgtggtgcgccgtttcttaagccggtctgaaaagcgcaatattcgggtgggagtgacccgattttccaggtgcgtccgtcacccctttctttgactcggaaagggaactccctgaccccttgcgcttcccaggtgaggcaatgcctcgccctgcttcggctcgcgcacggtgcgcacacacactggcctgcgcccactgtctggcactccctagtgagatgaacccggtacctcagatggaaatgcagaaatcacccgtcttctgcgtcgctcacgctgggagctgtacaccggagctgttcctattcggccatcttggctcctccccccaacaatt

SEQ ID NO: 10681 - DNA, 6102 bp, Homo sapiens
  SITE (6086): n equals a,t,g, or c
cttttcttttttttttaattatactttaagttttaaggtacatgtgcacaacgtgcaggtttgttacatatgtatacatgtgccatgttggtgtgctgcacccattaactcgtcatttaacattaggcatatctcctaatgctattccctcccccgtccccctattccacaacaggccctggtgtgtgatgttccccttcctgtgtccatgtgttctcattgtttaattcccacctatgagtgagaacatgcggtgttttgttttttgtcctggcgatagtttgctgagactggtttccagcttcatccatgtccctacaaaggacatgaactcatcattttttacggctgcacagtattccatggtgtatatgtgccacattttctttttttttttttttaattatactttaagttttagggtacatgtgcacattgcgcaggttagttacatatgtatacatgtgccatgctggtgtgctgcacccactaactcgtcatctagcattaggtatatctcccaatgctacccctcccccctccccccaccccaccacagtccacagagtgtgatattccccttcctgtgaccatgtgatctcattgttcaattcccacctatgagtgagaatatgcggtgtttggttttttgttcttgcgatagtttactgaaaatgatggtttccaatttcatccatgtccctagaaaggacatgaactcatccttttttatggctgcatagtattccatggtgtatatgtgccacattttcttcatccagtctatcattgttggacatttgggtcggttccaagtctttgctattgtgaataatgccacaataaacatacgtgtgcatgtgtctttatagcagcatgatttatagtcctttgggtatatacccagtaatgggatggctgggtcaaatggtatttctagttctagatccctgaggaatcgccacactgacttccacaatggttgtactagtttacagtcccaccaacagtgtaaaagtgttcctatttctccacatcctctccagcacctgctgtttcctgactttttaatgattgccattctaactggtgtgagatggtatctcatagtgttttgatttgcatttctctgatggccagtgatgatgagcattttttcatgtattttttggctgcataaatgtcttcttttgagaagtgtctgttcatgtcctttgcccactttttgatggggttgtttgtttttttcttgtaaatttgtttgagttcattgtagattctggatattagccctttgtcagatgagtaggttgcgaaaattttctcccaggttgtaggttgcctgttcactctgatggtagtctcttttgctgtgcagaagctcttgagtttaattagatcccatttgtcaattttggcttttgttgccattgcttttggtgttttggacatgaagtccttgcccacgcctatgtcctgaatggtaatgcctaggttttcttctagggtttttatggttttaggtctaacgtttaaatctttaatccatcttgaattgatttttgtataaggtgtaaggaagggatccagtttcagctttctacatatggctagccagttttcccagcaccatttattaaatagggaatcctttccccattgcttgtttttctcaggtttgtcaaagatcagatagttgtaggtatgcggcgttatttctgagggctctgttctgttccattgatctatatctctgttttggtaccagtaccatgctgttttggttactgtaggcttgtagtatagtttgaagtcaggtagtgtgatgcctccagctttgttcttttggcttaggattgacttggcgatgtgggctcttttttggttccatatgaactttaaagtagttttttccaattctgtgaagaaagtcattggtagcttgatggggatggcattgaatctgtaaattaccttgggcagtatggccattttcacgatattgattcttcctacccatgagcatggaatgttcttccatttgtttgtatcctcttttatttccttgagcagtggtttgtagttctccttgaagaggtccttcacatcccttgtaagttggattcctaggtattttattctctttgaagcaattgtgaatgggagttcactcatgatttggctctctgtttgtctgttgttggtgtataagaatgcttgtgatttttgtacattgattttgtatcctgagactttgctgaagttgcttatcagcttaaggagattttgggctgagacgatggggttttctagataaacaatcatgtcgtctgcaaacagggacaatttgacttcctcttttcctaattgaataccctttatttccttctcctgcctgattgccctggccagaacttccaacactatgttgaataggagcggtgagagagggcatccctgtcttgtgccagttttcaaagggaatgcttccagtttttgcccattcagtatgatattggctgtgggtttctcatagatagctcttattattttgaaatacgtcccatcaatacctaatttattgagagtttttagcatgaagggttgttgaattttgtcaaaggctttttctgcatctattgagataatcatgtggtttttgtctttggctctgtttatatgctggattacatttattgatttgcgtatattgaaccagccttgcatcccagggatgaagcccacttgatcatggtggataagctttttgatgtgctgctggattcggtttgccagtattttattgaggatttttgcatcaatgttcatcaaggatattggtctaaaattctcttttttggttgtgtctctgcccagctttggtatcagaatgatgctggcctcataaaatgagttagggaggattccctctttttctattgattggaatagtttcagaaggaatggtaccagttcctccttgtacctctggtagaattcggctgtgaatccatctggtcctggactctttttggttggtaaactatagattattgccacaatttcagctcctgttattggtctattcagagattcaacttcttcctggtttagtcttgggagagtgtatgtgtcaaggaatgtatccatttcttctagattttctagtttatttgcgtagaggtgtttgtagtattctctgatggtagtttgtatttctgtgggatcggtggtgatatcccctttatcattttttattgtgtctatttgattctcctctctttttttctttattagtcttgctagcagtctatcaattttgttgatcctttcaaaaaaccagctcctggattcattgattttttgaagggttttttgtgtctctatttccttcagttctgctctgattttagttatttcttgccttctgctagcttttgaatgtgtttgctcttgcttttctagttcttttaattgtgatgttagggtgtcaattttggatctttcctgctttctcttgtgggcatttagtgctataaatttccctctacacactgctttgaatgcgtcccagagattctggtatgttgtgtgtttgttctcgttggtttcaaagaacatctttatttctgccttcatttcattatgtacccagtagtcattcaggagcaggttgttcagtttccatgtagttgagcggttttgagtgagattcttaatcctgagttctagtttgattgcactgtggtctgagagatagtttgctataatttctgttcttttacatttgctgaggagagctttacttccaactatgtggtcaattttggaataggtgtggtgtggtgctgaaaaaaacgtatattctgttgatttggggtggagagttctgtagatgtctattaggtccacttggtgcagagatgagttcaattcctgggtatccttgttgactttctgtctcgttgatctgtctaatgttgacagtggggtgttaaagtctcccattattaatgtgtgggagtctaagtctctttgtaggtcactcaggacttgctttatgaatctgggtgctcctgtattgggtgcatatatatttaggatagttagctcctcttgttgaattgatccctttaccattatgtaatggccttctttgtctcttttgatctttgttggtttaaagtctgttttatcagagactaggattgcaacccctgcctttttttgttttccattggcttggtagatcttcctccatccttttattttcagcctatgtgtgtctctgcacatgagatgggtttcctgaatacagcacactgatgggtcttgactctttatccaacttgccagtctgtgtcttttaattggagcatttagtccatttacatttaaagttaatattgttatgtgtgaatttgatcctgtcattatgatgttagctggtgattttgctcattagttgatgcagtttcttcctagtctcgatggtctttacattttggcatgattttgcagtggctggtaccggttgttcctttccatgtttagcgcttccttcaggagctcttttagggcaggcctggtggtgacaaaatctctcagcatttgcttgtctgtaaagtattttatttctccttcacttatgaagcttactttggctggatatgaaattctgggttgaaaattcttttctttaagaatgttgaatattggcccccactctcttctggcttgtagggtttctaccgagagatccgctgttagtctgatgggcttccctttgagggtaacccgacctttctctctggctgcccttaacattttttccttcatttcaactttggtgaatctgacaattatgtgtcttggagttgctcttctcgaggagtatctttgtggcgttctctgtatttcctgaatctgaatgttggcctgccttgctagattggggaagttctcctggataatatcctgcagagtgttttccaacttggttccattctccccctcactttcaggtacaccaatcagacgtagatttggtcttttcacatagtcccatatttcttggaggctttgctcatttctttttattcttttttctctaaacttcccttctcgcttcatttcattcatttcatcttccattgctgataccctttcttccagttgatcgcatcggctcctgaggcttctgcattcttcacgtagttctcgagccttggttttcagctccatcagctcctttaagcacttctctgtattggttattctagttatacattcttctaaatttttttcaaagttttcaacttctttgcctttggtttgaatgtcctcccgtagctcagagtaatttgatcgtctgaaaccttcttctctcagctcgtcaaagtcattctccatccagctttgttccgttgctggtgaggaactgcgttcctttggaggaggagaggcgctctgcgttttagagtttccagtttttctgttctgttttttccccatctttgtggttttatctacttttggtctttgatgatggtgatgtacagatgggtttttggtgtggatgtcctttctgtttgttagttttccttctaacagacaggaccctcagctgcaggtctgttggaataccctgccgtgtgaggtgtcagtgtgcccctgctggggggtgcctcccagttaggctgctcgggggtcaggggtcagggacccacttgaggaggtagtctgcccgttctcagatctccagctgcgtgctgggagaaccactgctctcttcaaagctgtcagacagggacatttaagtctgcagaggttcctgctgtctttttgtttgtctgtgccctgcccccagaggtggagcctacagaggcaggcaggcctccttgagctgtggtgggctccacccagttcgagcttcctggctgctttgtttacctaagcaagcctgggcaatggcgggctcccctcccccagcctcgctgccgccttgcagtttgatctcagactgctgtgctagcaatcagcgagattccgtgggcgtagcaccctccaagccaggtgtgggatantagtctcgtggtgcgc

SEQ ID NO: 10682 - DNA, 8041 bp, Homo sapiens
ttttttatttttattttttattttattttattattattatactttaagttttagggtacatgtgcacaatgtgcaggttagtttcatatgtatacatgtgccatgctggtgtgctgcacccattaactcgtcatttagcattaggtatatctcctaaagctatccctccccctggccccaccctgcaacagtccccagagtgtgatgttccccttcctgtgtccatgtgttctcattgttcagttcccacctatgagtgagaatatgcggtgtttggtttttgttcttgcgatagtttactgagaatgatgatttccagtttcatccatgtccctacaaaggacgtgaactcatcattttttatggctgcatagtattccatggtgtatatgtgccacattttcttaatccagtctatcattgttggacatttgggttggttccaagtctttgctattgtgaatagtgccacaataaacatacctgtgcatgtgtctttatagcagcatgatttatagtcctttgggtatatacccagtaatgggatggctgggtcaaatggtatttctatttctagatccctgaggaatcaccacactgacttccacaagggttgaactagtttacagtcccaccaacactgtaaaagtgttcctgtttctccacatcctctccagcacctgttgtttcctgactttttaatgattgccattctaactggtgtgagatggtatctcattgtggttttgatttgcatttctctgatggccagtgatggtgagcattttttcgtgtcttttttggctgcataaatgtcttcttttgagaagtgtctgttcatatccttcgcccactttttgatgcggttgtttgtttttttcttgtaaatttgtttgagttcattgtagattctggatattagccctttgtcagatgagtaggttgcgaaaattttctcccattttgtaggttgcctgttcactctgatggtagtttcttttactgtgcagaagctctttagtttaattagatcccatttgtcaattttggcttttgttgccattgcttttggtgttttagacatgaagtccttgcccatgcctatgtcctgaatggtaatgcctaggttttcttctagggtttttatggttttaggtcgaacgtttaagtctttaatccatcttgaattaatttttctataaggtgtaaggaagggatccagtttcagctttctacctatggcaagccagttttcccagcaccatttattaactagggaatcctttccccattgcttgtttctctcaggtttgtcaaagatcagatagttgtagatatgcggtgttatttctgagggctctgttctgttccattgatctatatatctgttttggtaccagtaccatgctgttttggttactgtagccttgtagtatagtttgaaatcaggtagcatgatgcctccagctttgttcttttggcttaggattgacttggtggtgtgggctcttttttggttccatatgaactttaaagtagttttttccaattctgtgtagaaagtcattggtagcttgatggggatggcattgaatctataaattaccttgggcagtatggccattttcacaatattgattcttcctacccatgagcatggaatgttcttccatttctttgtatcctcttttatttcattgagcagtggtttgtagttctccttgaagaggtccttcacatcccttgtaagttggattcctaggtattttattctctttgaagcaattgtgaatgggagttcactcatgatttggctctctgtttgtctgttattggtgtataagaatgcttgtgatttttgtacattgattttgtatcctgagactttgctgaagttgcttatcagcttaaggagattttgggctgagacattggggctttctagatatacaatcatgtcgtctgcaaacagggacaatttgacttcctcttttcctaattgaataccctttatttccttctcctgcctaattgccctggccagaacttccaacactatgttgaataggagtggtgagagagggcatccctgtcttgtgccagttttcaaagggaatgcttccagtttttgcccattcagtatgatattggctgtgggtttgtcatacatagctcttattattctgagatacgttccatcaatacctaatttattgagagtttttagcatgaagcattgttgaattttgtcaaaggccttttctgcgtctattgagataatcatgtggtttttgtcttttgttctgtttatatgctggattacatttattgatttgtgtatattgaaccagccttgcatcacagggatgaagcccacttgatcatggtggataagccttttgatgtgctgctggatttggtttgccagtattttactgagtatttttgcatcagtgttcatcaaggatattggtctaaaattctcttttttggttttgtctctgcctagctttggtatcaggatgatgctggcctcataaaatgagttagggaggattccctctttttctattgattggaatagtttcagaaggaatggtaccagctcctccttgtacctctggtagaattcggctgtgaatccatctggtcctggactctttttggttggtaagttattgattattgccacaatttcagatcctgtgattcagatcctgtgattcagatcctgtgtattcagagagtcaacttcttcctggtttagtcttgggagggtgtatgtgtccaggaatttatccatttcttctagattttctagtttatttgtgtagaggtgtttgtagtattctctgatggtagtttgtatttctgtgggattggtggtgatatcccctttatcattttttattgcatctatttgattcttctctcttttcttctttattagtcttgctagtggtctatcaattttgttgatcctttcataaaaccagctcgtggattcattaattttttgaagggttttttgtgtctctatttccttcagttctgctctgatcttagttatttcttgccttctgctagcttttgaatgtgtttgctcttgcttttctgtgtcttttaattgtgatgttagggtgtcaattttaaatctttcctgctttctcttgtgggcatttagtgctataaatttccctctacacactgctttgaatgtgtcccagagattctggtgtgttgtgtctttgttttcgttggtttcaaagaacatctttatttctgccttcatttcattatgtacccagtagtcattcaggagcaggttgttcattttccacgtagttgagtggttttgagtgagtttcttaatcctgagttctagtttgattgcactgtggtctgagagacagtttgttataatttctgatcttttacatttgctgaagagagctttacttccaactatgtggtcaattttggaataggtgtggtgtggtgctgaaaaaaatgtatattctgttgatttgggttggagagttctgtagatatctattaggtccgcttggtgcagagctgggttcaattcctgggtatccttgttaactttctgtctcgttgatctgtctaatgttgacagtggggtgttaaagtctcccattattattgtgtggcagtctaagtctctttctaggtcactcaggacttgctttatgaatctgggtgctcctgtattgggtgcatatatacttaggatagttagctcttcttgttgaattgatccctttaccattatgtaatggccttctttgtctcttttgatgtttgttggtttaaagtctgttttatcagagactgggattgcaacccctgcctttttttgttttccatttgcttggtagattttcctccatccttttattttgagcctatgtgtgtctctgcacgtgagatgggtttcctgaatacagcacactgatgggtcttgactctttatccaatttgccagtctgtgtcttttaattggagcatttagtccatttacatttaaagttaatattgttatgtgtgaatttgatcctgtcattatgatgttagctggctattttgctcgttagttgatgccgtttcttcctagcctcgatggtctttacaatttggcatgattttgcagtggctgccaccggttgttcctttccatgtttagtgcttccttcgggagctcttttagggcaggcctggtggtgacaaaatctctcagcatttgcttgtctgtaaagtattttatttctccttcacttatgaagcttagtttggctggatatgaaattctggtttgaaaattcctttctttaagaatgttgaatattggcccccactctcttctggcttgtagagtttctgccgagagatccgctgttagtctgatgggcttccctttgtgggtaacccgaccttcatctctggcctcccttaacattttttccttcatttcaacttttgtgaatctgacaattatgtgtcttgagttgctctttttgaggagtatctttgtggcgttcttgtatttcctgcatctgaacgttggcctgccttgctagattggggaagttctcctggataatatcctgcagagtgttttccaacttggttccattctccccatcactttcaggtacaccaatcagacgtagatttggtcttttcacatagtctcatatttcttggaggctttgttcgtttctttttattctgttttctctaaacttcccttctcgcttcatttcattcacttcatcttccatcactgataccctttcttccagttgatcgcatcagctcctgaggcttctgcattcttcacgtagttctcgagccttggctttcagctccatcagctcctttacgtacttctctgtattagttattctagttatacattcgtcaaaatcattttcaaagttttcaacttctttgcctttggtttgaatttcctcctgtagctcagagtagtttgatcgtctgaagccttcttctctcaactcgtcaaagtcattctctgtccagctgtgttccgttgctggtgaggagctgcgttcctttggaggaggagaggtgctctgctttttagagtttccagtttttctgctgtgttttttccccatctttgcggttttatctacttttggtctttgatgatggtgatgtacagatgggtttttggggtggatgtcctttctgtttgttagttttccttctaacagacaggaccctcagctgcaggtctgttggagtttgctagaggtccactccagaccttgtttgcctgggtaccagcagcggtggctgcagaacagtggatttttgtgaaccgcaaatgctgctgtctgatcgttcctctggaatttttgtctcagaggagtacccggccgtgtgaggtgtcagtctgcccctactggggggtgcctcccagttaggctgctcgggggtcaggggtcagggacccacttgaggaggcagtctgccctttctcagatctccagctgcgtgctgggagaatcactgctctcttcaaagctcagatggaaatgcagcctctaatatctctatttggctcacaaccctcaagtagttctcttcagggtttcagcaaatcttgccctataaatgcctaatattaagccagtggcttaaggtgaccttagaaaagatttctgaagcttcatctctaaacagctacctcctctctactaacctgcttcataaatcccagccacaatgctaataatgtctaccttagacaccatcaatttctctttgggttctatttcactgcgttcctaatcaaaaagccagggtaaatgtgttgcttacctccagtagttctttcttttccaggatagcagtgttgtggagtctgttgttagatgtctaaaaagagttgctgcttatgtattttttgagtgttatatttgtttatggctgaagggtaaatctaatagttataaccctgtcattattcagatgaagaatttgtcattttaagtttctcttttttatattcaccacctaccattctacagtattttttgattctttgtgggatttttctctgtctctacaataacttaacttccatgagaagtgattctgtcagtcttactcaattcagatctctagtgctcagaagagtgcttggtactcatgaataaacaacaaatatttaataaaattaaatgaaatgaatgagtaaattattgaataattatgcacagatgaaatttgcttcagaacatattaaaaattttacactagcaatataaaagaataggtgaatagatgttgaaaaaatttgtgcaaaacctatgatattgaagaagaaaataaggggcagacaaagaagtgaaggaataaaaaatgaagaagaaataagaagacagtaaaagaggaaaatggaaaagaagaaagtttgtagaattgtggagaaaaaaagacaaaaagacaagagaagaaatgaggatatttttgtaaaaaggaaaggaagaaaaagaaaagaggcaagtattattttaattctctaacacagcaaacatactgtgccctgactttgtattttaaggcaaaattctagggctgcaatggtgaaaatagttgggttattctttctaaacacctttatccccaaacatatttgccctgatgtgtaagaaatacacacaaaaatataatccaacttagattatgagtgccataggaaagtgctgtgagaagagtgatatcaaaaccttatatggggatctagctaggtaggcatcttagagaaagtgactaagtttgaaggatgaatagaaattaaacagatgttatgggaggaaacaatttgacaaaaggtttggaataaggaaaagaaagagcatggaacagaaattgtaaaagtttctgattggctttcctaataatgtctgaatgacgctgttgggaatgtgtattgggaatgcaagtttaagtctcacatggagagtctcgaatattgtgctaggagtttgaacttttaagtgctctttagcttttggaaacctctgagagtttttcaataagaaagtaataagctcagatcagtgattttagaacataaaatgtaattttaaaaagcagagaaataaatagaaaagagagagaaggcaactttgagcaaaacttttttcttaaaaaaagcgtttttggcacttagttctagaaatgatagaaaaacagatggaaaagatgttggtactggaaattattttatcagtctgtttttatcctgcttgctaagaaagggcatgacttttttattatgcatctaaggatctcttttactttgagccattttcacttggacacattatagttgagtgctgatattactgatgtgcttcctcccctaaatccccttgcccaacaggggttaagtcttgtaggcctaagtgtctgaaaactctgctcctctaacgtgaaaaatcaaacaaaaacaaatgaaacaccaccagttatcaggaatcagcgtttctctgcaacaaaagaaaatagaggatcatgttcacccactctgctttatttatgggaattaaattgggtttggtgtacagaatatctctatctcaataaaattcaagtgctgcgcagaagataaacggaatatacttttaaatgaaattgcttttcgttttggcagcagggtatttggtcattcaggaacttttgcacctctcacttttcacagaaggtcttttagagatgtatttcagctaaggagctcacctctatgaaaggaggactgggcccctagggttagctcttaaagattacttctaagtcatttcaagcattctgaatatttttcagttatgttcattcagactgatttgatatccatgggcaatattattttgaggtaacacttcataagtattaaaaaaaattactgtcccccccatttgaactatttaaaaagagagttaatggaatgtagagttacttaatttatgataaaattcatacc

SEQ ID NO: 10683 - DNA, 4995 bp, Homo sapiens
tttttcttttttttgatttgagtgtattttattttattttattttttattatactaagttctagggtacatgtgcacaacgtgcaggtttgttacatatgtatacatgtgccatgttggtgtgctgcacccattaactcgtcatttacattaggtatatctcctaatgctatccctcccctctccccgcaccctatgacaggccctggtgtgtgatgttccccatcctgtgtccaagtgttcttattgttcaattcccacctatgagtgagaacatgtggtgtttgggtttctgtccttgcgacagtttgctcagaatgatggtttccagcttcatccatgtccctacaaaggacatgacctcatccttttttatggctgcatagtattccatggtgtatatgtgccacattgtcttaatccagtctatcattgatggacatttgggttggttccaagtctttgctattgtgaatagtgccgcagtaaacatacgtgtgcatgtgtctttatagcagcatgatttataatcctttgggtatatacccagtaatgggatggctgggtcaaatggtatttctagttctagatccttgaggaattgccacactgtcttccacaatggttgaactagtttacagtcccaccaacagtgtaaaagtgttcctatttctccacatcctctccagcacctgttgtttcctgactttttaatgatcaccattctaactgctgtgagatggtatctcattgtggttttgatttgcatttctctgatggccagtgatgatgagcattttttcatgtgtctgttggctgcataaatgtcttcttttgagaagtgtctgttcatatccttcgcccacttgttgatggggttgtttgatttttttcttgtaaattagtttaagttctttgtagattctggatattagccctttgtcagatgggtagattgcaaaaattttctcccattttgtaggttgtctgttcactctgatggtagtttcttttgctgtgcagaagctctttagtttaattagatcccatttgtcaattttgtcttttgttgccattgcttttggtgttttagacatgaagtccttgtccatgcctatgtcctgaatggtattgccaaggttttcttctagggtttttatggttttaggtctaacatttaagtctttaatccatcttgaattaattttttataaggtgtaaggaagggatccagttccagccttctgcatatgggctagccagttttcccagcaccatttattaaatagggaatcctttccccatttcttgtttttgtcaggtttgtcaaagatcagatggttgtagatgtgtggtattatttctgagggctctgttttgttccattggtctatatctttgttttggtaccagtaccatgctgttttggttactgtaggcttgtagtataggttgaagtcaggtagcgtgatgcctccagctttgttcttttggcttaggattgacttggcaatgcgggctcttttttggttccatatgaactttaaagtagttttttccaattctgtaaagaaagtcattggtagcttgatggggatggcattgaatctataaattaccttgggcagtatggccattttcacaatattggttcttcctatccataagcatgcaatgctcttccatttgtttgtgtcctcttttatttggttcagcagtggtttgtaattctctttgaagaggttattcacatcccttgtaagttggattcctaggtattttattctctttgtagcaattgtgaatgggagttcactaatgatttggctctctgtttgtctgttattggtgtataggaaagcttgtgatttttgcatattgattttgtatcctgagaccttgctgaagttgcttatcagcttaaggagattttgggctgagatgtgggttttctaaatatacagtcatgtcatctgcaaatagggacaatttgacttcctcttttcctaattgaataccctttgtttatttctcctgcctgattgccctggccagaacttccaacactatgttgaataggagtggtgagagagggcatccctgtcttgtgccagttttcaaagggaatgcttccagtttttgcccattcagtatgatattggctgtgggtttgtcatagatagctcttattattttgaaatacgtcccatcaatacctaatttattgagagtttttagcatgaagggttgttgaattttgtcaaaggccttttctgcatctattgagataatcatgtgatttttgtctttggttctatttatatgctggattacatttattgatttgcatatgttgaaccatccttgcatcccagggatgaagcccacttgatcatggtggataagctttttgatgtgctgctggatttggtttgccagtattttattgaggatttttgcatcgatattcatcagggatattggtctaaaattctcttttttggttgtgtctctgccaggcttcggtatcaggatgatgctggcctcataaaatgagttagggaggattccctctttttctattgattggaatagtttcggaaggaacggtgccagctcctctttgtacctctggtggaattcggctgtgaatccatctggtcctggactttttttggttggtaggctcttaattattgcctcgatttcagagcctgttattggtctattcagggattcaacttcttcctagcttagtcttgggagggtgtatgtgtccaggaatttatccatttcttctagattttctagtttatttgcatagaagtgtttatagtattctctgaggtagtttgtatttctgtgggatcggtggtgatatcccctttatcattttttattgtgtctatttgattcttctctgttttcttctttattagtcttgctagcggtctatcaattttgttgatcttttcaaaaaaccacatcctggattcattgattttttgaagggctttttgtgtctctatctccttcagttctgctctgatcttagttatttcttgccttctgctagcttttgaatgtgtttgctcttgcttctctagttcttttaattgtgatgttagggtatcaattttagatctttcctgctttctcttgtgggcatttagtgctataaatttccctctacacactgctttaaatgtttcccagagattctggtatgttgtgtctttgttttcatcggtttcaaagaacatctttatttctgtcttcatttcattatgtacccagtagtcattcaagagcaggttgttcagtttccatgtagttgagcggttttgagtgagtttcttaatcctgagttctagtttgattgcactgtggtctgagagacagttcgttataatttctgttcttttacatttgctggggagtgctttacttccaactatgtggtcaattttggaataagtgcgatgtggtgctgagaaggatgtatattctgttgatttatggtgtagagttctgtagatgtctattaggtccacttggtgcagagctgagttcaattcctggatatccttcttaactttctgtctcgtggatctgtctaatgttgacagtggggtgttaaagtctcccattattattgtgtgggagtctaagtctctttataagtctctaaggacttgctttatgaatctcagtgctcctgtattgagtgcatatatatttaggatagttagctcttcttgttgaattgatccctttaccattatgtaatggccttctttgtctcttccgatctttgttggtttaaagtctgttttatcagagactaggattgcaacccctgctttttttttttgttttccatttgcttggtagatcttcctccatccctttattttgagcctatatgtgtctctgcacgtgagatgggtctcctgaatacagcacactgatggatcttgactctttatccagtttgccagtctgcgtcttttaatcggcacatttagcccatttacatttaaggttaatattgttatgtgtgaatttgatcctgtcattatgatgttagctggttattttgcttgttagttgatgcagtttcttcctagcctgatggtctttacaatttggcatgtttttgcagtggctggtaccagttgttcttttccatgtttggtgcttccttcaggagctcttgtaaggcaggcctggtggtgacaaaatctctcagcatttgcttgtctgtaaaggattttatttctccttcaattatgaagcttagtttggctggatatgaaattctgggttgaaaattctgtcctttaagaatgttgaatattggcccccattctcttctggcttgtagagtttctgctgagagatcagctgttagtctgatgggcttccctttgtgggtaacctgacctttctctctggctgccctgaacattttttccttcattttgactttggtgactctgacaattatgtgtcttggagttgctcttctcgaggagtatctttttggcgttctctgtgtttcctgaatttgaatgttggcttgccttgctaggttggggaagttctcctggataatatcctgaagagtgttttccaacttggttccattctccccatcactttcaggtacaccaatcagacatagatttggtcttttcacatagtcccatatttcttggaggctttgttcgtttctttttaatcttttttctctaaacttctcttctcacttcatttcattcatttaatcttcaatcactgatacctattcttccagttgatcgaattggctactgaagcttgtgcatgcattacatagttctcgtgccatggttttcagctccatcaggtcatttaagttcttctctacgctgtttattccagttagccattcgtctactcttttttcaaggtttttagcttctctgcgatgggttccaacatcctcctttag

SEQ ID NO: 10684 - DNA, 5453 bp, Homo sapiens
tctgccctctagtgtcttttgttcccatctttttttttttttttttttttttttattatactctaagttttagggtacatgtgcacattgtgcaggttagttacatatgtatacatgtgccatgctggtgcgctgcacccactaatgtgtcatctagcattaggtatatctcccaatgctatccctcccccctcccccgaccccaccacagtccccagagtgtgatattccccttcctgtgtccatgtgatctcattgttcaattcccacctatgagtgagaatatgcggtgtttggttttttgttcttgcgatagtttactgagaatgatggtttccaatttcatccatgtccctacaaaggatatgaactcatcattttttatggctgcatagtattccatggtgtatatgtgccacattttcttaatccagtctatcattgttggacatttgggttggttccaagtctttgctattgtgaatagtgccgcaataaacatacgtgtgcatgtgtctttatagcagcatgatttatagtcctttgggtatatacccagtaatgggatggctgggtcaaatggtatttctagttctagatccctgaggaatcgccacactgacttccacaatggttgaactagtttacagtcccaccaacagtgtaaaagtgttcctatttctccgcatcctctccagcacctgttgtttcctgactttttaatgattgccattctaactggtgtgagatgatatctcatagtggttttgatttgcatttctctgatggccagtgatgatgagcatttcttcatgtgttttttggctgcataaatgtcttcttttgagaagtgtctgttcatgtccttcgcccactttttgatggggttgtttgtttttttcttgtaaatttgtttgagttcattgtagattctggatattagccctttgtcagatgagtaggttgcaaaaattttctcccatgttgtaggttgcctgttcactctgatggtagtttcttttgctgtgcagaagctctttagtttaattagatcccatttgtcaattttgtcttttgttgccattgcttttggtgttttggacatgaagtccttgcccacgcctatgtcctgaatggtaatgcctaggttttcttctagggtttttatggttttaggtttaacgtttaaatctttaatccatcttgaattgatttttgtataaggtgtaaggaagggatccagtttcagctttctacatatggctagccagttttcccagcaccatttattaaatagggaatcctttccccattgcttgtttttctcaggtttgtcaaagatcagatagttgtagatacgcggcattatttctgagggctctgttctgttccattgatctatatctctgttttggtaccagtaccatgctgttttggttactgtagccttgtagtatagtttgaagtcaggtagtgtgatgcctccagctttgttcttttggcttaggattgacttggcaatgcgggctcttttttggttccatatgaactttaaagtagttttttccaattctgtgaagaaagtcattggtagcttgatggggatggcattgaatctgtaaattaccttgggcagtatggccattttcacgatattgattcttcctacccatgagcatggaatgttcttccatttgtttgtctcctcttttatttccttgagcagtggtttgtagttctccttgaagaggtccttcacatcccttgtaagttggattcctaggtattttattctctttgaagcaattgtgaatgggagttcacccatgatttggctctctgtttgtctgttgttggtgtataagaatgcttgtgatttttgtacattgattttgtatcctgagactttgctgaagttgcttatcagcttaaggagattttgggctgagacgatggggttttctagataaacaatcatgtcgtctgcaaacagggacaatttgacttcctcttttcctaattgaataccctttatttccttctcctgcctgattgccctggccagaacttccaacactatgttgaataggagcggtgagagagggcatccctgtcttgtgccagttttcaaagggaatgcttccagtttttgcccattcagtatgatattggctgtgggtttgtcatagatagctcttattattttgaaatacgtcccatcaatacctaatttattgagagtttttagcatgaagggttgttgaattttgtcaaaggctttttctgcatctattgagataatcatgtggtttttgtctttggctctgtttatatgctggattacatttattgatttgcgtatattgaaccagccttgcatcccagggatgaagcccacttgatcatggtggataagctttttgatgtgctgctggattcggtttgccagtattttattgaggatttttgcatcaatgttcatcaaggatattggtctaaaattctcttttttggttgtgtctctgcccggctttggtatcagaatgatgctggcctcataaaatgagttagggaggattccctctttttctattgattggaatagtttcagaaggaatggtaccagttcctccttgtacctctggtagaattcggctgtgaatccatctggtcctggactctttttggttggtaaactattgattattgccacaatttcagagcctgttattggtctattcagagattcaacttcttcctggtttagtcttgggagagtgtatgtgtcgaggaatgtatccatttcttctagattttctagtttatttgcgtagaggtgtttgtagtattctctgatggtagtttgtatttctgtgggatcggtggtgatatcccctttatcattttttattgtgtctatttgattcttctctctttttttctttattagtcttgctagcggtctatcaattttgttgatcctttcaaaaaaccagctcctggattcattgattttttgaagggttttttgtgtctctatttccttcagttctgctctgattttagttatttcttgccttctgctagcttttgaatgtgtttgctcttgcttttctagttcttttaattgtgatgttagggtgtcaattttggatctttcctgctttctcttgtaggcatttagtgctataaatttccctctacacactgctttgaatgcgtcccagagattctggtatgtggtgtctttgttctcgttggtttcaaagaacatctttatttctgccttcatttcgttatgtacccagtagtcattcaggagcaggttgttcagtttccatgtagttgagcggctttgagtgagattcttaatcctgagttctagtttgattgcactgtggtctgagagatagtttgttataatttctgttcttttacatttgctgaggagagctttacttccaactatgtggtcaattttggaataggtgtggtgtggtgctgaaaaaaatgtatattctgttgatttggggtggagagttctgtagatgtctattaggtctgcttggtgcagagctgagttcaattcctgggtatccttgttgactttctgtctcgttgatctgtctaatgttgacagtggggtgttaaagtctcccattattaatgtgtgggagtctaagtctctttgtaggtcactcaggacttgctttatgaatctgggtgctcctgtattgggtgcataaatatttaggatagttagctcctcttgttgaattgatccctttaccattatgtaatggccttctttgtctcttttgatctttgttggtttaaagtctgttttatcagagactaggattgcaacccctgcctttttttgttttccattggcttggtagatcttcctccatccttttattttgagcctatgtgtgtctctgcacgtgagatgggtttcctgaatacagcacactgatgggtcttgactctttatccaacttgccagtctgtgtcttttaattgcagaatttagtccatttatatttaaagttaatattgttatgtgtgaatttgatcctgtcattatgatgttagctggtgattttgctcattagttgatgcagtttcttcctagtctcaatggtctttacattttggcatgattttgcagtggctggtaccggttgttcctttccatgtttagcgcttccttcaggagctcttttagggcaggcctggtggtgacaaaatctctcaacatttgcttgtctataaagtattttatttctccttcacttatgaagcttagtttggctgtatatgaaattctgggttgaaaattcttttctttaagaatgttgaatattggcccccactctcttctggcttgtagggtttctgccgagagatccgctgttagtctgatgggctttcctttgagggtaacccgacctttctctctggctgcccttaacattttttccttcatttcaactttggtgaatctgacaattatgtgtcttggagttgctcttctcgaggagtatctttgtggtgttctctgtatttcctgaatctgaacgttggcctgccttgctagattggggaagttctcctggataatatcctgcagagtgttttccaacttggttccattctccacatcactttcaggtacaccaatcagacgtagatttggtcttttcacatagtcccatatttcttggaggctttgctcatttctttttattcttttttctctaaacttcccttctcgcttcatttcattcatttcatcttccattgctgataccctttcttccagttgatcgcatcggctcctgaggcttctgcattcttcacgtagttctcgagccttggttttcagctccatcagctcctttaagcacttctctgtattggttattctagttatacattcttctaaatttttttcaaagttttcaacttctttgcctttggtttgaatgtcctcccgtagctcagagtaatttgatcgtctgaagccttcttctctcagctcgtcaaaatcattctccatccagctttgttctgttgctggtgaggaactgcgttcctttggaggaggagaggcgctctgcgttttagagtttccagtttttctgttctgttttttccccatctttgtggttttatctacttttggtctttgatgatggtgatgtacagatgggttttcggtgtagatgtcctttctggttgttagttttccttctaacagacaggaccctcagctgcaggtctgttggaataccctgccgtgtgaggtgtcagtgtgcccctgctggggggtgcctcccagttaggctgctcgggggtcaggagtcagggacccacttgaggaggcagtctgcccgttctcagatctccagctgcgtgctgggagaaccactgctctcttcaaagct

SEQ ID NO: 10685 - DNA, 4137 bp, Homo sapiens
tttttgttggttttttttttttcactttcttttttttttttaatttatttttttattattatactttaagttttagcgtacatgtgcacattgtgcaggttagttacatacgtatacatgtgccatgctggtgtgctgcacccactaactcgtcatctagcattaggtatatatcccaatgctatccctcccccctccccccaccccacaacagtccccagagtgtgatattccccttcctgtgtccatgtgatctcattgttcaattcccacctatgagtgagaatatgcggtgtttggttttttgttcttgcgatagtttactgagaatgatggtttccaatttcatccatgtccctacaaaggacatgaactcatcattttttatggctgcatagtattccatggtgtatatgtgccacattttcttaatccagtctatcattgttggacatttgggttggttccaagtctttgctattgtgaataatgctgcaataaacatacgtgtgcatgtgtctttataccagcatgatttataatcctttgggtatatacccagtaatgggatggctgggtcaaatggtatttctagttctagatccctgaggaatcgccacgctgacttccacaatggttgaactagtttacagtcccaccaacagtgtaaaagtgttcctatttctccacatcctctccagcacctgttgtttcctgactttttaatgattgccattctaactggtgtgagatggtatctcattgtggttttgatttgcatttctctgatggccagtgatggtgagcattttttcatgtgttttttggctgcataaatatcttctgttgagaagtgtctgttcatgtccttcacccactctttgatggggttgtttgtttttttcttgtaaatttgtttgagttcattgtagattctggatattagccctttgtcagatgagtaggttgcaaaaattttctcccattttgtaggttgcctgttcactctgatggtagtttcttttgctgtgcagaagctctttagtttaattagatcccatttgtcaattttggcttttgttgccattgcttttggtgttttagacatgaagtccttgcccatgcctatgtcctgaatggtaatgcctagattttcttctagggtttttatggttttaggtctaacgtttgagtctttaatccatcttgaattgatttttgtataagttgtaaggtagggatccagtttcagctttctacatatggctagccagttttcccagcaccatttatgaaatagggaatcctttccccatttcttgtttttgtcaggtttctcaaagatcagatagttgtagatatgtggcgttatttctgagggctctgttctgttccattgatctatatctctgttttggtaccagtaccatgctgttttggttactgtagccttgtagtatagtttgaagtcaggtagtgtgatgcctccagctttgttcttttggtttaggattgacttggcgatgcgggctcttttttggttccatatgaactttaaagtagttttttccaattctgtgaagaaaggcattggtagcttgatggggatggcattgaatctgtaaattaccttgggcagtatggccattttcacgatattgattcttcctacccatgagcatggaatgttcttccatttgtttgtatcctcttttatttccttgagcagtggtttgtagttctccttgaagaggtccttcacatcccttgtaagttggattcctaggtattttattctctttgaagcaattgtgaatgggagttcactcatgatttggctctctgtttctctgttgttggtgtataggaatgcttgtgatttttgcacattgattttgtatcctgagactttgctgaagttgcttatcagcttaaggagattttgggctgagaaaatggggttttctagatatacaatcatgtcatctgcaaacagggacaatttgacttcctcttttcctaattgaataccctttatttccttctcctgcctaattgccctggccagaacttccaacactatgttgaatagaagtggtgagagagggcatccctgtcttgtgccagttttcaaagggaatgcttccagtttttgcccattcagtatgatattggctgtgggtttgtcatagatagctcttattattttgaaatatgtcccatcaatacctaatttattgagagtttttagcatgaacggttgttgaattttgtcaaaggcctttcctgcatctattgagataatcatgtggtttttgtctttggctctgtttatatgctggattacatttattgatttgcgtatattgaaccagccttgcatcccagggatgaagcccacttgatcatggtggataagctttttgatgtgctgctggattcggtttgccagtattttattgaggatttttgcatcaatgttcatcaaggatattggtctaaaattctcttctttggttgtgtctctgcccggctttggtatcagaatgatgctggcctcataaaatgagttagggaggattccctctttttctattgattggaatagtttcagaaggaatggtaccagttcctccttgtacctctggtagaattcggctgtgaatccatctggttctggactctttttggttggtaagctattgattattgccacaatttcagatcctgttattggtctattcagagattcaacttcttcctggtttagtcttaggagagtgtatgtgtcaaggaatttatccatttcttctagattttctagtttatttgcgtagaggtgtttgtagtattctctgatggtagtttgtatttctgtgggatcggtggtgatatcccctttatcattttttattgcgtctgtttgattcttctctctttttttctttattagtcttgctagcggtctatcaattttgttgatcctttcagaaaaccagctcctggattcattaattttttgaagtgttttttgtgtctctatttccttcagttctgctctgattttagttatttcttgccttctgctagcttttgaatgtgtttgctcttgcttttctaattcttttaattgtgatgttagggtgtcaattttggatctttcctgctttctcttgtgggcatttagtggtataaatttccctctacacactgctttgaatgcgtcccagagattctggtatgttgtgtctttgttctcgttggtttcaaagaacatctttatttctgccttcatttcgttatgtacccagtagtcattcaggagcaggttgttcagtttccatgtagttgagcggttttgagtgagattcttaatcctgagttctagtttgatcgcactgtggtctgagagatagtttgttataatttctgttcttttacatttgctgaggagagctttacttccaactatgtggtcaattttggaataggtgtggtgtggtgctgaaaaaaatgtatattctgttgatttggggtggagagttctgtagatgtctattaggtccacttggtgcagagctgagttcaattcctgggtatccttgttgactttctgtctcgttgatctgtctaatgttgacagtggggtgttaaagtctcccattattaatgtgtgggagtctaagtctctttgtaggtcactcaggacttgctttatgaatctgggtgctcctgtattgggtgcatatatatttaggatagttagctcttctttttgaattgatccctttaccattatgtaatgaccttctttgtctcttttgatctttgttggtttaaagtctgttttatcagagactaggattgcaacccctgcctttttttgttttccatttgcttggtagatcttcctccatccttttattttgagcctatgtgtgtctctgcacgtgagatgggtttcctgaatacagcacactgatgggtcttgactctttatccaatttgccagtctgtgtcttttaattggagcatttagtccatttacatttaaagttaatagtgttatgtgtgaatttgatcctgtcattattatgttagctggttattttgctcgttagttgatgcagtttcttc

SEQ ID NO: 10686 - DNA, 6542 bp, Homo sapiens
tttttttattttttattttttcttgagttttttttttaatttatttatttattattattatactttaaggtttagggtacatgtgcacaatgtgcaggttagttacatatgtatacatgtgccatgctggtgggctgcacccactaactcgtcatctagcattagttatatctcccaatgctatccctcccccctcccccaaacccaccacagtccccagagtgtgatgttccccttcctgtgtccatgtgttctcattgtttaattcccacctatgagtgagaatatgcggtgtttggttttttgttcttgcgatagtttactgagaatgatgatttccaatttcatccatgtcactacaaaggacatgaactcatcattttttatggctgcatagtattccatggtgtatatgtgccacattttcttaatccagtctatcattgttggacatttgggttggttccaagtctttgctattgtgaataatgccgcaataaacatacgtgtgcatgtgtctttatagcagcatgatttatagtcctttaggttatatacccagtaatgggatggctgggtcaaatggtatttctagttctagatccctgaggaatcgccacactgacttccacaatggttgaactagtttacagtcccgccaacagtgtaaaagtgttcctatttctccacatcctctccagcacctgttgtttcctgactttttaatgattgccattctaactggtgtgagatagtatctcattgtggttttgatgtgcatttctctgatggccagtgatggtgagcattttttcatgtgttttttggctgcataaatgtcttcttttgagaaatgtctgttcatgtccttcgcccactttttgatggggttgtttggttttttcttgtaaatttgtttgagttcattgtagattctggatattagccctttgtcagatgagtaggttgcgaaaattttctcccattttgtaggttgcctgttcactctgatggtagtttcttttgctgtgcagaagctgtttagtttaattagatcccatctgtcaattttggcttttgttgccattgcttttggtgttttagacatgaagtccttgcccatgcctatgtcctgaatggtaatgcctaggttttcttctagggtttttatggttttaggtcgaacgtttaagtctttaatccatcttgaattgatttttgtataaggtgtaaggaagggatccggtttcagctttctacatatggctagccagttttcccagaaccatttattaaatacagaatcctttccccactgcttgtttttctcaggtttgtcaaagatcagatagttgtagatatgcggcgttatttctgagggctctgttctgttccattggtctctatctctgttttggtaccagtaccatgctgttttggtgactgtagccttgtagcatagtttgaagtcaggtagcgtgatgcctccagctttgttcttttggcttaggattgacttggcgatgcgggctcttttttggttccatatgaactttaaagtagttttttccaattgcgtgaagaaagtcattggtagcttgatggggatggcattgaatctgtaaattaccttgggtagtatggccattttcacgatattgattcttcctacccatgagcatggaatgttcttccatttgtttgtatcctcttttatttccttgagaagtggtttgtagttctccttgaagaggtccttcacatcccttgtaagttggattcctaggtattttattctctttgaagcaattgtgaatgggagttcactcatgatttggctctctgtttgtctgttgttggtgtataagaatgcttgtgatttttgtacattgattttgtatcctgagactttgctgaagttgcttatcagcttaaggagattttgggatgagatgatggggttttctagatatacaatcatgtcatctgcaaacagggacaatttgacttcctcttttcctaattgaataccctttatttccttctcctgcctaattgccctggccagaacttccaacactatgttgaataggagtggtgagagagggcatccctgtcttgtgccagttttcaaagggaatgcttccagtttttgcccatttagtatgatattggctgtgggtttgtcatagatagctcttattattttgaaatacgtcccatcaatacctaatttattgagagtttttagcatgacgggttgttgaattttgtcaaaggccttttctgcatctattgagataatcatgtggtttttgtctttggttctgtttatatgctggattacatgtattgatttgcatatattgaaccagccttgcgtcccagggatgaagcccacttgatcatggtggataagctttttgatgtgctgctggattcggtttgccagtattttattgaggatttttgcatcaatgttcatcaaggatattggtctaaaattctcttttttggttgtgtctctgcccggctttggtatcaggatgatgctggcctcatcaaatgagttagggaggactccctctttttctattgattggaatagtttcagaaggaatggtaccagttcctccttgtacctctggtagaattcggctgtgaatctatctggtcctggactctttttggttggtaagctattgattattgccacaatttcagatcctgttattggtctattcagagattcaacttcttcctggtttagtctttggagggtgtatgtgtcaaggaatttatccatttcttctagattttctagtttatttgcatagaggtgtttttagtattctctgatggtagtttgtatttctgtgggatcggtggtgatatcccctttatcattttttattgcgtctatttgattcttctctctttttttctttattagtcttgctagcagtctatcaattttgttgatcctttcaaaaaaccagctcctggattcattaattttttgaagggttttttgtgtctctatttccttcagttctgctctgattttagttatttcttgccttctgctagcttttgaatgtgtttgctcttgcttttctagttcttttaattgtgatgttagggtgtcaattttggatctttcctgctttctcttgtgggcatttagtgctataaatttccctctacacactgctttgaatgtgtcccagagattctggtatgttgtgtctttgttctcgttggtttcaaagaacgtctttatttctgccttcatttcgttatgtacccagtagtcattcaggagcaggttgttcagtttccatgtagttgagtggttttgagtgagattcttaatcctgagttctagtttgattgtactgtggtctgagagatagtttgttataatttctgttcttttacatttgctgaggagagctttacttccaagtatgtggtcaattttggaataggtgtggtgtggtgctgaaaaaaatgtatattctgttgatttggggtggagagttctgtagatgtctattaggtctgcttggtgcagagctgagttcaattcctgggtatccttgttgacttgctgtctccttgatctgtctaatgttgacagtggggtgttaaagtctcccattattattgtgtgggagtctaagtctctttgtaggtcactcaggacttgctttatgaatctgggtgttcctgtattgggtgcatatatatttaggatagttagctcttcttgttgaattgatccctttaccattatgtaatggccttctttgtctcttttgatctttgttggttgaaagtctgttttatcagagactaggattgcaacccctgcctttttttgttttccatttgcttggtagattttcctccatccctttattttgagcctatgtgtgtctctgcacgtggatgggtttcctgaatacagcacactgatgggtcttgactctttatccaatttgccagtctgtgtcttttaattggagcatttagtccatttacatttaaagttaatatcgttatgtgtgaatttgatcctgtcattatgatgttagctggttattttgctcgttagttgatgcagtttcttcctagtctcgatggtctttacattttggcatgattttgcagcagctggtaccggttgttcctttccatgtttagcgcttccttcaggagctcttttagggcaagcctggtggtgacaaaatctctcagcatttgcttgtctgtaaagtattttatttctccttcacttttgaagcttagtttggctggatatgaaattctgggtcgaaaattcttttctttaagaatgttgaatattggcccccactctcttctggcttgtagagtttctgccaagagatctgctgttagtctgatgggcttccctttgagggtaacccgacctttctctctggctgcgcttaacatttttcccttcatttcaactttggtgaatctgacaattatgtgtcttagagttgctcttctcgaggagtatctttgtggcattctctgtatttcctgaatctgaatgttggcctgccttgctagattggggaagttctcctggatgatatcctgcagagtgttttccaacttggttccattctccccgtcagtttcaggtacaccaatcagacgtagatttggtcttttcacatagtcccgtatttcttggaggctttgtttgtttctttttattcttttttctctaaacttcccttcttgcttcatttcattcatttcatcttccatcgctgataccctttcttccagttgatcgcatcggctcctgaggcttctgcattcttcacgtagttctcgagccttggttttcagctccatcagctcctttaagcacttctctgtattggttattctagtaatacattcttcaaaatttttttcaaagttttcaacttctttgcctttggtttgaatgtcctcccgtagcttggagtaatttgatcgtctgaagccttattttctcagctcgtcaaagtcattctccgtccagctttgttctgttgttggtgaggagctgcgtttctttggaggaggagaggcactgcgttcctttggaggaggagaggcgctctgctttttagagtttccaggttttctgctctgttttttccccatctttgcagtttttatctacttttggtctttgatgatggtgatgtacagatgggtttttggtgtggatgtcctttctgtttgttagttttccttctaacagacaggaccttcagctgcaggtctgttgggttacccggccgtgtgaggtgtcagcctgcctctgctagggggtgcctcccagttacctcccagggggtgacctcccagggggtcaggggtcagggacccacttgaggaggcagtctgcccgttctcagatctccagctgtgtgctgggagaaccactgctctcttcaaactgtcagacagggacacttaagtctgcggaggttactgctgtctttttgtgtgtctgtgccctgcccccagaggtggagcctacagaggcaggcaggcttccttgagctgtggtgggctccacccagttggagcttcctggctgctttgtttacctaagcaagcctgggcaatggcgggcacccctcccccagcctcgctgccaccttgcagtttgatctcaggctgctttgctagcaatcagcgagactccgtgggcgtgggaccctccgagccaggtgtgggacacaatctcctggtgcgccgtttttcaagcccgtcggaaaagcgcagcattctggtgggagtgacccaatcttccaggtgccgtctgtcacccctttctttgactaggaaagggaactccctgacccccgtgcttcccaagtgagacaatgcctcgccctgcttcggctcgcggatggagcacgcacccactgacctgcgcccactgtctggcactccctagtgagatgaacccggtacctcagatggaaatggagaaatcgcctgtcttctgcgtctctaacgctgggagctgtataccggagctgttcctattcggccatcttggctcctctctcctctcttcactttaataatggattagttttctgccttctcctgtggggaatccttttggtaagggagggaagaaagattagttattcttgtgcatcggtatctttttctttttttattgtagtaagaacatctaacatgagatctaccctcttaacaattttttaagtgtacaatacagtattgctaactataggcatgaggatgtgcagcagatctctggaacgtttcactcttcataactgaagctttataccccttgaatcgcagtttcccatttccctgtcttcatagcccctggcatccaccattctacactctttctatggggttgactattttaattacctgacacaagtggaatcatgcattatttgtctttctgtgactggtttatttcatgtagcataaagtcatcaaggttcatc

SEQ ID NO: 10687 - DNA, 5064 bp, Homo sapiens
tcttttgcttttacattttattattattatactttaagttttagggtacatgtgcacaacgtgcaggtttgttacatatgtatacatgtaccatgttggtgtgctgtacccattaactcgtcatttagcattaggtatatctcttaatgctatccctccaccctcccctgaccccacaacagtcccgggtgtgtgatgttccccttcctgtgtccatgtgttctcattgttcatttcctacctatgagtgagaacatgcagtgtttggttttttgtccttgcaatagtttgctgagaatgatggtttccagtttcatccatgtccctacaaaggacatgaactcatcattttttatggctgcatagtattccatggtgtatatgtgccacattttcttaatccagtctatcgttgttggacatttaggttggttccaagtctttgctgttgtgaatagtgccactataaacatacgtgtgcatgtgtctttacagcagcatgatttataatcctttgggtatatacccagtaatgggatggctgggtcaaatggtatttctagttctagatccctgaggaattgccacactgacttccacaatggttgaactagtttacactcccaccaacagtgtaaaagtgttcgtatttctccacatcctctccagcacgtgttgtttcctgactttttaatgatcgccattctaactggtgtgagatggtatctcattgtggttttgatttgcatttccctgatggccagtgatgatgagcattttttatgtgttttttggctatgtaaatgtcttcttttgagaagtgtctgttcatatccttcgcccactttttgatggggttgtttgtttttttcttgtaaatttgtttgagttcgttgtagattctggatattagccctttgtcagatgagtaggttgcaaaaattttctcccatcctgtaggttgcctgttcactctgatggtggtttcttttgctgtgcagaagctctttagtttaattagatcccatttgtcaattttggcttttgttgccattgcttttggtgttttagacatgaagtccttgcccatgcctatgtcctgaatggtattgcctaggttttcttctagggtttttatcattttaggtctaacatttaagtctctaatccatcttgaattaatttttgtataaggtgtaaggaagggatccagtttcagctttctacatatggctagccagttttcccagcaccatttattaaatagggaatcctttccccattgcttgtttttgtcacgtttgtcaaagatcagatagttgtagatatgcggcgttatttctgagggctctgttctgctccattggtctatatctctgttttggtaccagtaccatgctgttttggttactgtagccttgtagtatagtttgaagtcaggtagtgtgatgcctccagctttgttctttgggcttaggattgactcggcgatgcgggctcttttttggttccatatgaactttaaagtagttttttccaattctgtgaagaaagtcattggtagcttgatggggatggcattgaatctataaattaccttgggcagtatggccattttcacgatattgattcttcctacccacgagtatggaacgttcttccatttgtttgtatcctcttttatttcattgagcagtggtttgtagttctccttgaagaggtccttcacatctcttgtaagttggattcctaggtattttattctctttgaagcaattgtgaatgggagttcactcatgatttggctctctgtttgtctgtcattggtgtataagaatgcttgtgatttttgtacattgattttgtatcctgagactttgctgaagttgcttatcagcttgaggagattttgggctgagatgatggggttttctaaatatacaatcatgtcatctgcaaacagggacaatttgacttctttttttcctaattgaatgccctttatttccttctcctgcctgattgccctggccagaacttccaacactatgttgaataggagtggtgagagagggcatccctgtcttgtgccagttttcaaagggaatgcttccagtttttgcccattcagtatgatattggctgtgggtttgtcatagatagctcttattattttgagatatgtcccatcaatacctaatttattgagagtgtttagcatgaagggttgttgaattttgtcaaaggccttttctgcatctattgagataatcatgtggtttttgtctttagttctgtttataccttggattacatttattgatttgcgtatgttgaactggctttgcatcccagggatgaagcccacttgatcatggcggataagctttttgatgtgctgctggattcggtttgccagtattttactgaggatttttgcatcgatgttcatcaaggatattggctaaaattctctttttttgttgtgtctctgccaggctttggtatcaggatgatgctggcctcataaaatgagttagggaggattccctctttttctgttgattggaatagtttcagaaggaatggtaccatttcctccttgtacctctggtacaattcggctgtgaatccgtctggtcctggactctttttggttggtaagctattgattattgcctcaatttcagatcctgttattggtctattcagagattcagcttcttcctggtttagtcttgggaggatgtatgtgtcgaggaatttatccatttcttctagattttctagttgatttgcatagaggtgtttatagtattctctgatggtagtttgtatttctgtgggatcggtggtgatctcccctttatcatttttgattgcgtctatttgattcttctctcttttcttctttattagtcttgctagcagtctatcaattttgttgatcctttcaaaaaaccagctcctggattcattaattttttgaagggttttttgtgtctctatttccttcagttctgctctgatcttagttatttcttgccttctgctagcttttgaatgtgtttgctcttgcttttctagttcttttaattgtgatgtaagggtgtcaattttagatctttcctgctttctcttgtgggcatttagtgctatacatttccctctacacactgctttgaatgtgtcccagagattctggtatgttgtctttgttctcgttggtttcaaagaacatctttatttctgccttcatttcattatttacccagtagtcattcgggagcaggttgttcagtttccatgtagttgagcagttttgagtgagtttcttaatcctgagttctagtttgattgcactgtggtctgagagacagtttgttataatttctgttcttttacatttgctgaggagtgctttacttccaactatgtggtcaattttggagtaggtgtggtgtggtgctgaaaagaatgtatattctgttgatttggggtggagagttctgtagatgtctattaggtcctcttgttgcagagctgagttcaattcctgggtatccttgttaactttctgtctcgttgatctgtctaatgttgacagtggggtgttaaagtctcccattattattgtgttggagtctaagtctctttgtaggtcactaaggacttgctttatgaatctgggtgctcctgtattgggtgcatatatatttaggatagttagctcttgttgttgaattgatccctttaccattatgtaatggccttctttgtctcttttgatctttgttggtttaaagtctgttttatcagagactaggattgcaatccctgccttcttttggtttccatttgcttggtagatcttcctccatccctttattttgagcctatgtgtgtctctgcacgtgagatgggtttcctgaatacagcacactgatgagtcttgactctttatccaatctgccagtctgtgtcttttaattggagcatttagcccatttacgtttaaagttaatattgttatgtgtgaatttgatcctgtcattatgatgttagctggttattttgctcgttagttggtgcagtttcttcctagccttgatggtctttacaatttggcatgtttttgcagtggctggtactggttgttcctttccatgtttagtgcttccttcaggagctcttgtaaggcaggcctggtggtgacaaaatctctcagcatttgcttgtctgtaaaggattttatttctccttcacttatgaagcttagtttggctggatatgaaattctgggttgaaaattcttttctttaagaatgttgaatattggcccccactctcttctggcttgtagagtttctgctgagagatcagcttttagtctgatgggcttccctttgtgggtaacccgacctttctctctggctgcccttaacattttttccttcatttcaactttggtgaatctgacaattatgtgtcttggagttgctcttctcgaggagtatctttgtggcattctctgtatttcctgaatttgaatgttggcctgccttgctagattggggaagttctcctggataatatactgcagagtgttttccaacttggttccattctccccgtcactttcaggtataccaatcagacgtagatttggccttttcacatagtcccatatttcttggaggctttgttcgtttctttttattcttttttctctaaacttctcttctcgcttcatttcattcatttcgtcttccatcactgataccctttcttccagttgatcgcatcggctcctgaggcttctgcattcgtcacgtagctctcgtgccttggttttcagctccatcaggtcctttaaggacttgtctgcattgattattcttgttatccattcatcttattttttttcaaagcttttaacttctttgccattgattcgaatttcctcctgtagctcagagtagtctgatcatctgaggccttctttcaactcgtcagagtcattctccatccagctttgttccgttgctggtgaggagctgcgtt

SEQ ID NO: 10688 - DNA, 14411 bp, Homo sapiens
ttttcttttttttttttttaaattttttttttttattatactctaagttttagggtacatgtgcacattgtgcaggttagttacatatgtatacatgtgccatgctggtgcgctgcacccactaactcatcatctagccttaggtatatctcccaatgctatccctcccccctcccccgaccccaccacagtccccagagtgtgatattccccttcctgtgtccatgtgatctcattgttcaattcccacctatgagtgagaatatgcggtgtttggttttttgttcttgcgatagtttactgagaatgatggtttccaatttcatccatgtccctacaaaggacatgaactcatcattttttatggctgcatagtattccatggtgtatatgtgccacattttcttaatccagtctatcattgttggacatttgggttggttccaagtctttgctattgtgaatagtgcctcaataaacatacgtgtgcatgtgtctttatagcagcatgatttatagtcctttgggtatatacccagtaatgggatggctgggtcaaatggtatttctagttctagatccctgaggaatcgccacactgacttccacaatggttgaactagtttacagtcccaccaacagtgtgaaagtgttcctatttctccacatcctctccagcacctgttgtttcctgactttttaatgattgccattctaactggtgtgagatgatatctcatagtggttttgatttgcatttctctgatggccagtgatgatgagcatttcttcatgtgttttttggctgcataaatgtcttcttttgagaagtgtctgttcatgtccttcgcccactttttgatggggttgtttgtttttttcttgtaaatttgtttgagttcattgtagattctggatattagccctttgtcagatgagtaggttgcgaaaattttctcccatgttgtaggttgcctgttcactctgatggtagtttcttttgctgtgcagaagctcttgagtttaattagatcccatttgtcaattttggcttttgttgccattgcttttggtgttttggacatgaagtccttgcccacgcctatgtcctgaatggtaatgcctaggttttcttctagggtttttatggttttaggtctaacgtttaaatctttaatccatcttgaattgatttttgtataaggtgtaaggaagggatccagtttcagctttctacatatggctagccagttttcccagcaccatttattaaacagggaatcctttccccattgcttgtttttctcaggtttgtcaaagatcagatagttgtagatatgcggcattatttctgagggctctgttctgttccattgatctatatctctgttttggtaccagtaccatgctgttttggttactgtagccttgtagtatagtttgaagtcaggtagtgtgatgcctccagctttgttcttttggcttaggattgacttggcgatgcgggctcttttttggttccatatgaactttaaagtagttttttccaattctgtgaagaaagtcattggtagcttgatggggatggcattgaatctgtaaattaccttgggcagtatggccattttcacgatattgattcttcctacccacgagcatggaatgttcttccatttgtttgtgtcctcttttatttccttgagcagtggtttgtagttctccttgaagaggtccttcacatcccttgtaagttggattcctaggtattttattctctttgaagcaattgtgaatgggagttcactcatgatttggctctctgtttgtctgttgttggtgtataagaatgcttgtgatttttgtacattgattttgtatcctgagactttgctgaagttgcttatcagcttaaggagattttgggctgagacgatggggttttctagataaacaatcatgtcgtctgcaaacagggacaatttgacttcctcttttcctaattgaataccctttatttccttctcctgcctgattgccctggccagaacttccaacactatgttgaataggagcggtgagagagggcatccctgtcttgtgccagttttcaaagggaatgcttccagtttttgcccattcagtatgatattggctgtgggtttgtcatagatagctcttattattttgaaatacgtcccatcaatacctaatttattgagagtttttagcatgaagggttgttgaattttgtcaaaggctttttctgcatctattgagataatcatgtggtttttgtctttggctctgtttatatgctggattacatttattgatttgcgtatattgaaccagccttgcatcccagggatgaagcccacttgatcatggtggataagctttttgatgtgctgctggattcggtttgccagtattttattgaggatttttgcatcaatgttcatcaaggatattggtctaaaattctcttttttggttgtgtctctgcccggctttggtatcagaatgatgctggcctcataaaatgagttagggaggattccctctttttctattgattggaatcgtttcagaaggaatggtaccagttcctccttgtacctctggtagaattcggctgtgaatccatctggtcctggactctttttggttggtaaactattgattattgccacaatttcagagcctgttattggtctattcagagattcaacttcttcctggtttagtcttgggagagtgtatgtgtcgaggaatgtatccatttcttctagattttctagtttatttgcgtagaggtgtttgtagtattctctgatggtagtttgtatttctgtgggatcggtggtgatatcccctttatcattttttattgtgtctatttgattcttctctctttttttctttattagtcttgctagcggtctatcaattttgttgatcctttcaaaaaaccagctcctggattcattgattttttgaagggttttttgtgtctctatttccttcagttctgctctgattttagttatttcttgccttctgctagcttttgaatgtgtttgctcttgcttttctagttcttttaattgtgatgttagggtgtcaattttggatctttcctgctttctcttgtaggcatttagtgctataaatttccctctacacactgctttgaatgcgtcccagagattctggtatgtggtatctttgttctcgttggtttcaaagaacatctttatttctgccttcatttcgttatgtacccagtagtcattcaggagcaggttgttcagtttccatgtagttgagcggctttgagtgagattcttaatcctgagttctagtttgattgcactgtggtctgagagatagtttgttataatttctgttcttttacatttgctgaggagagctttacttccaactatgtggtcaattttggaataggtgtggtgtggtgctgaaaaaaatgtatattctgctgatttggggtggagagttctgtagatgtctattaggtctgcttggtgcagagctgagttcaattcctgggtatccttgttgactttctgtctcgttgatctgtctaatgttgacagtggggtgttaaagtctcccattattaatgtgtgggagtctaagtctctttgtaggtcactcaggacttgctttatgaatctgggtgctcctgtattgggtgcatacatatttaggatagttagctcctcttgttgaattgatccctttaccattatgtaatggccttctttgtctcttttgatctttgttggtttaaagtctgttttatcagagactaggattgcaacccctgcctttttttgttttccattggcttggtagatcttcctccatccttttattttgagcctatgtgtgtctctgcacatgagatgggtttcctgaatacagcacactgatgggtcttgactctttatccaacttgccagtctgtgtcttttaattgcagaatttagtccatttatatttaaagttaatattgttatgtgtgaatttgatcctgtcattatgatgttagctggtgattttgctcattagttgatgcagtttcttcctagtctcgatggtctttacattttggcatgattttgcagcggctggtaccggttgttcctttccatgtttagcgcttccttcaggagctcttttagggcaggcctggtggtgacaaaatctctcagcatttgcttgtctataaagtattttatttctccttcacttatgaagcttagtttggctggatatgaaattctgggttgaaaattcttttctttaagaatgttgaatattggcccccactctcttctggcttgtagggtttctgccgagagatccgctgttagtctgatgggctttcctttgagggtaacctgacctttctctctggctgcccttaacattttttccttcatttcaactttggtgaatctgacaattatgtgtcttggagttgctcttctcgaggagtatctttgtggcattctctgtatttcctgaatctgaacgttggcctgccttgctagattggggaagttctcctggataatatcctgcagagtgttttccaacttggttccattctccacatcactttcaggtacaccaatcagacgtagatttggtcttttcacatagtcccatatttcttggaggctttgctcatttctttttattcttttttctctaaacttcccttcttgcttcatttcattcatttcatcttccattgctgataccctttcttccagttgatcgcatcggctcctgaggcttctgcattcttcacatagttctcgagccttggttttcagctccatcagctcctttaagcacttctctgtattggttattctagttatacattcttctaaatttttttcaaagttttcaacttctttgcctttggtttgaatgtcctcccgtagctcagagtaatttgatcgtctgaagccttcttctctcagctcgtcaaaatcattctccatccagctttgttctgttgctggtgaggaactgcgttcctttggaggaggagaggcactctgcgttttagagtttccagtttttctgttctgttttttccccatctttgtggttttatctacttttggtctttgatgatggtgatgtacagatgggttttcggtgtagatgtcctttctggttgttagttttccttctaacagacaggaccctcagctgcaggtctgttggaataccctgctgtgtgaggtgtcagtgtgcccctgctggggggtgcctcccagttaggctgcttgggggtcaggggtcagggacccacttgaggaggcagtctgcccgttctcagatctccagctgcgtgctgggagaaccactgctctcttcaaagctgtcagacagggacacttaagtctgcagaggttactgctgtctttttgtttgtctgtgccctgcccccagaggtggagcctacagaggcaggcaggcctccttgagctgtggtgggctccacccagttcgagcttcccagctgctttgtttacctaagcaagcctgggcaatggcgggcgcccctcccccagcctcgttgccaccttgcagtttgatctcagactgctgtgctagcaatcagctcgattccgtgggcgtaggaccctctgagccaggtgtgggatatagtctcgtggtgcgccgtttcttaagccggtctgaaaagcgcaatattcgggtgggagtgacccgattttccaggtgcgtccgtcacccctttctttgactcggaaagggaactccctgaccccttgcgcttcccaggtgaggcaatgcctcgccctgcttcggctcacgcacagtgcgcacacacactggcctgcgcccactgtctggcactccctagtgagatgaacctggtacctcagatggaaatgcagaaatcacccgtcttctgcgtcgctcacgctgggagctgtagaccggagctgttcctatttggccatcttggctcctccccgcatagcagctttatttgtgatagctattgtcagttttgaaccccagctgaggcccaaggggaatgggtggacggggggcagggagctggaagaatactcaagagacagcaggtagatgggacatggcttcattcagccccactctcacagtatcagtgctgcatttatatgcctcacagacaacagtggctcagagccaggtgatgagctttcttatcttatggctacatagctgtgattatataatgtatgaaattgtgcgcctgtgctccaatcctgctgagtcatgcaggatgtttgcctctgcctatgcctgcctggctgcagcacagccatgttccttacagccatgtattcacttatctaaaattcacaaccatcctataagtaagtaccctccatatccttattttccagaatattgttaggaagtggggaagtgttgcgttagccacttaacacttgttcgccaactgggctaataacagcacctgcttcaaaataggttgggaacttcaaattgaataatacatatagagtacccagtccagtgcttagcacattgtgtattctcaataatataattgatgatgatgctgaaaatgattattttatagcagggcaatgatagtccaaatccatgtagtcagatgctagaattaagaggatctaagatatatgggattctttgccatattttactatatatcttagagaagttaaaaataaagagcttgttttgtaaggaaacagtaacaaattttaataaaatactattgaattctggaggcaggcaggaaggtatgcagatttcattcctttaggaaacaggcaaatctactgaattaggaccaaactgtctgcatcagggcctccagatgagaagcctctagttcctcacacctttacagttgtatgagcagaggtggtcagggtataacattagaagatctgttttctgaagacatatttccttgtgtcagaagggcaggcccacagtgcaacactctttagtggcctgggagaagcaggtaactacttatctggataggcaggactgttaactcttcacttaaggtattttccttccagccatcaagacattttttattgttgtcatttgactacacaagtaatttgtgatcttccaaggaaaacagaaaaatgtgatcaaacaagatgagagtatagaagccttacgaccccacctatctattaatgccttcatggatatctttccagaactttttctaagcagttttaaaaagaaacaaaaatgggataatggcacacatacatattgtttgtaaattgatttttttcacctgacaatagattctgaattttttttcatttcagttgatgcatttctgtaacatcgttaatctttgtataggtatatcatcatctatttaactaatcccctaattgtggacatttccaattatttgatattctaacagggcttttctgaccatttttaatcctaccatatgattcaacaaattatcatgactgataattttcttagtggaaactgtctaaaagagaaattgcctagtgaaagggtaggaacattttaaagattttttgatgcatttccaatttcccatcaatgaaggtgtgcaactctcactgtcagtgcacataatgttactttaagataaactccataagggagagagtgtaataaattcatgtattactagtgtatacctttttatctgtaagcagtcaaatagtatgcaaatggggtcactttgtacatctaaattgggattagggtaggcagctcagggtaatcaggtcaaggcagatggatttatcccaagctgaggagcatgaaacattaaccaaaagataaaaatagaagaaatagaagtgaaaagcctactcaaggaaagatgaagcaatcaatagtgtatttttttgctgttgatcttgtaaaattgctcctatctatctatctatctatctatctatctatctatctacctatctgttgatcaagatggtgtcctgctatgttgtccaggctagaatcaaactcctgggctcaagggagcctactgtttccacctctcaagtagctgggactacaggtgctcactactgtgcccagcgatatatgtatcagagtatgttacacaggcaggaatgcagtggcgtgatctcagttcactgcaacctctgcctcccaggttcaagcgatcctcttgcctcaaccccccaagtagctgggattacaggcatgcgccaccatgcccggctaatttttgcatttttgatagagatggggtttcgccatgttggccaggttggtcttgaactcctgacctcaggtgatccaactgctttggcctcccaaagtgctgggattacaggcatatatagttctaaaagaacaaagggggattccattccaagatggcccaataggaacagctccggtctgcagctcccagtgtgattgatgcagaagacggtgatttctgcatttctaattgaagtacctggttcatctcactgggactggctggacagtgggtgcagcccacagagggtgggctgaagcagggtggggcatcgccttacccggaaagcacaaggggtcaggggatttccctttcctagccaagggaagccatgacagactgtacctggaaaatcaggacacttccgcccaaatactgcgcttttccaatggtcttagcaaatggcacaccagaagattatatcccacgcctggttcggtgggtcctatgcccatggagccttgctcactgctagagcagcagtctgagattgacctgcaaggcagcagtctggcagggggagtggtgtccaccattgctgaggcttgagtaggtaaacaaagcaactggggaatctcaaactgggcggagcccatcgcagctgtgcaaggcctgctgcttctgtagaccccacctctgggggcagggcatagctgaacaaaaggcagcagaaacttttgcagacttaaacatccctgtctgatagctctgaagagagcagtggttctcccagcatggtgtttgagctctaagaatagacagactgcctcctgaagtgggtccctgacccccatgtagcctaactgggagatacctcccaataggggccgactgacacctcacacagacaggtgcccctctgggacgaagcttccagaggaaggatcaggcagcaatatttgctgttctgcaatatttgctgtcctgcagcctccgctggtgatacccaggaaacagggtctggagtggacctccagcaaactccaacagaactgcagctaagggacctgattgttaaaaggaaaactaaaaaacagaaaggaatagcatcaacatcaacataaaggacatgcacaccaaaaccccatctgtaggtcaccagcatcaaaaccaaaggtagatagaaccacaaagatggggagaaaccagagcagaaaagctgaaaattctaaaaaccagagcacctcttctcctccaaaggatcacagctcctcaccagcaaaggaacaaagctggatggagaatcactttgatgagctgacaaaagtagtcttcggaaagttggtaataacaaacttctccaagctaaaggaggatgtttgaacccattgcaaagaagctaaaaaccttgaaaaaagattagacaaatggctgactagaataaacagtgtagagaagaccttaagtgacctgatggagctgaaaaccatggcatgagaactacatgacacatgcacaagcttcaatagctgatttgatcaagtggaagaaagagtatcagtgattgaagatcaaattagtgaaataaggtgagaagagaagtttagagaaaaaaacagtaaaaagaaacaaacaaagcctccaagaaatatgggactatgtgaaaagatcaaatctacatttgattggtgtacctgaaagtgacggggagaatggaaccaaattggaaaacacttttcaggatattatccaggagaacttccccaacctagcaaggcagaccaacattcaaattcaggaaatacagagaacaccacaaagatactcctcaagaagagcaaccccaagacacataattgtcagattcaccaaggttgaaatgaaggaaaaaatgttaagggcagccagagagaaaggtcgggttacccacaaagggaagcccatcagactaacagcggatctctcggcagaaactctacaagccagaagagagtgggggccaatattccattcttaaagaaaagaattttcaacccagaatttcatatccagccaaactaagcttcataagtgaaggagaaataaaatcctttacagacaagcaaatgctgagagattttgtcaccaccaggcctaccttacaagagctcctgaaggaagcactaaacatgggaaggaacaaccagtaccagtcactgcaaaaacatgctaaattgtaaagaccatcgatgctaggaagaaactacatcaactaacgggcaaaataaccagctaacatcagaatgacaggatcaaattcacacataacaatattaaccttaaatgtaaatgggctaaatgccccaattaaaagacccagactggcaaattggataaagagtcaagacccatcagtgtgctgtattcatgagacccatctcatgtgcagagagacacataggctcaaaataaagagatggaggaagatctaccaagcaaatggaaagcaaaaaaaaaaaaaaaaaaaaaagcaggggttgcaatcctagtctcttataaaacacactttaaaccaacaaagatcaaaagagacaaagaaggtcattacataatggtaaagggatcaattcaacaagaagaactaactatcctaaatatatatgcacccaatacaggagcacccagattcataaagcaaatccttagagacctacaaagagacttagactcccacacaataataatgggagattttaacaccccactgtcaatattagacagatcaacgagacagaagtttaacaagggtgtccaggacttgaactcagctctgcaccaaacggacctaatagacatctacagaactctccaccccaaatcaacagaatatacattcttctcagcaccacattgcacttattccaaaatagttgcaagtaaagcactcctcagaaaatgtaaatgaacagaaatcacaacaaactgtctctcagaccacagtgcaatcaaattagaactcaggattaagaaactcactcaaaactgcaaaactacatggaaactgaacaacctgctcctgaatgactactgcgtaaataatgaaatgaaggcagaaataaagatgttctttgaaaccaatgagaacaaagacacaatgtaccagagtctctgggacacatttaaagcagtgtgtagagggaaatttatagcaccaaatgcccacaagagaaaccaggaaagatctaaaatcgacaccctaacatcacaattaaaagaactagagaagcaagagcaaacaaattcaaaagctagcagaagacaagaaataactaatatcagagcagaactgaaggagatagagacacaaaaaacccttcaaaaaatcaatgaatccaggagctggttttttgaaaggagtgacaaaattgatcgaccattagcaagactaataaagaagaaaagagagaagactcaagtagatgcaataaaaaatgataaaggggatatcaccactgatcctacagaaatacaaactaccatcagagaatactacaaacacctctatgcaaataaactagaaaatctagaagaaatggataaattcatggacacatacccccttccaagactaaaccaggaagaagttgaatctctgaatagaccaataacaggatctgaaattgaggcaataattaatagcctaccaaccaaaaaaagtccaggaccagatggattcacagctgaattttaccagaggtacaaagagaagctggtgtcattccttctgaaactattccaatcaatagaaaaagagtgaatcctccctaaatcattttatgagaccagcaacatcctgataccaaagcctggcagagacacactaaaaaaagagaatttaagaccaatatctctaatatgatgaacatagatgcaaaaatcctcaataaaatactggcaaatcgaatccagcagcacatcaaaaagcttatccaccacgatcaagttggcttcatccctgggatgcaaggctggttcaacatatgcaaatcaatagacgtaatccatcacataaacagaaccaacgaaaaaaaacacacgattatctcagtagatgtagaaaaggcctcggcaaaattcaacagccttcatgctaaaaactctctataaactagatattgatggaatgtatctcaaaataataacagctatttatgacaaacccacagccaatatcatactgaatgggaaaaactggaagcattccctttgaaaactggcacaagacagggatgccctctctcaccactcctattcaacatagtgttggaagttctggccagggcaatcaggcaaaagaaaggaataaagtgtattcaattaggaaaagagggagtcaaattgtccgtctttgcagatgacatgattgtatatttagaaaaccccatcatctcagcccaaaatctcctcaagctgataagcaacttcagcaaaatctcaggatacaaaatcaatgtgcaaaaatcacaaccattcctatacaccaataacagacagacagagagccaaatcatgagtgaactcccattcacaattgcttcaaagagaataaaatacctaggaatccaccaagggatgtgaaggacctcttcaaggacagctacaaaccactgctcaacaaaataaaagaggacacaaacaaatggaagaacattccatgctcatggatataaagaatcaatatcgtgaaaatggccatattgcccaaggtaatttatagattcaatgccatccccatcaagctaccaatgactttcttcacaggattggaaaaaactactttaaagttcgtatggaaccaaaaaagagcccgcattgccaagacaatcctaagcaaaaagaacaaagctggaggcatcatgctacctgacttcaaactatactacaaggatacagtaaccaaaacagcatggtactggtaccaaaacagagagatagaccaatgcaacagaacagaggtctaagcaataacaccacacatctacaaccatctgatctttgacaaacctgacaaaaacaagaaatggggaaaggataccctatttaataaattgtgctgggaaaactgggtagccatatgtagaaagctgaaactggatcccttccttacacattatacaaaaattaattcaagatggattgaagacttaaatgttcgatctacaaccataaaaaccctagaagaaaacctaggcaataccattcaggacacaggcatgggaaaggacttcatgactaaaacaccaaaagcagtggcaacaaaagccaaaattgacaaatgggatctcattaaactaaagagcttctgcacagcaaaagaaactaccatcagagtgaacaggcaacctacagaatggtagaaaaattttgcaatctacccatctgacaaagggctaatatccagaatctacaaagaagttaatcaaatttacaagaaaaaaacaaccccatcaaaaagtgggcaaaggatatgaacagacacttctcaaaagaagacatttatgcagccaacagacacatgaaaaaatgctcatcgtcactggtcatcagataaatgcaaatcaaaaccacaatgagataccatctcacaccagttagaatggcgatcattaaaaagtcaggaaacaacagatgctggagaggatgtggagaaataggaatgcttttacactgttgttgggagtgtaaactagttcaaccattgtggaagacagtgtggtgattcctgaaggatctggaactagaaataccagttgacccagcaatcccattactgggtatacacccaaaggattataaatcatgctactataaagacacatgcacacgtatgtttattgcggcactattcacaatagcaaaaacttggaacaaacccaaatgtccatcaatgataggctggattaagaaaatgtggcacatatacaccatggaatactatgcagccataaaaaaggatgagtaaatgtcctttgtagtgacgtggatgaaggtggaaaccatcattctgatcaaaccatcacaaggacagaaaaccaatcaccgcatatcctcactcataggtggc

SEQ ID NO: 10689 - DNA, 8115 bp, Homo sapiens
  SITE (3295): n equals a,t,g, or c
tttttttttattatactttaagtttaaggatacatgcgcccaacgtgcaggtttgttacatatgtatacatgtgccacgttggtgtgctgcacccaataacttgtcatttaacattaggtatatctcctaatgctatccctccccaccaacccacaacaggccctggtgtgtgatattccccttcctgtgtccatgtgttctcattgttcaattcccacctatgagtaagaacatgtggtgtttggttttttgtccttgcgatagtttgctgagaatgatggtttccagcttcatccatgtccctacaaaggacatgaactcatcattttttatggctgcatagtagtccatggtgtatatgtgccacattttcttaatccagtctatcatttttggacatttgggttggttccaagtctctgctattgtgaatagtgccacaataaacatatgtgtgcgtgtctctttatagcagcatgatttataatcctttgggtacatacccagtaatgggattgctgggtcaaatggtatttctagttctagatccctgaggaattgccacactgacttccacaatggttgaactagtttacagtcccaccaacagtgtaaaagtgttcctatttctccacatcctctccagcacctgttgtttcctgactttttaatgatctccattctaactggtgtgagatggtatctcattgtggttttgatttgcatttctctgatggtcagtgatgatgagcattttttcatgtgtcttttggctgcataaatgtcttcttttgagaagtgtctgttcatatccttcgctcactttttgatggggttgtttgtttttttcttgtaaatgtctttcagtttattgtagattctggatattagccctttgtcagatgagtagattgcaaaacttttctcccattctgtaggttgcctgttcattctgatggtagtttcttttgctgtgcagaagctctttagtttaattagatcctatttgtcaattttggcttttgttaccattgcttttggtgttttagacatgaagttcttgcccatgcctgtgtcctgaatggtattgcctaggttttcttctagggtttttatggttttaggtctaaaatttaagtctttaattcatcttgaattaatttttgtataaggtttaaggaagggatccagtttcagctttctccatatggctagtcagttttcccagcaccatttattaaatagggaatccattccccatttcttgtttttgtcaggtttgtcaaagatcagatagttgtggatatgcggcattatttctgagggctgtgttctgttccattggtctatatctctgttttggtaccagtaccatgctgttttggttactgtagccttgtagtatagtttgaagtcaggtagtgtgatgcctccagctttgttcttttggcttaggattgacttcgcaatgcgggctctgttttgattctatatgaactttaaagtagttttttccaattctgtgaagaaagtcattggtagcttgatggggatggcattgaatctataaattaccttgggcagtatggccattttcacgatgttgattcttcctacccatgagcatggaatgttcttccatttgtttgtatcctcttttatttcattgagcagtggttttgtagttctccttgaagaggtccttcacatcccttgtaagttggattcctaggtattttattctctttgaagcaattgtgaatggaagttcactcatgatttggctctctgtttgtctgttattggtgtataagaatgcttgtgatttttgcacattgattttgtatcctgagactttgctgaagttgcctatcagcttaaggagattttgggctgagatgatggggttttctaggtatacaatcatgtcatctgcaaacagggacaatttgacttcctcttttcctaattgaataccctttatttccttctcctgcctgattgccctggccggaacttccaacactatgttgaataggagtggtgagagaggacatccctatcttgtgccagttttcaaagggaatgcttccagtttttgcccattcattatgatattagctgtgggtttgtcatagatagctcttattattttgagatacatcccatcaatacctaatttattgagagtttttagcatgaagggttgttgaattttgtcaaaggccttttctgcatctattgagataatcacgtggtttttgtctttggttctgtttatatgctggattacatttattgatttgcatatgttgaaccagccttgcatcctagggatgaagctcacttgatcatggtgcataagctttttgatgtgctgctggattcggtttgccaatattttattgaggatttttgcatcgattttcatcagggatattggtctgaaattctctttttttgttatgttgctgctaggctttggtatcaggatgatgctggcctcataaaatgagttagggaggattccctctttttctattgattggaatagtttcagaaggaatggtaccagctcctccttgtacctctggtagaatttggctatgaatccatccggtcctggactttttttggttggtaagctattaattattgcctcaatttcagagcctgttattggtctattcggagattcaacttcttcctggtttagtcttgggagggtgtatgtgtcgaggaatttatccatttcttttagactttctagtttatttgtatagaggtgtttacagtattctctgatggtagtttgtatttctgtgggatcagtggtgatatccgttttatcattttttattgcgtctatttgattattctctcttttcttctttattagtctttctagtggtctatcaattttgctgatcttttcaaaaaaccagctcctggattcattgattttttgaagggtattttgtgtctctatttccttcagttctgctctgatcttagttatttcttgccttctgctagcttttgaatgtatttgctcttgcttctctagttcttttaattgtgatgttagggtgtcaattttagatctttcctgctttctcttgtgggcatttagtgctataaatttctctctacacactgctttgaatgtgtcccagagattctggtatgttgtgtctttgttctcgttggtttcaaagaacatctttatttctgccttcatttcgttttgtacccagtagtcattcaggagcaggttgttcagtttccatgtangtgagcagttttgagtgagtttcttatcctgagttctagtttgattgcactgtggtgtgagagacagtttgttataatttctgttcttttacatttgctgaggagagctttacttgcaactatgtggtcaattttggaataggtgtggtgtgatgctgaaaaaaaatgtatattctgttgatttggggtggagagttctgtagatgtctattaggtctgcttggtgcagagctgagttcaattccaggggatccttgttaactttctgtctcgctgatcggtctaatgtggatagtggggtgttaaagtctcccattattattgtgtgggagtctaagtctctttgtaggtcactcaggacttgcttttttttttttaactcatatttgtttttatttataggtaactaccacatgaattataaagacaacaaaggatgtcagaatgaacatggataggtgtatgcatactacggctaaggagaaacaatgttcctacatattatgggtagtgagaacattatctgtataacagggaactgtgattatttaaaaatatgcagaacttatttcatctgtgctttaaaaataactgtatacagtgttataagttgaaaagaactcaaaataactaataccaaatatacacctatgtattagaattcaaaaaagctgctttctgtgaagtcaatcagctatattaaaaaatgacacaaatccaaaacaagatgcatgttatatataaagggacattgtaagtttccttgctgcattaaacccatggtttaatccatgaaatttccttttaattatcatttagacagaagcatgcaaatagtctcaggatctacttaagaacctttcccaaatccactagttacactccccttttcaggaactaagcaggtattcgggtagctgcttcctcctctgcatcagctcggtttgcattaatttctgcaagtgttcagccaaaccatgcccattcatcattgcggggaacagcaatctgctctcccacatcgtatataacaatctgtccttcagaatcacccacagcaatctctctgccagaatgggtccatctcacatgattaagagcaggattaccctccacagaaatgctggcagttggtacctctgtgtcattattgagattccacaaatccaatctccccatgccatccacacaggcaaacagggctgggtgggtaggtgaccacataacatcataaacatagtctgcattgtcttcaaatgaatacaaaggcttgttattcttagttgtccaaagctttactgtccagtcaaacgatgaagtgacataaagatgtgagaagtctactgctccaacagctgcatgacaatggatgccagtgattggtccttgatgcccctcaaacatctcactgattccagctttgctgccatggcggcatgctgtgtacacagaacttcttcactcccaacaacaaagttgttgacgtctccaacagggaaggacatagatgtcacagctactgcttttgactgtttatgaaccaactccatgctatcctgtggatgggaaagcatgtccagactccatgaacaaatttttccatcagtagagatgctaatcagattgtgagcattttgtgttccaacaacgtttacacaatatacagggtgtgtgtgtgcagctgctgacagtggagttctttgcactggagttcttttattgctacggttatcccaaagcacagtttggcctgaatatgtaccaccaacaacaagatttggatgaaattttgcaaatgtggcagacatcacagctgactggcagtgaaacacatactctggggtagtttttttgtatttcatattccatacaagggccacaccatcaggctcatgaggggcatcttcattgttgttataggaagccacgagtaactccggatactgagatgaccaatccaaacaactaacaacccgatgctttgaccaaggttcgtcaaaaaattgtcaatttaatgacagtttagcacctgcttgaatctctccttctttgtcttccaaatctctcccactatagtgaaagaagatgttaatctgctcagaaagagctctttctacaattcttgtagaatggtcaaagaaacttaaaaattcctcagagtgcaagatttgttgcttttcttcttcagtcagctcatggggggagctttactatcattttcctcatctttctttaaagttttctcttcttcaggttcaataggtagtttaggagccactacatcatcatcttcctcttcatcttctttgggttgagccataactggagtctgagtttcctttgtatacgtgacaatttctcgaggaggaaagtcgacttgcgtgattttagccattccaagtttaataggtcctcgtctagatcccacggcgccatctccagagtcttggcttccagcttcacttggagtgctcacagatttggaggatggagacataggaggagggacaatgggggattctggagttagccccatgctttggagcaatgcttcagcttctcttcttcttttttcaagatctgattcttcttgcacaggagcaacagcttccttcttctgatctgtttctttttttttcctttcttcttcttttctcttcttttcctctctgatttgggccagttgctgcttcttacgttccaactcagcctttaattcacttttgtctgacatgtttgtgacctgtcaggtgactggatggggaagagtcctcccgcctgcaactttccggtaacgtccctcggctaagcccccaacaccaaccaggacttgctttatgaatctaggtgctgctgtattgggtgcatatatatttaggatagttagctcttcttgtttaattgatccctttaccattatgtaatggccttctttgtctcttttgatctgtgttggtttaaagtctgttttatcagagactaggattgcaacccctgccttttttttgttttccatttgcttggtagatcttcctccatccatttattttgagcctatgtgtgtctctgcatgtgcaatgcgtttcctgaatacagcacactgatgggtcttgactctttatccaatttgccagtctgtgtcttaattggagcacttagcccattcacatttaaggttaatattgctatgtgtgaatttgatcctgtcattatgatgttagctagtaattttgctcattagttgatgcagtttcttcctagcctggatggtctttacaatttggcatgtttttgcagtggctggtaccggttgttcctttccatgtttactgcttccttcaggagctctttcagggcaggcctggtggtgacaaaatctctcagcatttgcttgtctgtaaagtattttatttctccttcacttatgaagcttagtttggctggatatgaagttctgggttgaaaattcttttctttaggaatgttgaatattggcccccactctcttctggcttgtagagtttctgccaaaagatcagctgttagtctgatgggcttccctttgtgggtaacccgacctttctctctggctgccattaacattttttccttcatttcaactttggtgaatctgacaattatttgtcttggagttgccgttctcaaggagtatctttgtggcattctctgtatttcctgaatttgaatgttggcctgccttgctagattggggaagttctcctggataatatcctgcagagtgttttccaacttggttcccttctccccgtcactttcaggtacaccaatcagatgtagatttggtcttttcacatagtcccttatttcttggaggctttgtttgtttctttttattcttttttctctaagcttctcttctcgcttcatttcattcatttgatcttccatcactgataccctttcttccagttgattgcatcagttactgaggcttgtgcattcatcacatagttctcgtgccatggttttcagctccattgggtcctttaaggacttctctgcattggttattctagttagccattcgtctaattttttttcaaggtttttaacttctttgccatgggttcgaacttcctccattagctcggagtagtttgatcgtctgaagccttcttctctcaactcgtcaaagtcattctccatccagctttgttccattgctgctgaggagctgcattcctttggaggaggagaggcgctctgctttttagagtttccagtttttctgctctgttttttccccatctttgtggttttatctacctttggtctttgatgatggtgatgtacagatggggttttgtgtggatgtcctttctgtttgttagtttcccttctaacagtcaggaccctcagctgcaggtctgttggagtttgctggaggtccactccagaccctgtttgcctgggtatcagcagcggagtctgcagaacagcagatactggtgaacagcaaatgttgctgcgtgatcgttcctctggaagttttgtctcagaggagtacccggccatgtgaggtgtcagtctgcccctactggggggtgcctcccagttaggctactcgggggtcagggacccacttgaggaggcagtctatccattctcagatctcaagctgtgtgctgggagaaccactattctcttcaaagctgtcagacagggacacttaagtctgcagaggtttctgctgccttttgtttcgctatgccgtgcccccagaggtggagtctacagaggcaggcaggcctccttgagctgtggtgggatccacccag

SEQ ID NO: 10690 - DNA, 12135 bp, Homo sapiens
tcccacctatgagtgagaacatgtggtgtttggttttctgtctttgtgatagtttgctgagaatgatggtttccagcttcatccatgtccctacaaagcacatgaactcatcattttttatagctgcatagtattccatggtgtctacgtgccacattttcttaatccagtctatcactgatggacatttgggttggttccaagcccgctattgtgaatagtgccaccataaacatacgtgtgcatgtgtctttatagcagcatgatttacaatcctttgggtatatacccagtaatgggatggctgggtcaaatggcatttctagttctagatgcttgaggaatcaccacactgtcttccacaatggttgaactagtttacagtcccaccaatagtgtaaaagtgttcctatttctccacatcctctccagcacctgttgtttcctgactttttaatgatcactgttctgactggcgtgagatggtttctcattgtggttttcatttgcatttctctaatgaccagtgataatgagcattttttcatgtgtctgttggctgcataaatgtcttcttttgagaagtgtctgttcatctcctttgcccagtttttgatagggttgattttttttcttgtaaatttgtttaagttctttgtagattctggatattagccctttgtcagatgagcagattgtaaaaattttctcccattctttaggttgcctgttcactctgatggtagcttcttttgctgtgcagaagctctttagtttaattagatcccattggtcaattttggcttttgttgccattgcttttggtgttttagtcatgaagtccttgcccatgcctatgtcctgaatggtattgcctaggttttcttataagcttgttatggttttgagtctaacatttaagtctttgatctatcttgaattaatttttgtataaggtgtaaggaagggatccagtttcagctttctacatatggctagccagttttcccaacacgctttattaaataggaaatcttttccccatttcttgtttttgtcagatttatcaaagatcagatggttacaggtgtgtggtgttatttctgagggctctgttctgttccattcatctatatatctgttttggtaccagtaccatgctgttgtggttactgtaggcttgtaatatagtttgaagtcaggtagcctgatgcctccagctttgttctttttgcttaggattgtcttggcaatgcaggctcttttttggttccatatgaattttaaagtagttttttccaattctgtgaagaaagtcattggtagcttgatggagatggcattgaatcaataaattaccttgggcagtatggccattttcacaatattgattcttcctatccatgagcatggaatgttcttccatttgtttgtgtcctcttttatttcattgagcagtggtttgtagttctccttgaagaggtccttcacatcccttgtaaattgtattcctaggtatttaattctctttgtagcaattgtgaatgggagttcactcatgatttggctgtctgtttgtctgttattggtgtataggaatgcttgtgatttttgcccattgattttgtgtcttcagactttgctgaagttgcttatcagcttaagaagattttgggctgagacaatggggttttctaaatatacaatcatgtcatctgcaaacagggacaatttgacttcctcttttcctaactgaatacactttatttctttctctttcctgattgccctggccagaacttccaacactatgctgaatagcagtagagagagagggcattcttgtcttgtgccggttttcaaatatggtgatttggtttttgttgaattgtttaatttccttatagattttggataacaggctttgttacacgcatcttttgtgaatatattctcctattctctggttgtctgtttatacttagttttgttttttttttttcctctgcagaagctccttaatttattccacttatcaattttggtttttgttacaattgctttcggggtcttagtcataacttcttcaccaaaattgatgtccaacatggtatttcctaagttttcttattttttttttaggtctacatttaagtctttagtccatcttgagttattttttgtatagggtgaaaagaagggtgccagttctaatctgctgcatatggctagccagttattccagcatcatttattcaacaggaaatattttccacattgtttgttattgttgactttgttgaagaacatgtggttgtacgtgtgtggctttatttctgggttatataatacgttccattggtctacgtgtctgtttttgtgccagtaccatattattttggttactatagccttgtagcatattttaaagtcagttaatatgatgcccctagctttgttcttttgcttagagttcctttggctattcatgccctttttttgttccatatgaattttagaataatttttttaattactggaaaaatgacattttaattacgggaaaaatgacattggtggtttaataagaaaaatagtgaatctttaaattgtaaggtcattttaatgatattgattctttttatccatgagaatggaatgtctttccttttgttttcattaccgctaatttttttcagcagtgtttggtaattttcattgtagagacctttcacttccttggtaagctgtatttctaggtattttattttttgtggcttttgtaaatggcattgtattcttgatttggctctcagcttggaatttattgttatatagaaaagctactaatatttgtacactaattttttatccttaaattttactgaaattgttagtcagttctacgagccctctgacagagtctatgaggttttctaggtatagaatcatattgtctgtgaagagagttagttttacttcctgtcttcttatttggatgctttttatttctttctcttgcctgattgctctggctaggactttcaatactatattgattaagagtggtgtgagtgggaatccttgtcttgttctagttctcaagagtaatggttccagcttttgcctgttcagtataatgttggccacggattttcatatatggctttaatattttaagaagccactatgttaaactaaattcatgcactaggccttaacaaaccagaccaaaccaaaaagagtcactcatactaactacaacataatcaaactaaaagttaaaagaaaaaaatatcaaaacagaacaagttttttttttctctctctcttaaaaatactggagggaaggtggaacaatatgacaacatagaaggctccaataatcatcccccctgacaggacaccaatttaacaactatctgttagaaaaaaaaacagtcttgaataaacaataccatccctcccccatctcttgcccctacctctgcagctactgtgtgctgcagaaagcatttccgagagctgggggagagaacacacagcaattgtgaggcattgaactcagtgctgtcctgttacagcagaaaggaaagccagaacagactcagctgatacctgcccacaaatggagcatttaaaccagccctagaaagagagaattgtcaatccaggagatggaacttgagttcccgcaagcctctcccccatgggctaacatgctccagagtatctaaatactcttaaaaggcagcctagatcacaaggactccaacttttaggtgagtcctagtgctgaactgggcccagagtcagtagacagggtgggtggggaacgtgacctattgagacatcagctggtgatggctaagggagtgctggcacctcccctccccaaaacctcaggctgcacagctcacagctccaaaagagatcctttccttccacttgaggcaaggagagagaagagtcaaaaagactttgtcttgcattttggatacccagtcacccacagcaagatagggcaccagtcagagtcatgaggccctggttctagtccctagctccctgatgatatttctagacaactctggcccagaaaggctgtgttgaagagaaggacccagtcctagcagcatccatcacctgatgaataaatagtccttaagccctgaataatcaacggtgatactaagatactaaattgcaaactttgagtgagactctgagacttgcaggcttcgggtaccaacctggccacagaggtgcaaagttcaggacgagaggggagcccacttccctaatagtgagttataggccaggcagcattaaatacaagctgcctgaggcccttaagccttaatggaccatcagtggtagtcttgtagaacttcccaggggtctgtcatggtggtggccatggagtgagactcttctgcctttggaaagggtaggaagagtgggaaggactgcatcttgtagtttgagtgccatctcagccacagtaccacaaaacaccaggtatacttctaaagattttgactctagtccctggctcctgacaggacttttggactcacctatggcctagaggacctcaccatcctggagggaaggacacaagctcggctggcgttgccacctgctgagtgcagagccttagggttttgagcaaacatatggtattgtttattcaagactgttttttttctaacagatagttgttaaacaaagcatagttacagaagcccatgggtgggatcaggtgctgtgttggcttcaggtttgaaccagtgcagtcatagtggtggaggccacagggttgcttgtgtcacccacctgcagcttcagatggctcaaaagagagagactttgtttgtttgagagaaagtttgaagaaagaacaagagcatctgtctggtaatgcagagaattctccaaaattttgtccgagaacatcacgatggtaactcaatgaatctgcaagaactgcagcattactgagatttcattatcacctaaagcagatacagcttagacaacacccaaattctttcaaataactgaaaaacctaccaagaaggactggtacatacaagctcagactgcaaggactacaataaatacctaattcatcaatgcccagatacagatgaacaagtatcaagaaaatccaagaaaacataacctcaccagatacactaaataaggcaccagagaccaatcctaaagaaacagaaatatgtaacctttaagacagagaattcaaaatagctctgtttaggaagctcaaagaaattcaagataacacagaaaaagaattcagaattctatcagataaagctaacaaaaagattgaaataattttttaaaaatcaagaagacatcttggagtttaacaatccaattggcatgctgaaaaatgcatcaaagtcttttaataacagaactgatcaaactaaagaagaattagtgagcttaaagatacgctatttaaaaatacacagtcagaggagacaaaaataaaaataaaaagcaatgaagcactgctataagatctaaaaaacaaccccaaaatggaaagtctaagagttactggccttaaagaggaggtagagaaagagataggatagaaagtttattcaaaggaataaaaacagagaacttctcaaacctagagaaagatattagtatctaaggttatggaacatcaagcagatttaatccaaagaagactacctcaaggcatttaaggataaaactcccgaaggttaaggatttttttaaaaaaagtattctaaaagcagcaacagaaaagaaagaaatgatataccatggagctccagtatgtatggcagcagacttttcagtgcataccttgcattccagaagagagtggcatggcatatttaaacggctgaaagaaagaagattttaccctagaatagtgtatctgtgaaaaaaataaataaataaaaataaaaataaaaataaatccttcaaaaatggagaaataaagactttctcagacaaatggtgagggattttgtcaacacaaagcctgtcctacaagaaatgctagagggagttctttatcagaaagaaatagttataaataagcaataagtaagcacctcaagatacaaatttctctggtaacagtaagtacacagtaaaacacagaatattgcaccactctaattgttgtgtataaactactctttttttatgctatccctccctcctcccccaccccacaacagtacccagagtgtgatgttccccttcctgtgtccatgtgttctcattgttcagttcccacctatgagtgagaatttgcggtgtttggttttttgttcttgcaatagtttactgagaatgatgatttccaatttcatccatgtccctacaaaggacatgaactcatcattttttatggctgcatagtattccacggtgtatatgtgccacattttcttaatccagtctatcattgttggacatttggcttggttccaagtctttgctattgtgaatagtgccacaataaacatatgtgtgcatgtgtctttatagcagcatgatttatagtcctttgggtatatacccagtaatgggatggctggacaaatggtatttctagttctagatccctgaggaatcgccacactgacttccacaatggttgaactagtttacagtccatccaacagtgtaaacgtgttcctatttctccacatcctctccagaacctgttgtttcatgactttttaatgattgccattttaactggtgtgaaatggtatctcattgtggttttgatttgcatttctctgatggccagtgatgatgagcattttttcctgtgttttttggctgcataaatgtcttcttttgagaagtgtctgttcatgtcctttgcccactttttgatggggctgtttgttttttcttgtaaatttgtttgagttcagtgtagattctggatattagccctttgtcagatgagtaggttgtgaaaattttctcccattttgtaggttgcctgttcactctgatggtagtttcttttgctgtgcagaagctctttagtttaattagatcccatttgtcaattttggcttttgttgccattgtttttggtgttttagacatgaagtccttgcccatgcctatgtcctgaatggtattgcctaggttttcttctagagtttttatggttttaggtctaacgtttaagtctttaatccatcttgaattgatttttgtataaggtgtaaggaagggatccagtttcagctttctacatatggctagccagttttcccagcaccatttattaaatagtgaatcctttccccatttcttgtttttgtcaggtttgtcaaagatcagatagttgtagataagcggcattatttctgagggctctgttctgttccattgatctatatctctgttttggtaccagtaccatgctgttttggttactgtagccttgtagtatagtttgaagtcaggtagtgtgatgcctccagctttgttcttttggcttaagattgacttggtggtgcaggctcttttttggttccatacgaactttaaagtagttttttccaattctgtgaagaaagtcatgtgtagcttgatggggatggcattgaatctgtaaattaccttgggcagtatggccattttcacaatattgattcttcctacccatgagcatggaatgttcttccatttgtttgtatcctcttttatttcattgagcagtggtttgtagttctccttgaagaggtccttcacatcccttttaagttggattcctaggtattttattctctttgaagcaattgtgaatgggagttcactcatgatttggctctctgtttgtctgttgttggtgtataagaatgcttgtgatttttgtccattgattttgtatcctgagactttgctgaagttgcttatcagcttaaggagattttgggctgaggcaatggggttttctagatatacaatcatgtcatctgcaaacagggacaatttgacttcctcttttcctgattgaataccctttatttccttctccttcctaattgccctggccagaacttccaacactatgttgaataggagtggtgagagagggcatccctgtcttgtgccagttttcaaagggaatgtttccagtttttgcccattcagtatgatattggctgtgggtttgtcatagatagctcttattatttttagatacgtcccatcaatacctaatttattgagagtttttagcatgaagggttgttgaattttgtcaaagtccttttctgcatctattgagataatcatgtggtttttgtctttggttctgtttatatgctggattacatttattgatttgcgtgtattgaaccagccttgcatcccagggatgaagcccacttgatcatggtggataagctttttgatgtgctgcttgattcggtttgccagttttttattgaggatttttgcatcaatgttcatcaaggatattggtctaaaattctcttttttggttgtgtctctgcccggctttggtatcaggatgatgctggcctcataaaatgagttagggaggattccttctttttctattgattggaatagtttcagaaggaatggtaccagttcctccttgtacctctggtagaattcggctgtgaatccatctggtcctggactctttttggttggtaagctattgattatgccagaatttcagctcctgttattggtctactcagagattcaacttctttctggtttagtcttgggagagtgtatgtgtcgaggaatgtatccatttcttctagattttctagtttatttgcatagaggtgtttgtagtattctctgatggtagtttgtgtttctgtgggattggtggtgatatcccctttatcattttttattgcgtctatttgattcttctctctttttttctttattagtcttgctagcggtctatcaattttgttgatcctttcaaaaaaccagctcctggattcgttaattttttgaatggttttttgtgtcttctatttccttcagttctgctctgattttagttatttcttgccttctgctagcttttgaatgtgtttgctcttgctttactagttcttttaattgtgatgttagggtgtcaattttggatctttcctgctttctcttgtgggtatttagtgctataaatttccctctacacactgctttgaatgcatcccagagattctggtatgttgtgtctttgttctcgttggtttcaaagaacatctttatttctgccttcatttcgttatgtacccagtagtcattcaggagcaggctgttcagcttccatgtagttgagcggttttgagtgagattcttaatcctgagttctagtttgattgtgctgtggtctgagagatagtttgttataatttctgttgttttacatttgctgaggagagctttacttccaagtatgtggtcaattttggaataggtgtggtgtggtgctgaaaaaaatgtatattctgttgatttggggtggagagttctgtagatgtctattaggtccacttgatgcagagctgagttcaattcctgggtatccttgttgactttctctctcgttgatctgtctaatgttgacagtggggtgttaaagtctcccattattattgtgtgggagtctaagtctctttgtaggtcactcaggacttgctttatgaatctgggtgctcctgtattgggtgcatatatatttaggatagttagctcttcttgttgaattgatccctttaccattaattaatggccttctttgtctcttttgatctttgttggtttaaagtctgttttatctgagactaggattgcaacccctgcctttttttgttttccatttgcttgatagatctccctccatccttttattttgagcctatgtgtgtctctgcccatgagatgggtttcctgaatacagcacactgatgggtcttgactctttatcccatttgccagtctgtgtcttttattggagcatttagtccatttacatttaaagttaatattgttatgtgtgaatttgatcctgtcattatgatgttagctggttattttgttcgttagttgatgcagtttcttcctactctctatggtctttgcatcttggcatgattttgcagcggctggtactgggtgttcctttccatgtttagtgcttccttcaggagctcttttagggcaggcctggtggtgacaaaatctctcagcatttgcttgtctgtgaagtattttatttctccttcacttatgaagcttagtttggctggatatgaaattctgggttaaaaattcttttctttaagaatgttgaatattggaccccactctctactggcttgtagagtttctgccaagagatccgctgttagtctgatgggcttccctttgagggtaacccgacctttctctctggctgcccttaacattttttccttcatttcaactttggtgaatctgacaattatgtgtcttggtgttgctctcctcgaggagtatctttgtggcgttctctgtatttcctgaatctgaatgttggcctgacttgctagattggggaagttctcctggataatatcctgcagagtgttttccaatttggttccattctccctgtcactttcaggtataccaatcagacgcagatttggtcttttcacatagtcccatatttcttggtggctttgctcgtttctttttactcttttttctctaaacttcccttctcacttcatttcattcatttcgtcttccatcgctgataccctttcttccagttgatcgcattggctcctgaggcttctgcattcttcatgtagttctcgagcctaggttttcagctccatcagctcccttaagcacttctctgtattggttattctagttatacattcttctaaatttttttcaaagttttcaacttctttgcctttggtttgaatgtcctcctgtagctcggagtaatttgatcatctgaagccttcttctctcagctcgtcaaagtcattctccatccagctttgttctgttgctggtgaggaactgcattcctttggaggaggagaggtgctctgctttttagagtttccagtttttctgctctgttttttccccatctttgtcgttttatctacttttggtctttgatgatggtgatgtacagatgggtttttggtgtggatgtcctttctgtttgttagttttccttctaacagacaggaccctcagctgcaggtctgttggagtacccggccgtgtgaggtgtcagtctgcccctgctgggggtgcctcccagttaggctgctcaggggtcagggatcagggacccacttgaggaggcagtctgcgcattctcagatctccagctgcgtgctgtgagaaccactgctctcttcaaagctgttagacaggaacatttaagtctgcagaggttactgctgtctttttgtttgtctgtgccctgccccaaggtggagcatacagaggcaggcaggcctccttgagctgtggtgggctccacccagttggagcttcctggctgctttgtttacctaagcaagcctgggcaatggcaggcgcccctcccccagccttgctgccaccttgcagtttgatctcagactgctgtgctagcagtcagcaagactctgtgggcgtaggaccctctgagccaggtgcggaatataatctcctggtgcgccgttttttaagcccatcggaaaagcacaatatttgggtgggagtgacccaattttccaggtgccgtctgtcaccactttctttgactaggaaagggaactccctgatcccttgtgcttcccgagtgaggcaatgcctcaccctgcttcggctcgtgcacggtgcgtgcacccactgacctgctcccactgtctggcactccctagtgagatgaacctggtacctcagatggaaatgcagaaatcacccgtcttctgcgtcgcttacgctgggagctgtagaccggagctgttcctatttggccatcttggctcctcccccgatttctcttttttt

SEQ ID NO: 10691 - DNA, 5479 bp, Homo sapiens
tgtgatttttttttttttttattatactctaagttttagggtacatgtgcacattgtgcaggttagttacatatgtatacatgtgccatgctggtgcgctgcacccactaatgtgtcatctagcattaggtatatctcccaatgctatccctcccccctcccccgaccccaccacagtccccagagtgtgatattccccttcctgtgtccatgtgatctcattgttcaattcccacctatgagtgagaatatgcggtgtttggttttttgttcttgcgatagtttactgagaatgatggtttccaatttcatccatgtccctacaaaggatatgaactcatcattttttatggctgcatagtattccatggtgtatatgtgccacattttcttaatccagtctatcattgttggacatttgggttggttccaagtctttgctattgtgaatagtgccgcaataaacatacgtgtgcatgtgtctttatagcagcatgatttatagccctttgggtatatacccagtaatgggatggctgggtcaaatggtatttctagttctagatccctgaggaatcgccacactgacttccacaatggttgaactagtttacagtcccaccaacagtgtaaaagtgttcctatttctccacatcctctccagcacctgttgtttcctgactttttaatgatcgccattctaactggtgtgagatgatatctcacagtggttttgatttgcatttctctgatggccagtgatggtgagcatttcttcatgtgttttttggctgcataaatgtcttcttttgagaagtgtctgttcatgtccttcgcccactttttgatggggttgtttgtttttttcttgtaaatttgtttgagttcattgtagattctggatattagccctttgtcagatgagtaggttgtgaaaattttctcccatgttgtaggttgcctgttcactctgatggtagtttcttttgctgtgcagaagctctttagtttcattagatcccatttgtcaattttggcttttgttgccattgcttttggtgttttggacatgaagtccttgcccacgcctatgtcctgaatggtaatgcctaggttttcttctagggtttttatggttttaggtctaacgtttaaatctttaatccatcttgaattgatttttgtataaggtgtaaggaaggaatccagtttcagctttctacatatggctagccagttttcccagcaccatttattaaatagggaatcctttccccattgcttgtttttctcaggtttgtcaaagatcagatagttgtagatatgcggcattatttctgagggctctgttctgttccattgatctatatctctgttttcgtaccagtaacatgctgttttggttactgtagccttgtagtatagtttgaagtcaggtagtgtgatgcctccagctttgatcttttggcttaggattgacttggtgatgcgggctcttttttggttccatatgaactttaaagtagttttttccaattctttgaagaaagtcattggtagcttgatggggatggcattgaatctgtaaattaccttgggcagtatggccattttcacgatattgattcttcctacccatgagcatggaatgttcttccatttgtttgtgtcctctttaatttccttgagcagtggtttgtagttctccttgaagaggtccttcacatcccttgtaagttggattcctaggtattttattctctttgaagcaattgtgaatgggagttcacccatgatttggctctctgtttgtctgttgttggtgtataagaatgcttgtgatttttgcacattgattttgtatcctgagactttgctgaagttgcttatcagcttaaggagattttgggctgagacgatggggttttctagataaacaatcatgtcgtctgcaaacagggacaatttgacttcctcttttcctaattgaataccctttatttccttctcctgcctgattgccctggccagaacttccaacactatgttgaataggagcggtgagagagggcatccctgtcttgtgctagttttcaaagggaatgcttccagtttttgcccattcagtatgatattggctgtgggtttgtcatagatagctcttattattttgaaatacgtcccatcaatacctaatttattgagagtttttagcatgaagggttgttgaattttgtcaaaggctttttctgcatctattgagataatcatgtggtttttgtctttggctctgtttatatgctggattacatttattgatttgcgtatattgaaccagccttgcatcccagggatgaagcccacttgatcatggtggataagctttttgatgtgctgctggattcggtttgccagtattttattgaggatttttgcatcaatgttcatcaaggatattggtctaaaattctcttttttggttgtgtctctgcccggctttggtatcagaatgatgctggcctcataaaatgagttagggaggattccctctttttctattgattggaatagtttcagaaggaatggtaccagttcctccttgtacctctggtagaattcggctgtgaatccatctggtcctggactctttttggttggtaaactattgattattgccacaatttcagagactgttattggtctattcagagattcaacttcttcctggtttagtcttgggagagtgtatgtgtcgaggaatgtatccatttcttctagattttctagtttatttgcgtagaggtgtttgtagtattctctgatggtagtttgtatttctgtgggatcggtggtgatatcccctttatcattttttattgtgtctatttgattcttctctctttttttctttattagtcttgctagcggtctatcaattttgttgatcctttcaaaaaaccagctcctggattcattgattttttgaagggttttttgtgtctctatttccttcagttctgctctgattttagttatttcttgccttctgctagcttttgaatgtgtttgctcttgcttttctagttcttttaattgtgatgttagggtgtcaattttggatctttcctgctttctcttgtaggcatttagtgctataaatttccctctacatactgctttgaatgcgtcccagagattctggtatgtggtgtctttgttctcgttggtttcaaagaacatctttatttctgccttcatttcgttatgtacccagtagtcattcaggagcaggttgttcagtttctcatgtagttgagcggctttgagtgagattcttaatcctgagttctagtttgattgcactgtggtctgagagatagtttgttataatttctgttcttttacatttgctgaggagagctttacttccaactatgtggtcaattttggaataggtgtggtgtggtgctgaaaaaaatgtatattctgttgatttggggtggagagttctgtagatgtctattaggtctgcttggtgcagagctgagttcaattcctgggtatccttgttgactttctgtctcgttgatctgtctaatgttgacagtggggtgttaaagtctcccattattaatgtgtgggagtctaagtctctttgtaggtcactcaggacttgctttatgaatctgggtgctcctgtattgggtgcataaatatttaggatagttagctcctcttgttgaattgatccctttaccattatgtaatggccttctttgtctcttttgatctttgttggtttaaagtctgttttatcagagactaggattgcaactcctgcctttttttgttttccattggcttggtagatcttcctccatccttttattttgagcctatgtgtgtctctgcacgtgagatgggtttcctgaatacagcacactgatgggtcttgactctttatccaacttgccagtctgtgtcttttaattgcagaatttagtccatttatatttaaagttaatattgttatgtgtgaatttgatcctgtcattatgatgttagctggttattttgctcattagttgatgcagtttcttcctagtctcgatggtctttacattttggcatgattttgcagcggctggtaccggttgttcctttccatgtttagcgcttccttcaggagctcttttagggcaggcctggtggtgacaaaatctctcagcatttgcttgtctataaagtattttatttctccttcacttatgaagcttagtttggctggatatgaaattctgggttgaaaattcttttctttaagaatgttgaatattggcccccactctcttctggcttgtagggtttctgctgagagatccgctgttagtctgatgggctttcctttgagggtaacccgacctttctctctggctgcccttaacattttttccttcatttcaactttggtgaatctgacaattatgtgtcttggagttgctcttctcgaggagtatctttgtggcgttctctgtatttcctgaatctgaacgttggcctgccttgctagatcggggaagttctcctggataatatcctgcagagtgttttccaacttggttccattctccacatcactttcaggtacaccaatcagacgtagatttggtcttttcacatagtcccatatttcttggaggctttgctcatttctttttattcttttttctctaaacttcccttctcgcttcatttcattcatttcatcttccattgctgataccctttcttccagttgatcgcatcggctcctgaggcttctgcattcttcacgtagttctcgagccttggttttctgctccatcagctcctttaagcacttctctgtattggttattctagttatacattcttctaaatttttttcaaagttttcaacttctttgcctttggtttgaatgtcctcccgtagctcagagtaatttgatcgtctgaagccttcttctctcagctcgtcaaaatcattctccatccagctttgttctgttgctggtgaggaactgcattcctttggaggaggagaggcgctctgcgttttagagtttccagtttttctgttctgttttttccccatctttgtggttttatctacttttggtctttgatgatggtgatgtacagatgggttttcggtgtagatgtcctttctggttgttagttttccttctaacagacaggaccctcagctgcaggtctgttggaataccctgccgtgtgaggtgtcagtgtgcccctgctggggggtgcctcccagttaggctgctcgggggtcaggggtcagggacccacttgaggaggcagtctgcccgttctcagatctccagctgcgtgctgggagaaccactgctctcttcaaagctgtcagacagggacacttcaacactgtgatttttgatacatttttttttttttacattgc

SEQ ID NO: 10692 - DNA, 31871 bp, Homo sapiens
ttcaagtagttttttccaattctgcagagaaagtcattggtagcttgatggggatggcattgaatctataaattaccttgggcagtatgaccattttcacgatattgattcttcctacccatgagcatggaatgttcttccttttgtttgtttcctcttttatttccttgagcagtggtttgtagttctccttgaagaggtccttcacatcccttgtaagttggattcctaggtattttattctttttgaagcaattgtgaatgggagttcactcatgatttggctctctgtttgtctgttattggtgtataagaatgtttgtgattattgtacattgattttgtatcctgagactttgctgaagttgcttatcaacttaaggggattttgggctgagacaatggggtttcttagacatacaatcatgttgtctgcaaacagggacaatttgacttcctcttttccgaattgaataccatttatttccttctcatacctaattgccctggccagaacttccaacactatgttgaataggagtggtgagagagggcatccctgtcttgtgccagttttcaaagggaatgcttccagtttttgtccattcagtatgatattggctgtgggtttgtcacagatagctcttattattttgacatacatcccattaatacctaatttattgagaggttttagcacgaagggttgttgaattttttttgaatgttttttattttatttttttttattttaagttttagggtacatgtgcacattgtgcaggttagttacatatgtatacatgtgccatgctggtgcgctgcacccactaactcgtcatctagcattaggtatatctcccaaagctatccctcccccctccccctaccccacaacagtccccagagtgtgatattcccattcctgtgtccgtgtgttctcattgttcaattcccacctataagtgagaatatgcagtgtttggttttttgttcttgtgatagtttactgagaatgatgatttccaatttcatccatacccctacaaaggacaagaactcaacaatttttatggctgcatagtattccatggtgtatgtgtgccacattttcttaatccagtctatcattgttggacatttgggttggttccaagtctttgctattgtgaataatgccgcaataaacatacgtgtgcatgtgtctttatagcagcatgatttatagtcctttgggtatatacccagtaattggatggctgggtcaaatggtatttccagttctagatccaggaggaatcgcaacactgacttccacaatggttgatctagtttgcagtcccaccaaccatgtaaaagtgttcctatttctccacatcctttccagcacctgttgtttcctgactttttaatgatcaccattctaactggtgtgagatggtatcacattgtggttttgatttgcatttctctgatggccagtggtgatgagcattttttcatgtgttttttggctgcacaaatgtcttcttttgagaagtgtctgttcacgtcctacacccactttttgatggggttgtttgtttttttcttgtaaatttgtttgagttcattgtagattctggatattagccttttgtcagatgagtaggttgcaaaaattttctcccattttgtaggtttcctgttcactctgatggtagtttcttttgctgtgcagaggctctttagtttaattagatctcatttgtcaattttggcttttgttgccattgtttttggtgttttagacatgaagtccttgcccatgcctatgtcctgaatggtaatgcctagggttgcttctagggtttttatggttttaggtctaacgtttaagtctttaatccatcttgaattgatttttgtataagatgtaaggaagggatccagtttcagctttctacatatggctagccagttttcccagcaccatttattaaatagggaatcctttccccattgcttgtttttctcaggtttgtcaaagatcagatagttgtagatatgtggcattatttctgagggctctgttctgttccattgatctatatctctgtttcggtaccagtaccatgctgttttggttaccgtagccttgtagtatagtttgaagtcaggtagtgtgatgcctccagctttgttcttttggcttaggagtgacttggcgatgtgggctctcttttggttccatatgaactttaaagtagttttttccaattctgtgaagaaaggcattggtagcttgttggggatggcattgaatctgtaaattaccttgggcagtatggtcattttcacattattgattcttcctacccatgagcatggaatgttcttccatttgtttgtatcctcttttatttccttgagcagttttttgtacttctccttgaagaggtccttcacatccattgtaagttggattcctaggtattttattccctttgaagcaattgtgaatgtgagttcactcatgattttgctctctgtttgtctgttgttggtgtataagaatgcttgtgatttttgtacattgattttgtatcctgagattttgctgaagttgctcatcagcttaaggagactttgggctgagacaatggggttttctagatatacgatcatgtcatctgcaaacagggacaatttgacttcttcttttcctaattgaataccctttatttccttctcctgcctaattgccctggccagaagttccaacactatgttgaataggagtggtgagagagggcatccctgtttgtgccagttttcaaagggaatgcttccagtttttgcccattcagtatgatattggctgtgggtttgtcatagatagctcttattattttgaaatacgtcccatcaatacctaatttattgagaattcttagcatgaaggttgttgaattttgtcaaaggccttttctgcatctattgatataatcatgtggtttttgtctttggctctgtttatatgctggattacattcattgatttgcatatattgaagcagccttgcatcccagggatgaagcccacttgatcatggtggataagcttttggatgtgctgctggattcgttttgcctgtattttattgaggatttttgcatcaatgttcatcaaggatattggtctaaaattctctttttttgttgtgtctctgcctggctttggtatcagaatgatgctggactcataaaatgagttagggaggattccctctttttctgttgattggaatagtttcagaaggaatggtaccagttcctccttgtacctctggtagaattcggctgtgaatccatctggtactggactctttttggttggtaagctattgattattgccagaatttcagagcctgttattgttctattcagagattcaacttcttcctggtttagtcttgggagggtctatgtgttgaggaatttatccatttcttctagattttctagtttatttgcgtagaggtgtttgtagtattctctgatggtagtttgtatttctgtgagatcagtggtgatatcccctttatcattttttattgcgtctatttgaatcttctctctttttttctttattagtcttgcttgcggtctatcaattttgttgatcttttcaaaaaaccagctcctggattcattaatttttgaagggttttttgtgtctctatttccttcagttctgctctgattttagttatttcttgccttctgctagcttttgaatgtgtttgctcttgcttttctagttcttttaattgtgatattagggtgtcagttttggacatttcctgctttctcttgtgggcgtttagtgctatagatttccctctacacactgctttgaatgcggcccagagattctgatatgttgtgtctttgttctcgttggtttcaaagaacatgtttctttctgccttcatttcgttatgtacccagtagtcattcaggagcaggttgttcagtttccatgtagttgagtggtttgagtgagattcttaatcctgagttctagtttgattgcactgtggtctgagagatagtttgttataatttctgttcttttacatttgctgaggagagctttacttccaagtatgtggtcaattttgtaataggtgtggtgtggtgctgaaaaaaatgtatattctgttgatttgggttggagagttctgtagatgtctattaggtctgcttggtgcagagctgagttcaattcctgggtatccttgttgactttctgtcttgttgatctgtctaatgttgacagtggggtgttaaagtctcccattgttaatgtgtgggagtctaagtctctttgtggatcactcaggacttgctttatgaatctgggtgctcctgtattgggtgcatgtatttttaggatagttagctcttcttgttgaattgatccctttaccattatgtaatggccttctttgtctctttttatctttgttggtttaaagtctgttttaccagagactaggattgcaacccctgcctttttttgttttccatttgcttggtagatcttcctccatccttttattttgagcctatgtgtgtctctgcacgtgagatgagtttcctgaatacagcacactgatgggtcttgactctttatccaatttgccagtctgtgtcttttaattggagcatttagtccatttacatttaaagctaatattgttatgtgtgaatttgatcctgtcattatgatgttagctggttattttgctcgttagttgatgcagtttcttcctagtctcgatggtctttacatttttggcatgattttgcagtggctggtaccggttgttcctttccatgtttagtgcttccttcaggagcttttttagggcaagcctggtggtggcaaaatctgtcagcatttgcttgtctgtaatgtatttcatttctccttcgcttatgtagcttagtttggctggatatgaaattctgggttgaaaattattttctttaagaatgttgaatattggcccccactctcttctggcttgtagggtttctgccaagagattcactgttagtctgatgggcttccctttgagggtaacccgacctttctctctggctgcccttaacattttttccttcatttcaactttgctgaatctgacaattatgtgtcttggagttgctcttctccaggagtatctttgtggcgttttctgtatttcctgaatctgaatgttggcctgccttgctagattggggaagttctcctggataatatcctgcagagtgttttcctacttggttccattctccctgtcactttcaggtacaccaatcagacgtagatttggtctcttcacatagtcctatatttcttggagggtttgctcatttcttttcattcttttttctctaaacttcccttctcacttcatttcattcatttcatcttccatcgctgataccctttcttccagttgaatgcattgggctcctgaggcttccgcattcttcacgtagttctcgagccttggttttcagctccatcagctcctttaagcacttctctgcattggttcttctagttatacattcttctaaatttttttcaaagttttcaacttctttgcctttggtttgaatgtcctcccatagctcagagtaatttgatcgtctgaagccttcttctcttagctcgtcaaagtcattctccatccagatttgttccattgctggtgaggaactgcgttcctttggaggaggggaggtgctctgctttttagagtttccagtttttctcttctcttttttacccatctttatggttttatctacttttggtctttgatgatggtgatgtacagatgggtttttggtgtggatgtcctttctgtttgttagtttttcttctaacagacaggaccctcagctgcatgtctgttggaataccctgccttgtatggtgtcagtgtgcccctgctggggggtgcctcccagttaggctgctcgggggtcaggggtcagtgtcccacttgaggaccagtcttccagttctcagatctccagctgcatgctgggagaaccactgctctcttcaaagctgtcagacagggacatttaagtctgcagaagttactgctgtctttttgtttgtctgtgccctgcccccagacgtggagcctacagaggcaggcaggcctccttgagctgtggtgggctccacccagttcgagattccaggctgctttgtttacctaatcaagcctgggcaatggtgggcaccctcccccagactcactgccaccttgcagtttgatctcagactgctgtgctagcaatcagcgagactccgtgggcataagaccctccgagccaggttcaggatataatcttgtgttgtgtcgttttttaagcccattggaaaagcacagtattcgggtgggagtgacccgattttccaggtgctgttcgtcacccctttctttgacttggaatgggaactccttgaccccttgcacttcccaagtgagacaatgcctcaccctgcttcggctcatgcacagtgcatgcacccactgacctgcgcccactgtctggcactccctagtgagatgaacctggtacctcggatggaaatgcggaaatcaccgtcttctgcatcactcatgctgggagctgtagaacagagctgctcctattcggtcatcttggctcctccccctagggttgttgaattttgtcaaaggccttttctgcaactattgatataatcatgtggtttttgtctttggttctgtttatatgctggattacatttattgatttgtgaatgttgaaccagccttgcatcccagggttgaagaccacttgatcatggtggataagctttttgatgtgctgctggatttggtttgccagtattttattgaggatttttgcatcaatgttcatcaaggatattggtctaaaatcctcttttttggttttgtctctgccaggctttgttatcagggtgatgctggcctcataaaatgagctagggagattacctctttttctattgaatggaatagtttcagaaggaatggtaccagttcctccttgtacctctggtagaattcagctgtgaatccaaaccataaaaaccctagaagaaaacctaggcattacctttcaggacataggcatgggcaaggacttcatgtctaaaacaccaaaagtaatggcaacaaaagccaaaattgacaaatggggtctaattaaactaaagagcttctgcacagcaaaagaaactatcatcagagtgaacaggcaacctacaaaatgggagaaaattttcacaacctactcatcaaacaaagggctaatatccaaaatctacagtgaactccaacaaatttacaagaaaaaaacaaacaactccatcaaaaagtgggtgaaggacatgaacagacacttctcaaaagaagacattcatgcagctaaaaaacacatgaaaaaatgctcaccatcactggccatcagagaaatgcaaatcaaaaccacagtgagataccatctcacaccagttagaatggcattcattaaaaggtcaggaaacaacaggtgctgggcaggatgtggagaaatagaacacttttacactgttggtgggattttaaactagttcaacaattatggaagtcagtgtggcaattcctcagagatctaggactagaattaccatttgacccagccatcccattactgggtatatacccaaaggactataaatcatgctggtataaagacacatgcacacttatgtttattgcatcactattcacaatagcaaatacttggaaccaacccaaatgtccaacaaggatagactggattaagaaaatgtggcacatatacaccatgaaatactatgcagccatgaaaagtgatgagttcatgtccgttataggacatggatgaaattggaaatcaacattctcagtaaactatcgcaaggacaaaaatcaaacaccgcatgttctcactcataggtgggaattgaacaatgagaacacatggacacaggaaggggaacatcacactctagggactcttgtggggtgggaggagaggggagggatagcattaggagatatacctaatgttaaatgaggagttaatgggttcagcacaccagcatggcacatgtatacatatgtaactaacctgcacattctgcacatgtaccttaaatcttaaagcataaaaataataaaaaaaaacaaaaaacaaaaagaagtttctcagaatacatctgtctaatttttatgtgaagatacttccttttccactttaagacgcaaagttctccaaatatccacatgcagatcctattaaaagagtgtgtcaaaactcctcaatcaaaagaaaagttcaaatctgtgagatgaatggacacatcagaaagaagtttctcagaatgcttctgtctaatttttacgtgaagacaactccttttccactataggccacaaagcactccaaatatccatttgcagatactacaaaaagactgtttccaaactgctgaaacaaaagaaatgctcaactctgtgacatgaatgcacatattacaaagaagtttctcagaacgattctgtctggtttttatgtgagaatatttccttttccaccataggcctcgaactcctccaaatatccagttgcagattctacaaaaagagtgtttcaaaactgctcagtcaaatgaaaggttcaactctgtgagatgaatgcacacatcacaaagaggtctctcagaatgcttctgactagcttttacatgcaaatatttatttttccactataggctgcagagctctacaaatatccatttccagtaccacaaaacgagtgtttcaaaactgctcaatcaaaagaaaggttcaactctgtgagttgaatgcacacatcacaaagaagcttctcagaatgcttctgtatagtgtttatgtgaagatatttcctgttccaccaaaggctacaaagtgctccaaatatccacttgcagattctacaaaaacaaagtttcaaaactgctcaatcaaaggaaaggttcaactctgacagataaatgctcacatcacaaagatgtttctctgaatgcttctgcctagttttatgtgaagataactcctgctccacgataggctgcaaagcgctccaaacacccacttacagattctacaaaaagagtgtttccaaactgctcaatcaaaagaaaggttcaactctgtcagatgaatgggcacatcacaaagaagtttctcagaatgcttctgtctagtttttatgtgaagatatttccttttccaacataggcctcaaagtgctgcaaatacccacttgcagatgcttcaaaaagactgtttcaaaactgctcagtcaaatgaaagtttcaactctgtgagatgaatgcaaacctcacaaagaagtctctcagaatgcttctgactagtttttacatgcagatatttatttttccactataggctgcagagcactacaaaaatccatttccagataacacaaaacgagcgtctcaatactgcttaatcaaaagaaaggttcaactctgtgagttgaatgcacacatcacaaagaagcttctcagaatgcttctgtctagtttttatgtgaagatatttccttttccccaaaggccacaaagcgctccaaatatccacttgcagattctacaaaaacagtgtttcaaaactgctcaatcaaaggaaaggttcaattctgagagataaatgttcacatcacaaagatgttcctctgaatgcttctgcctagtttttatgttaagatttctcgttttccatgatgggccgcagagtgctccaaacacccacttgcaaattctacaaaaagagtgttaccaaactgctcagtcaaaagaaagtttcaactctgtgagttgaatatacacatcacaaagtttatcagaatacttcttagtagtttttatgtgaagatatttccttttccacaataggccttgaagctctccaaatatccacttgcagattctacaaaaacagtgtttccaaactgctcaatcaaatgaaagtttcgactgtgtgagatgaatgcacacatcacaaagaagattctcagaatgcttctgtgcagtttttatgtgaagatatttccttttccacaacaggcatcaaagcgctccaaatattcacttgcagattctacgaaaagggtgtttcaaaactcctaaatcaaaataaaggtgcaactctgtgtgatgaatgcacacatcacaaagaagtttctcagaatgcttctgcgtagttcttatgtgatgatatttccttttccaccataggtcgcaaagggctccaaatatccccctgctgattttccataaagagtatttcaaaacagctcaatcaaaagaaagtttcaagtctgtgagatgaatgcacacatcacaaagaagtttctcagaatgcttctgtgcagtttttgtaaagatatttacttatccaaaagaggcctcaaagcgcttcaaatatccacttgctgattctataaaaagggtgtttcaaaactgctcaatcaaaagaaaagttcaactctgtgagatgaatgcacacatcacaaagaagtttctgagaatgtttctgtgtagtttttatgtgaatatattttcttttgcacaataggcctcaaagcgcttcaaatatccacttgcagattctataaaaagggtgtttgcaaactgctctatcaaaagaaacgttcagcactgtgaggtgaatgtgcacattacaaagacgtttctcagaatgcttctgtgtagtttttatttagataggttcaacacactgagttgaaggcacgtatcccaaagaaggttttcagaatgcttctgtgcagtttttatgtgaagatatttccttttccactataggcatcaaagcgttccgaagatccacttgcagattacacaaaaagagtgtttccaaactgctcaatgaaaagaaaatttcaactctgtgagatgaatggacacatcacaaaaaagtttgtcagaatgcttctgtgtagttttcatgtgaagctattttcttttccaccataggcctcatcatgctccaaatatccacttgcagattctaaaaaaagagtgtttcaaaactgctccatcaaaagaaatgttcaactctgtgagatgaatgcacacatcacaaagaagtttctcagaatgcgtccatgtagtttttatgtgaatatatttccttttccaccatagtccaaaaagggctcaaaatattcactttcagtttctacaaaaagagagaattaaaattgctgtttcaaaagataagtccatctctttgagatgaatacataaatcacaatatagtttctcagaatgctttggcatagtttttatgtgaagatatttccttttccaccataggtctcaaagttctccaaatatccacttgcagatactacaaaaagagtgtttcaaaactgctcaatcaaaggaaaagtgcaactcagtgaaatgaatgcacacatcaaaaagaagtttctctcaatgcttcagtgtagatttatgtgtagatatttccttttccataataggcctcaaagggctccaaatatccacatgcagatgctacaaaaagagtgtttcaaaactgctcaaactgttcatcaaagaaaggttaaactctgtgtgatgaacgcacacatcacaaagaagtttctcagaattcttcagtgtaatttttatgtgaagatatttccttttccacgataggcctgaaagagctccaaatatccacttgcagattaataaagtgtgtttccaaactactcaatcaaaagaaagattcaagcctgtgaaatgaatgcacacataacaaagaaatttctcagaatgcttctctgtagtttttatgtggagatatttccttttccgacataggccactaagggctccaaatacccacttgcagatactacaaaaagagaatttcaaaactactcatacaaaagataggttcaactctgtgagttgaatgctcccatcacaaagaagttcttcagagtgcttctgtgtagtttttatgtgaagatatttccttttccacaataggtctcaaagtactccaaatatccacttgcagattctgcaaaaagagtgtttcaaaactgcccaatcaaaagaaagtttcaactgtgtgagatgaatgcacatatcacaaggaagtttctcagaatgtttctgtgtaatttttatatgaagatatttccttttccacaacacgcttcaaagcgctccaaatatccacatgtagattctacaaaaagagtgtttcaaaactgctcaatcaaaagaaaggttaagctttgtgagatgaaggcacacaacacgaagaagtttctaagaatgcttctgtgtagtttttatttgaagatatttccttttccaccacaggcctaaaagagccacaaatatccacttgcatatcctacaaaaagactgtttccaaactgctcaatcaaaagaaacgttaaaatctatgagatgaatgcacacatggcaaagaagttggtcagaatgattctgtgtagttttaagttgaagatatttccttttccacaaaaggcctcaaaggcctcaaaatatacacctgcagattctacaaacagattttctctaactgctcaatcaagttaaaggctaaactctgtgagatgaatgaacacataacaaggaaatttctcagaatgctttgtgtagtttttatgtgaagatatttccttttcatgcacaggccacaaagctctccaaatatccaattgcagattctataaaaagagagtttcaaaactgctcattcaaaagataggttcaacactctgagttcaatgctcacatcacaaacaagtttatcagagtgcttctgtgtagttttaatgtgaagagatttccttttccaccataggcctcaaagcactccaaatatccacttgcagattctacaaaaacagtgtttacaaactactcagtcaaaagaaagtttcaacactgtgagatgaatgcacacatcacaaagaagtttctcagaatgcttctatgtagtttttatatgacggtatttccttttccacaataggcctgaaagtaatccaaatatccaattccagattctacaaaaagagtttttctgctcagtcaaaagaaaggctcaactgtgagagatgaatgcacacatcaaaaagaagtttttcagaatgcttctgcgtaatttttatgtgaagataattccttttccaccataggcctcaaagggctcccaatttccacctgcagattctacaaaaagagagattcaaaactgctgaatcaacagatatgttcaactctgtgagttgaatgcagacatgacaaagaagtttttccgaatgcttctttgtagtttttatgtgaagatatttccttttccgctatagtcctcaaagtgctccaaatatccaattgcagattctaaaaaaagggtgtttcagaactgttcaatgaaatcaaatgttcaacactgtgagatgaatgtgcacatcacaaagaagtttctcagaatgcttctgtctagtttttatgtgaagatatttccttttacaccataggcctcaaagccctcccaatatccacttgccgattctacaaaaagagtgtttcgaaactgctgaatcaatagaaagtttcaactctgtgagatgaatgcacacatcgcaaggaagtttctcagaatgcctctgtatagtttttatgtgaagatatttccttttccacaataggcctcaaagagcttcaaatatccacttgcagattctataaaaagagtgtttcaaaactgctcaatcaaaagaaaggttcacctccatgagatgattgcacacatcacaaagaagcttctcagaatgcttctgtgtagtttttatgtgaagatatttccttttgcaaaacaggctgcaaagagctcctaatatccacttgcagattctacaaaaagggagattcaaaactgctcaatcaaaagataggttcaactctgtgagttgaatgcatgcatcacatagaagtttctcagaatgcttctgtgtagttttatgtgaacatatttccctttccacagtaggcctcacagggcttcaaatatccacttccaaattctgccaaaagagtgtttaataactgctcaatcaaaagaaagtttcaactatgtgagatgaattcacacatcagaaagtagtttcttagaatgcttctgtgttttgatgtgaagatatttccttttcaaaaataggttgcaaagggctccaaatatccacttgcagatactacaaacagagagtttcaaaaccgctgtatcaaaagaaaggttcaactctgtgagttgaatgcacacatcacaaagaagtttctcagaatgcttctttgtagtttttatatgaagatatttccttttccaccgtaggcctcaaagcgcttcaaatatccacttgcagatcctacaaaaagaatgtttcaaaattgctcaatcaaaagaaagtttcaactcggtgagatgagtgcacgcatcacaaagatgtctctcagaatgcttctgtgtagtttttatgtgaagatattcccttttccacaataggcctcaaagcgcttcaaatatctacttgcagatccttccaaaagagtatttccaaactgctcaatcaaaggaaaggttcaattctatgagatgaatgcacatatcacaaagaagtttctcagaatgcttctatatactttttattcgaagatatttcctattccacagtagtcctgtaagctctccaaatatccacttgcagattgcacaaaaagagtgtttcaagactgctcaatcaaaagagaggttcaactctttcaggtgaatgcacacaacacaaagaagtttctgagaatccttctgtggactttttatttgaagatatatccttttccaccacacgccacaaagggctgaaaatatgcacttgcagattctacaaaaagagagtttcaaaactggtctatcaaaagataggttcaggtgtgtgggtggaatggacacatccaaagaactttctcagaatgcttctgtgtagtttttttgtgaagatatttccttttcaacaataggcctcaaagcgccccaagtatccagttgcagattctacaaaaagatagattaagaagtactcaatccaaacataggttcaattctgtaagatgaatgcacacatcgcaaagaagtttctcagaatgcttctgtatattgtttatgtgaagatatttccttttccacagtaggcctcaaagtgctccaaatatccacttgcagatgctacaaaaagagtgtttcaaaactgctcaatcgaaacgaaggttcaacagtgtgagatgaatgcacatcaaaaagaagtttctcagaatgcttctgtgtagttttatgtgaatatatttccctttccacaataagcctcacagggcttcaaatatccacttccagattcgataaaaagagtggttcacaactgctcaatcaaaagaaagtttcaattctgtgagatgaattcacacatcagaaagtagtttctcaaaatgcttctgtgtaatttttatgtgaagatatttccttttccaccataggctgcaaagggctccaaatatccacttgcctatactataaaaagagagtttcaaaaattctctatcaaaacaaaggttcaacacagtgagttgaatgcacacatcacaaagtagtttctcagaattcttctttgtagtttttatgtgaagatatttccttttccaccattggcttcaaagtgctccaaatatccacttgcagatgctacaaaaagagtgtttgaaaatagatcaattgaaagaaaagttcaactctgtgagatgaatgcacacatcaaaaagaagtttctcagaatgcttctgtgtagtttttatgtgaagatatttccttttccacaataggcctcaaagcacttcaaatacctactagcagattcttcaaaaagagtctttctaaactgctgcatcaaaagaaagtttcagatttttgagatgaatgcacacatcacacagaagtttctcagaatgctttcgtgtagtttttatttgaagatatttccttttcaaaaataggcagcaaagggatcaaaatatccacttgcagattctacaaaaagagaaattcaaaaccgtgccatcaaaggataggttcaactctgtgagtcaaattgacacatcacaaagtagtgtctcagaatacttctgtttagtttttatgtgaagatattcccttttccaacatagacctcaaagtgctctaaatatccaattacagattctacaaaaagagtgtttccaaactgctcaatgaaaagaaagtttcaactctgtgagatgaatgcacatatcacaaagaagtttttcagaatgcttctatatactttttatgcaaagatatttcttattccacagttgtcctctaagctctccaaatatccacttgcagactctacaaaaagagtgtttcaagactgctcaatcaaaagaaaggttcaactctattaggtgaatgcacacaacacaaagatgtttctgagaatccttctgtggactttgtatgtgaagatatttccttttccaccatatgccgcaaagggatgaaaatatgcacttgcagattctacaaaaagagagtttcaaaactggtctatcaaaagataggttcaggtgtgtgggtggaatggacacatcacaaagaactttctcagaatgcttctgtgtagtttttttctgaagatatttccttttcaacaataggcctcaaagcgccctaagtatccacttgcagattctacaaaaagatagattaaaaagggctcaatcaaaagatagattcaattctgtaagatgaatgcacacatcacaaagaagtttctcagaatgcttctgtatgttgtttatgtgaaggtatttcctgttctgcagtaggcctcaaagtgctccaaatatccacttgcagattctacaaaaagagtgtttcaaaactgctcagtcaaaagaaaaattcaattctgtgagatgaatgcacacgtcacaaagaagtttctcagaatgcttctgtgtagtttttatgtgaagatattcccttttccaccataggccacaaagggctccaaatatacacttgcagattctacacagtttcaaaactgctctatagaaagataggttcagttctgtgagttcaatgtacatataacaaagaagtttctaagagtgcttctgtgtagtttttatgtgaagatatttctttttctgctatagggctcaaagcactccaaatatccacttgcagattctacagaaagagtgtttccaaactgctcaataaaaagaaatgttcaaatatgtgagatgaatgcacacatcacaaagaagtttctcagaatgcttctgtgtggtttttatctgaagatatttccttttccacaaatggccttaaagcgttccaaatatccccttgcagattctacaaaaagagtgtttccaaactgctcaataaaatgagaggcttaactctgtgagatgaatctacacatcacaaagctgtttctcagaatgcttcttagtagtttttatttgaagatatttccttttccatcctagtccacaaagggctccaagtatccacttgaagatgctacaaaaagagagttttgaaactgctcaatcaaaagataggttcaaatctgtgagttgaatgcagacatcacaaagaagtttctcggtattcttctgtgtagtttttatgcgaagatatttctttttccacgatagtcatcaaattgcttcgaatatccacttgctgattccagaaaaagagtgtttcaaaagtgcataatcaaaagagagtttgaactctgtgagatgaatgcacagatcacaaacaagtttctcagaatgcttctgtgtactttttatgtgaagatattaccttctccaccataggcctcaaagtgctccaaatatctacttgcagattcttcaaaaagagtgtttccaaactgctgaatgaaaagaaaggttcaactctgtgagatgaatgcacacataacaaagaagattctcagaatgcttctgtgtagtttttatgtgaagttatttccttttccagcataggcctcaaaacactccaaatatccacttgcagattctacaaaaagagtgtttccaaactgctcaatcaaaatgaaggttctactctgtgagaggaacgcacccattgcaaagaagtttctcagaatgcttctgtgtagtttttatgtgaagatatttccttttccatcataggccaaaaagggctccatgtatccacttgaaggtgctataaaaagatagtttcgaaactgctccatcaaaagatatgttcaaatttctgtgttgaatgcacacatcacaaagaagtatcttggaattcttctgtgtaggttttatgtgaagatatttcctttcccaccattggcgtcaaaatgctccgaatatccacttgcagattccacaaaaagagggtttcaaaagtgcacaatcgaaagagaggttcaactctgtgagatgaatgcacacatcacaaacaagtttctcagaatgcttctgtgtactttttatgtgaagatatttccttttccaaaataggcctcaaagcgctccaaatatccatctgcaggttctacaaaaagtctgtttcaaaactgctcaatcaaaagacagtttcaactctctgaggtgaatgcacacatcacaaagaagattctcagaatgcttctgtgtagtttttatgtgaaaatttttccttttccatcataggccacaaagcgctccaaatatccacttgcagattctacaaaaagagtgtttcaaaactgctcaatcaaaggagaggttgaactctgtgagatgaatgcacacatcacaaagaagtttctcagaatgcttctgtgtagtttttctatgaagatattcctttttccaccataggcttcaaagggctccaaatatccacttgaagattttacaaaaagagagtttcaaaactgctctatcaaaaggtaggttcaactctgtgaattgaatgcatacatcacaaagtagttcctcagaatgcttctgggtagtttctatgtgaagatatttccttttccaccataggcctcaaagagctccatatatccacttgcagattctacaaaaagagtgtttccagactgctcaataaaatgaaaggctcaactctgtgagatgaattcacacatcacaaagaaatttgtcagaatgtttctgtgtcgtttttatgtgaagatatttcctttttcatcgtaggccacaaatggctccatgtgtccatttgaagatgctacaaaaagagagttttgaaactgctggatcaaaagataagttcaaatttgtgagttggatgcacacatcacaatgaagtatctcggaattcttctgtgcaggttttttgtgacgctatatccttttccaccataggcgtcaaattgctccgaatatccacttgcagattccacaaaaagagggtttcaaaagtgcacaatcaaaacagaggttcaactctgtgagatgaatgcacacatcacaaacaagtttctcagaatacttctgtgtactttttatgtgaagatatttccttttccaaaacaggactcaaagtgctccaaatatccacctgcaggttctacaaaaagtctgtttcaaacctgctcaaccaaaggcggttcaactctctgagatgaatgcacacatcacaaagaagtttctcagaatgcttctgtgtagtttttgtgtgaagatatttccttttccactctgggcatcaaagggcttcaaatatccacttgcagatcctatcaaaagagtgtttcaaaactgctcaatcaaaagaaagtttaaactctgtgagatgaatgcacacatcacaaaggagtttctcagagtgcttctgtttattttttatgtgaagatatttccttttccacaatagaccttgatgcgatctgaatatccactttcaaattctacaagaagggtgtttcaaaactgctcaatcaaataaaagtttcagctctatgagatgaatgcacacatcacaaggaagttcctcagaatgcttctgtgtagtttttttgtgaagatatttccttttcaaaaatagaccacaaagggctcaaaatatccggttctatattctgcagaaacagaaatacaaaactgttcaatcaaacgacaggttcaactctgtgagttgagtgcacacatcacacagaagtttctcagagtgcttctgtgtagttttcatgtgaagatatttcctcttccaccataggcttcaaagcgctccaaatatacacttgcagattctacaaaaagagtgtttccaaactgctcaatcaagagaaaggttcaactctgtgagatgagtgcacacatcacaaagaagttgtcagaatgcttctgtgtagtttttatgtgaagatatttccttttccacaataggccccaaagtgctgtaaatatccccttgcagattctacaaaaagagtgttacaaaactgctcaataaaatgaaagactcaactctgtgagatgaattcacacatcacaaagaagtttctcagaatgcttctgtgtagtttttatgtgaagatatttccttttccatcataggccacaaagggctccatgtatccacttgaagatgctacaaaaatagagttttgaaactgcttgatcaaaagataggttcaaatttgcgagttgaatgcacacatcacaatgaagtatctcggaattcttctgtgtagtttttttgtgaagatatttccttttccatcataggcttcgaagcgctccaaatatccacttgcagattccacaaaaagagggtttcaaaagtgcacaatcaaaagagaggttcaattccgtgagatgaatgcacacatcacaaacaagtttcttagaatgtttctgcatactttttatgtgaagatatttccttctccaccataggcctcaaagggctccaattatccacttgcagattcttcaaaaactgtgatgtgaatgcacacatcacaaagaagattctgagaaagtttctgtgtagtttttatgtgaagatatttccttttccaccataggcttcaaagcactccaaatatccacttgcagattctacaaaaagagagtttcaaaacttctctatcaaagtagagactcaacgcagtgagttgaatgcacacattacacagaagtttctcagaatgcttctgtgcagtttttatgtgaatatatttccttttccaccagaggcctgaaagtgcttcaaatatctaatttgcagtttctacaaaaagagtttttcaaaactgctcaatcaaaagaaagtttcaactctttcagatgaatgcacagatcacaaagaagtttctcagaatgcttctgtgtagtttttatgtgaagatatttccttttccaccataggcctcaaagcgctccaaatatctatttgcagattctacaaaaagagtgtttccaaactgctcaatccaaagaaaactccaactctctgagatgaatgcacacatcacaaagaagtttctgagaacacttctgcgtaattttaatgtgaagatattccctttccacaataggcctcaaagtgcttcaaatatccacttgcagattttataaagtgtgtttcaaaactgctcaagcaaaagaagggttcaacactatgagatgaatgcacacatcacaaagaagtttctgagaaagctgctgtatagtttttttgtgaagatatttccttttccaaaataggccacaagtggctccaaatgtccacttgcagattctaccaaaagagagatgcaaaactgttctatcaaaaggacagttcaactctccgagttgagtgcacacatcacaaagtagtttctgggaatgcttctatctcgttttatatgaagatattcccgtttccactgtaggccacatagtgctcaaaatatccacttgcagattctataaaaagagtgtttcaaaactgcactatcaaaaggagcgttcaactctgtgagttgaatgcaaacatcacaaagaagtttctgagaatacttctttctagtttctatgtgaaaatatttgtgttcccactgatgccttccttgcgatcaaatatccacctgcagatattacaaaatgagtgtttcaaaactgctctatcaaaaggatggttcaactctctgagttgaatgcacacatcacaaagaagtttctgagaatgcttctgtctagtttttatgtgaagatattcccgtttccaccgtaggcctcaaagagcttaaattatccacttgtagattgtacaaaaagagtgtttcaaaactgctctatcaaaagaaagttcaacactgtgagttgaatgaacacatcccaaagaagtttctgagaatgcctctgtctaatttttatgtgaagatattctcgtttccaccgaaggcctcaaagcggtccaaatatccacttgcagattctacaaaaagagtgtttcaaaactgctcaatcaaaaggattgttcaactctgtgagttaaacccaaacatcacaacatagtttctgagaatgcttctgtgtagtttttatatgaatatatttccttttgtaccataggcctcaaagcactccaaatatccagttgcagattctacaaaaagtgtgtttcaaaactgctctaaaaaaatggaggttaaactctctgaattgaatgcacacatcacaaagaagtttctgataatgcttctgtctagtttttatgtgaagatataccggtttccactgtaggcctaaaagcactccaaatatccacttgcagattctacaaaaagaggcattcaaaactgatctatcaaaaggaaggttcaactctctgagttgaaagcacacatcacaagaagttactgagaatgcttctatctagtttctatgggacgatatttccttttccagcacacgccacaaagcgctccaaatgtccacttgcatattctacaaaaagagtgtttcaagactgctctatcaaaaggaaggttcaactccatgagttgaattcacacgtcacaaagaagtttcagagaatgcttctgtctagtttttatgtgaagatattcccatttccaccataggcctcaaagcgctccaaatatccagttgaaccttctacaaaaagagtgtttcaaaactgctctatcaaaagcaatgctcaagtctgtgagttgaatgcacacatcacaaagaagtttctgagaatgcttctgtctagtttttatgtgaagatatttccctttccaccacaggcctcaaagcgctgcaaacgtccacttgcagattctacaaaaagagtgtttcaaaactgctctatcaaaagaaaggttctactctttgagttgaatgcacacgtcacaatgaagtttctgagaatgcttctgtctaatttttaggtgaggattttcccatttccaacaaaggcctcaaagcgctccaaatgtccacttgcagattctataaaaagagtgtttcaaaagtgctttatgaaaaggaatattcaactctgtgagttgaatgcccacatcaaaatgaagtttctgagaatgcttctgtctagtttttaagtggagatattcgtctttccaccgaaggcctaaaagcgctccgtatatccatctacagattctacaaagagagtgtttcaaaactgctctatcaaaagaaaggttcaactctgggatttgaatgcacacatcacaaagtagtttctgagaatgcttctgtgtagtttttatataaaggtatttccttttctaccataggcatcaaagcactccatatatccacttgcagattctacaacaagatttttcaaagctgctctgccaaaaggaaggtttaactccctgagttgaatgcaagcatcacaaattactttctgaaaatgcttctgtctagtttttctgtgaagatattcccgtttccacgtaggcctcaaaatctccaaatatatacttgcagattctacaaaaagcctctgtcaaaactgctgtatcaaaaggaaggttcaactctcccaggtgaatggacaaatcacaaataagtttctgagaatgcttctgtctagttttcttgtgaagatattactgtttccaccgtaggcctcaaatcgctccaaatatcaaactgcagattccacaaaacgagtgtctcaaaactgcactatgaaaacgaaggttcaaatctgtgagttgaatgcacacatccgaaagaagtttctgagaatgcttccttctagtttttatgtgaagatattccctattacccctaaggcctaaaagcggtccaaatatcctcttgcagattctacaaaaagagtgtttcaaaactgctctatgaaaaggaatgttcagctctgtgagttcaatgcaaacatcacaaagaagtttctgagaatgcttctgtctagtttttgtttgcagacatttccttttccaccatagacctcaaactgctccaaatattcacttgcagattctaaaatagagtgtttcaaaactgctctaagaaaaggaaatttcaactctgtgagttgaatgcacacatcacaaagaagatactgagattgcctctgtccagtttacatgtgaagatatacccctttccaccaaaggcctaaaagcactccaaatatccacttgcagattctacaaaaagagtgtttcaaaactgatctatcaaaaggaagtgttatcttcatgaggtcaatgcacatcacaatatagtttctgataatgcttctgtataatttttatatgaagatatgtccttttccaacataggcctcaaagggctcaaaatatccacttgcagattctatgaaaagagtgattcaaaactgctctatgaaaaggaaggttgaactccgtgagttgaatgcacccatcacaaagaaggttctcagaatgaagatattacgtgaagatattcttgtttccaccgaaggcctcaaagtgctccaaatatccacttgccgatcctacaaaaagagtgtttcaaaactgctctatcaaaagaaaagttcaactcttttagttgaatgcacacttcacaaagaagtttctgagaatgcttctgtctactctttaggtgaagaaacttccttttccatcatagaccttaaagcgctcaaatatccacttgcagattcttcaaaaagagtgtttcaaaactgctgtatgaaaagggaggtccaattctgtgagttgaatgcacacatcacaaagaagtttctaggatacttctgtcaagattttatgtgaagatattcccgtttccaacataggcctcaaagagctccaaatatccacttgcagattctacaaaaatagtgtttcaaaactgctctatcaaaagaaaggttcacctctgtttgttgaacgaacacataacaaagaaatttctgagaatccatctgtctactttttatgtgaagacacttccttttccaccatagacctcaaagcgctccaaatatccaattccagattctacaaaaagagtgtttcaaaactactctatcaaaacgaaggttaaactctgtgagttgaatgcacacatcacaaagaagtttctgagaatgcttcggtctgatttttatgtgaagttatttcccttttcaccacaggcatcaaagtgctcaaaatgtccaattgcagattctacaaaaagagtttttcaaaacttgtctatgaaaagaaaggttcaactctgtaggttggatgcacacatcacaaagtagtttctgagaatgcttctgtctagtttttaatatgaagacatttccttttctaccttaggcctcaaagcgctccaaatatccacttgcagattccacaaaaagagtgtttcaaaactgatctatgaaaaggaagtttctactctgtgaattgaatgcgcacaacacaaagaagtttccgagactgtttctgtctagtttttatatgaagatattccagtttccagagaaggcctcaaagagttccatatatccacttgcagattctacaaaaagagtgtttcaaaactgctctgtgaaaaggaatgttcagcactgtgagtggaatggaaacatcacaaagaagtttctgagaatgctgctgtctagtttttatgtgaaaatattcccgtttccaccaaaggcctcaaagcggtccaaatatccacttacagattctacgaagagtgtttcaaaactgctctatgaaaaggtatgttcaactctgtgagtagaatgcaaacatcacaaagagatttctgagaatgcttctgtctggtttttatgtgaagatattcccgtttccagtgaaggcctcaaagccgtccaaatatccacctgcagatactatgaaaagagtgtttcaaaactgctctatgaaaaggtatgttcaactctgtgagtagaatgcaaacatcacaaagagatttctgagaatgcttctgtctagtttttatgtgaagatattcccgtttccaatgaaggcctcaaagccatccaaatatccacctgcagatactatgaaaagagtgtttcaaaactgctctatgaaaaggtatgttcaactctgtgagttgaatgcaaacatcacagagaagtttctgagaatgcttctgtctagtttttttttttttttggaatgataaacattttaatttgaaaagcaggcatctctgctgttaagctttcttttgatgggtggggagtggggggcgttggagtttatttatttttgttattattatacttcaagttttagtgtacatgttcacaatgtgcaggttagttacgtatgtatacatgtgccatgctggtgtgctgcacccactaactcgtcctctagcattaggtatatctcccaatgccatccttctcccctcccctcaccccacaacagtccccagagtgtgatgttccacttcctgtgtccatgtgatctcattgttcaattcccacctatgagtgagaatatgcggtgtttggtttcttttcttgcgatagtttactgagaatgatgatttccaatttcatccatgtccctacaaacgacatgaactcatcatttttatggttgcatagtattccatggtgtatgtgtgccacattttcttaatccagtctatcattgttggacatttgtgttggttccaagtctttgctattgtgaatagtgccacaataaacatacatgtgcatgtttctttatagcagcatgatttatagtcctttgggtatatacccagtaattggatggctgggtcaaatggtatttctagtcctagatccctgaggaatccccacacggagttccacaatggatgaactagtttacagtcccaccaacagtgtaaaagtgttcctatttctccacatcctctccagcacctgttgtttcttgactttttaatgattgccattgtaactggtgtgagatggtatctcattgcggttttgatttgcatttctctgatggccagtgagggtgagcattttttcatgtgttttttggcagcataaatgtcttcttttgagaagtgtcagttcatgtcctttgcccactttttgatggggttgtttgtttttttcttgtaaatttgtttgagttcattgtagattctggatattagctctttgtcagatgagtaggttgtgaaaattttctcccattttgtagtttgcctgttcattctgatggtaatttcttttgcagtgcagaagctctttagtttagttagatcccatttgtcaattttggcttttattggcactgcttttggtgttttagacatgaagtccttgaccatgcctatgtcctgaatggtaatgcctaggatttcttctagggttttcatggttttacatctaatgtttaagtctttaatccatcttgaattgatttttgtataaggtataaggaagggatccagtttcagctttctacataaggctagccagttttcccagcaccatttgttaaatagggaatcctttccctattgcttgttcttctcaggtttgtcaaagatcagatagttgtagatatgtggcgttatttctgagggctctgttctgttccattgatctatatctctgttttggtaccagtaccatgctgttttggttactgtagccttgcagtatagtttgaagtcaggtagtgtgatgcctccagctttgttctttaggcctaggattgtcttggtgatgcgggctattttttgattcctatgaactttaaagtagtttttcctattctatgaagaaagtgattggtagcttgatggggttggcattgaatctgtaaattaccttgggcagtatggccatttccacgatattgattcttcctacccatgagcatggaatgttcttccatttgtttgtatcctattttatttccttgagcagtggtttgtagttctccttgaagaggtctttcacgtcccttgtaagttggattcctaggtattttattctcttggaaacaactgtgaatgggagttaagtcatgatttggctctctgtttgtctgttgttggtgtataagaatgcttgtggtttttgcacattgattttgtatcctgagactttgctgaagttgcttatcagcttaaggagattttcggctgagacaatggggttttctagatatacaatcatgtcatctgcaaactgggacaatttgacttcctctttatctaattgaataccctttatttcattctcctgcttaatcgccctggccagaacttccaacactatgttgaataggagtggtgagagagggcatccctctcttgtgccagttttcaaagggaatgcttccagtttttgcccattcagtatgatattgtctgtgggtttgtcatagatagctcttattattttgaaatgcatcccatcaatacctaatttattgagagtttttagcatgaaggattgttgaattttgtcaaatgccttttctgcgtctattgagataatcatgagtttttttctttggttctgtttatatgctggattacatttattgatttgcatatattgaaccagccttgcatcccagggatgatcccagcccacttgatcatggtggataagctttttgatgtgctgctggattcggtttgccagtattttattgaggatttttgcatcaatgttcatcaaggatattggtctaaaattctcttttttgattgtgtctgcccggctttggaatcagaatgatgctggcctcataaaatgagttagggaggattccctcgttttctattgattggaatagtttcagaaggaatggtaccagctcctccttgtacctttggtagaattcggctgtgaatccgtctggtcctggactctttttggttggtaagctattgattattgccacaatttcagatcctgttattggtctattcagagattcaacttcttcctggtttagtcttgggagagtgtatgtgtcgaggaatttatccatttcatctagattttccagtttatttgcatagaggtgtgtgtagtattctctgatggtagtttgtatttctgtggaatcggtggtgatatcccctttatcattttttattgcatctatttgattcttctctctttttttctttttagtcttgctagtggtgtatcaattttgttgacccttcaaaaaaccagctcctggatccattaattttttgaagggttttttgtgtctccatttccttcagttctgctctgattttagttatttcttgccttctgctagattttgaatgtgttttctcttgcttttttagttcttttaattgtgatgttagggtgtcaattttggatctttcctgctttctcttgtgggcatttagtgctgtaaatttccctctacccactgctttgaatgagtcccagagattctggtatgttgtgtctttgttctcgttggtttcaaggaacatgtttctttctgccttcatttcgttatgtacccagtagtcactcaggagcaggttgctcagtttccatgtagttgagtggtttgagtgagattcttaatcctgagttctagtttgattgcactgtggtctgagagagagtttgttataatttctgttcttttacatttgctgaggagagctttacttccaagtatgtggtacattttgaaataggtgtggtgtggtgctgaaaaaaatgtatattctgttgatatggggtggaaagttctgtagatgtctattaagtccgcttggtgcagagctgagttcaattcctggatatccttgttgactttctgtctagttgatctgtctaatgttgacagtggggtgttaaagtctcccatttttaatgtgtgggagtctaagtctctttgtaggtcactcaggacttgctttatgaatctgggtgctcctgtattgggtgcatatatatttaggataattagctcttcttgttgaattgatccctttaccattatgtaatggccttctttgtctctttttatctttgttggtttaaagtctgttttatcagagactagcattgcaacccctgccttttttgttttccattttcttggtagatcttcctccatcctttcattttgagcctatgtgtgtctctgcacgtgagatgggtttcctgaatgcagcacactgatgggtcttgattctttatccaatatgccagtctgtcttttaattgcagcatttagttcatttacatttaaagttaatattgttgtgtgtgaatctgatcctgtcattatgatgttagctagttatcttgctcgttaattgatgcagtttcttcctagtctcaatggtctttacattttggcatgattttgcagtggctggtactggttgttcctttccatgtttagtgcttccttcaggagcttttttagggcaggcctggtggtgacaaaatctctcagcatttgcttttctgtgaagtattttatttatccttcacttaggaagcttagtttggctggatatgaaattctgggttgaaaattcttttctttaagaatgttgaatattggcccccactctcttctggcttgtggggtttctgccaagagatccactgttagtctgatgggcctccctttgagggtaacccaacctttctctctggctgcccttaacattttttccttcatttcaactttgcggaatctgacaattatgtgtcttggagttgctcttctcgagtatctttgtggtgttctctgtatttcctgaatctgaatgttggcctgccttgttagattggggaagttctcctggataatatcctgcagagtgttccaacttggttccattctccccatcattttcagatacaccaaacagatgtagatttggtcttttcacatagtcccgtatttcctggaggatttgctcatttctttttattcttttttctctaaacttcccttctcacttcatttcattcatttcatcttccatcgctgataccctttcttccagttgattccattgtctcctgaggcttct

SEQ ID NO: 10693 - DNA, 6037 bp, Homo sapiens
tctttcttttttttttttttaattatactttaagttttagggtacatgtgcacattgtgcaggttagttacatatgtatatatgtgccatgctggtgcactgcacccactaactcgtcatctagcattaggtatatctcccaatgctatccctcccccctcccccgaccccaccacagtccccagagtgtgatattccccttcctgtgtccatgtgatctcattgttcaattcccacctatgagtgagaatatgcagtgtttggttttttgttcttgcgatagtttactgagaatgatgttttccaatttcatccatgtccctacaaaggacatgaactcatcattttttatggctgcatagtactccatggtgtatatgtgccacattttcttaatccagtctatcattgttggacatttgggttggttccaagtctttgctattgtgaataataccgcaataaacatacgtgtgcatgtgtctttatagcagcatgatttatagtcctttgggtatatacccattaatgggatggctgggtcaaatggtatttccagttctagatccctgaggaattgccacactgacttccacaatggttgaactagtttacagtcccaccaacagtgtaaaagtgttcctatttctccacatcctctccagcacctgttgtttcctgaatttttaatgattgccattctaactggtgtgagatggtatctcattgtggttttgatttgcatttctctgatggccagtgatgatgagcattttttcatgtgttttttggctgcataaatgtcttcttttgagaagtgtctgttcatgtccttcgcccactttttgatggggttgtttgtttttttcttgtaaatttgtttgagttcattgtagattctggatattagccctttgtcagatgagtaggttgcgaaaattttctcccatgttgtaggttgcctgttcactctgatggtagtttcttttgctgtgcagaagctctttagtttaattagatcccatttgtcaattttgtcttttgttgccattgcttttggtgttttagacatgaagtccttgcccatgcctatgtcctgaatggtaatgcctaggttttcttctagggtttttatggttttaggtctaacgtttaagtctttaatccatcttgaattgatttttgtataaggtgtaaggaagggatccagtttcagctttctacatatggctagccagttttcccagcaccatttattaaatagggaatcctttccccattgcttgtttttctcaggtttgtcaaagatcagatagttgtagatatgcggcgttatttctgagggctctgttctgttccattgatctatatctctgttttggtaccagtaccatgctgttttggttactgtagtcttgtagtatagtttgaagtcaggtagtgtgatgcctccagctttgttcttttggcttaggattgacttggcgatgcgggctcttttttggttccatatgaactttaaagtagttttttccagttctgtgaagaaaggcattggtagcttgatggggatggcattgaatctgtaaattaccttgggcagtatggccattttcacgatattgattcttcctacccatgagcatggaatgttcttccatttgtttgtatcctcttttatttccttgagcagtggtttgtagttctccttgaagaggtccttcacatcccttgtaagttggattcctaggtattttattctctttgaagcaattgtgaatgggagttcactcatgatttggctctctgtttgtctgttgttggtgtataagaatgcttgtgattttttacattgattttgtatcctgagactttgctggagttgcttatcagcttaaggagattttgggctgagacaatggggttttctagatatacaatcatgtcatctgcaaatagggacaatttgacttcctcttttcctaattgaataccctttatttccttctcctgcctaattgccctggccagaacttccaacactatgttgaataggagtggtgagagagggcatccctgtcttgtgccagttttcaaagggaatgcttccagtttttgcccattcagtatgatattggctgtgggtttgtcatagatagctcttattattttgaaatacatcccatcaatacctaatttattgagagtttttagcatgaagtgttgttgaattttgtcaaaggctttttctgcatctattgagataatcatgtggtttttgtctttggctctgtttatatgctggattacatttattgatttgcgtatattgaaccagccttgcatcccagggatgaagcccacttgatcatggtggataagctttttgatgtgctgctggattcgttttgccagtattttattgaggatttttgcatcaatgttcatcaaggatattggtctaaaattctcttttttttgttgtgtctctgcccggctttggtatcagaatgatgctggcctcataaaatgagttagggaggattccctctttttctattgattggaatagtttcagaaggaatggtaccagttcctccttgtacctctggtagaattcagctgtgaatccatctggtcctggactctttttggttggtaagctattgattattgccacaatttcagatcctgttattggtctattcagagattcaacttcttcctggtttagtcttgggagagtgtatgtgtcgaggaatttatccatttcttccagattttctagtttatttgtgtagaggtgtttgtagtattctctgatggtagtttgtatttctgtgggatcggtggtaatatcccctttatcattttttttattgtgtctattagattcttctctctttttttctttattagtcttgctagcggtctatcaattttgttgatcctttcaaaaacccagctcctggattcattaattctttgaagggttttttgtgtctctatttccttcagttctgctctgatcttagttatttcttgccttctgctagcttttgaatttgtttgctcttgcttttctagttcttttaattgtgatgttagggtgtcaattttggatctttcctgctttctcttgtgggcatttagtgctataaatttccctctatacactgctttgaatgcgtcccagagattctggtatgttgtgtctttgttctcattggtttcaaagaacatctttatttctgccttcatttcgttatgtacccagtagtcattcaggagcaggttgttcagtttccatgtagttgagcggttttgagtgagattcttaatcctgagttctagtttgattgcactgtggtctgagagatagtttgttctaatttctgttcttttccatttgctgatgagagctttacttccaagtatgtggtcaattttggaataggtgtggtgtggtgctgaaaaaaatgtatattctgttgatttggggtggagagttctgtagatgtctattaggtctgcttggtgcagagctgagttcaattcctgggtatccttgttgactttctgtctcattgatctgtctaatgttgacagtggggtgttaaagtctcccattattaatgtgtgggagtctaagtatctttgtagatcactcaggacttgctttatgaatcttggtgctcctgtattgggtgcatatatatttaggatagttagctcttcttgttgaattgatccctttaccattatgtaatggtcttctttgtctcttttgatctttgttggtttaaagtctgttttatcagaggctaggattgcaacccctgcttttttttgttttccatttgcttggtagatcttcctccatccttttattttgagcctatgtgtgtctctgcacgtgagatgggtttactgaatacagcatactgatgggtcttgactctttatccaatttgccagtctgtgtctttcaattggagcatttagtccatttacatttaaagttaatattgttatgtgtgactttgatcctgtcattatgatgttagctggttattttgctcgttagttgatgcagtttcttcctagtctcgatggtctttacattttggcatgattttgcagcggctggtaccggttgttcctttccatgtttagcgcttccttcaggagctcttttagggcaggcctggtggtgacaaaatctctcagcatttgcttgtctgtaaagtattttatttctcctttgcttatgacgcttagtttggctggatatgaaattctgggttgaaaattcttttccttaagaatgttgaatattggcccccactctcttctggcttgtagggtttctgccgagagatctgctgttagtctgatgggcttccctttgagggtaacccgacctttctctctggctgcccttaacattttttccttcatttcaactttggtgaatctgacaattatgtgtcttggagttgctcttctcgaggagtatctttgtggcgttctctgtatttcctgaatctgaacgttggcctgccttgctagattggggaagttctcctggataatatcctgcagagtgttttccaacttggttccattctccccatcactttcaggtacaccaatcggacgtagatttggtcttttcacatagtcccatatttcttggaggctttgctcatttctttttattcttttttctctaaacttcccttctcgcttcatttcattcatttcatcttccatggctgataccctttcttccagttgatcgcatcagctcctgaggcttctgcattcttcacgtagttctcgagccttggttttcagctccatcagctcctttaagcacttctctgtattggttattctagttatacattcttctaaatttttttcaaagttttcaacttctttgcctttggtttgaatgtcctcccatagctcagagtaatttgatcgtctgaagccttcttctctcagctcgtcaaagtcattctccatccagctttgttccgttgctggtgaggaactgtgttcctttggaggaggagaggcgctctgctttttagagtttccagtttttctgttctgttttttccccatctttgtggttttatctacttttggtctttgatgatggtgatgtacagatgggtttttggtgtggatgtcctttctgtatgttagttttccttctaacagacaggaccctcagctgcaggtctgttggaataccctgccatgtgaggtgtcagtgtgcccctgctggggggtgcctcccagttaggctgctcaggggtcaggggtcagggacccacttgaggaggcagtctgcccgttctcagatctccagctgtgtgctgggagaaccactgctctcttcaaagctgtcagacagggacatttaagtctgcagaggttactgctatctttttgtttgtctgtgccctgtcctcagaggtggagcctacagaggcaggcaggcctccttgagctgtggtgggctccacccagttcgagcttcccgctgctttgtttacctaagcaagcctgggcaatggcgggcgcccctcccccagcctggctgctgccttgcagtttgatctcagactgctgtgctagcagtcagcgagactccgtgggcgtaggaccctccgagccaggtgcgggatataatctcgtggtgtgccgttttttaagcccgtcggaaaagggcagtattcaggtgagagtgacccgattttccaggtgccgtccatcacccctttctttgacttggaaagggaactccttgaccccttgtgcttcccaagtgaggcaatgcctcgccctgcttcggctcgcgcacggtgcgcgcacccactgacctgcgcccactgtctggcactccctagagaaatgaacccggtacctcagatggaaatgcagaaaacactgtcttctgcgtcgctcacgctgggagctgtagaccggagctgttcctattcggccatcctggctcccc

SEQ ID NO: 10694 - DNA, 6064 bp, Homo sapiens
ttctttcctttttttttttcttttttttaaattattatcattatactttaagttttagggtacatgtgcacattgtgcaggttagttacatatgtatacatgtgccatgctggtgcgctgcacccaccaacttgtcatctagcattaggtatatctcccagtgctatccctccccccgccacccgacaacagtccccagagtgtgatgttccccttcctgtgtccatgtgttctcattgttcaattcccacctacgagtgagaatatgtggtgtttggttttttgttcttgtgatagtttactgagaatgatgatttccaatttcatccatgtccctacaaaggacatgaactcatcgttttttatggctgcatagtattccatggtgtatacgtgccacattttcttaatccagtctatcactgttggacatttgggttggttccaagtctttgctattgtgaataatgctgcaataaacatacgtgtgcatgtgtctttatagcagcatgatttatagtcctttgggtatatacccagtaatgggatggctgggtcaaatggtatttccagttctagatccctgaggaatcgccacactgacttccacaatggttgaactagtttacagtcccaccaacagtgtaaaagtgttcctatttctccacatcctctccagcatctgttgtttcctgactttttaatgattgccattctaactggtgtgagatggtatctcattgtggttttgatttgcatttctctgatggccagtgatgatgagcattttttcatgtgttttttggctgcataaatgtcttcttttgagaagtgtctgttcacgtccttcgcccactttttgatggggttgtttgtttttttcttgtaaatttgtttgagttctttgtagattctggatattagccctttgtcagatgagtaggttgtgaaaattttctcccattttgtaggttgcctgttcactctgatgttagtttcttttgctgtgcagaagctctttagtttaatcagatcccatttgtcaattttgtcttttgttgccattgcttttggtgttttagacatgaagtccttgcccatgcctatgtcctgaatggtaatgcctaggttttcttctagggtttttatggttttaggtctaacgtttaagtctttaatccatcttgaattgatttttgtataaggtgtaaggaagggatccagtttcagctttctacatatggctagccagttttcccagcaccatttaataaatagggaatcctttccccattgcttgtttttcccaggtttgtcaaagatcagatagttgtagatatgcggcgttatttctgagggctctgttctgttccattgatctatatctctgttttggtaccagtaccgtgctgttttggttactgtagccttgtagtatagtttgaagtcaggtagtgtgatgcctccagctttgttcttttgtcttaggattgacttggtgatgcgggctcttttttggttccatatgaactttaaagtagttttttccaattctgtgaagaaaggcattggtagcttgatgggcatggcattgaatctgtaaattaccttgggcagtatggccattttcacaatattgattcttcctacccatgagcatggaatgttcttccatttgtttgtatcctctttcatttccttgagcagtggtttatagttctccttgaagaggtccttcacatcccttgtaagttggattcctaggtattttattctctttgaagcaattgtgaatgggagttcactcatgatttggctctctgtctgttattggtgtataagaatgcttgtgatttttgcacattgattttgtatcctgagactttgctgaagttgcttatcagtttaaggagattttgggctgagactatggggttttctagatatacaatcatgtcgtctgcaaacagggacaatttgacttcctcttttcctaactgaataccctttatttccttctcctgcctaattgccctggccagaacttccaacactatgttgaataggagtggtgaggtgagagagggcatccctgtcttgtgccagttttcaaagggaatgcttccagtttttgcccattcagtatgatattggctgtgggtttgtcatagatagctcttattattttgagatacgtcccatcaatacctaatttattgagagtttttagcatgaagggttgttgaattttgtcaaaggctttttctgcacctattgagataatcatgtggtttttgtctttggctctgtttatatgctggattacatttattgatttgcgtatattgaaccagccttgcatcccagggatgaagcccacttgatcatggtggataagctttttgatgtgctgctggattcgttttgccagtattttattgaggatttttgcatcaatgttcatcaaggatattgttctaaaattctctttttttgttgtgtctctgcctggctttggtatcagaatgatgctggcctcataaaatgagttagggaggattccctctttttctattgattggaatattttcagaaggaatggtaccagttcctccttgtacctctggtagaattcggctgtgaatccatctggtcctggactctttttggttggtaagctattgattattgccacaatttcagatcctgttattggtctattcagagattcaatttcttcctggtttagtcttgggagagtgtatgtgtcgaggaatttatccatttcttctagattttctagtttatttgcgtagaggtgtttatagtattctctgatggtagtttgtatttctgtgggatcggtggtgatatcccctttatcattttttattgcatctatttgatttttctctctttttttctttattagtcttgctagcagtctatcaattttgttgatcctttcaaaaaaccagctcctggattcattgattttttgaagggttttttgtgtctctatttccttcagttctgctctgattttagttatttcttgccttctgctagctttggaatgtgtttgctcttgcttttctagttcttttaattgtgatgttagggtgtaaattttggatctttcctgctttctcttgtgggcatttagtgctataaatttccctctacacactgctttgaatgtgtcccagagattctggtatgttgtgtctttgttctcgttggtttcaaagaacatctttatttctgccttcatttcgttatgtgcccagtagtcattcaggagcaggttgttcagtttccatgtagttgagcggctttgagtgagattcttaatcctgagttctagtttgattgcactgtggtctgagagatagtttgttataatttctgttcttttccatttgctgaggagtgctttacttccaagtatgtggtcaattttggaataggtgtggtgtggtgctgaaaaaaatgtatattctgttgatttggggtggagagttctgtagatgtctattaggtccccttggtgcagagctgagttcaattcctgggtatccttgttgactttctgtctcgttgatctgtctaatgttgacagtggggtgttaaagtctcccattattaatgtgtgggagtctaagtctctttgtagatcactcaggacttgctttatgaatcttggtgctcctgtattgggtgcatatatatttaggatagttagctcttcttgttgaattgatccctttaccattatgtaatggccttcttgtctcttttgatctttgttggtttaaagtctgttttatcagagactaggattgcaacccctgcctttttttgttttccatttgcttggtagatcttcctccatccttttattttgagcctatgtgtgtctctgcacgtgagatgggtatcctgaatacaggacactgttgggtcttgactctttatccaatttgccagtctgtgtcttttaattggagcatttagtccatttacatttaaagttaatattgttatgtgtgaatttgatcctgtcattatgatgttagctggttattttgctcgttagttgatgcagtttcttcctagtctcgatggtctttacattttggcatgattttgcagcggctggtactggttgttcctttccatgtttagcgcttccttcaggagctcttttagggcaggcctggtggtgacaaaatctctcagcatttgcttgtctgtaaagtattttatttctccttcgcttatgaagtttagtttggctggatatgaaattctgggttgaaaattcttttctttaagaatgttgaatattggcccccactctcttctggcttgtagagtttctgccgagagatcagctgttagtctgatgggcttccctttgagggtaacccgacctttctctctggctgcccttaacattttttccttcatttcaactttggtgaatctgacaattatgtgtcttggagttgctcttctcgaggaatatctttgtggcgttctctgtatttcctgaatctgaacgttggcctgccttgctagattggggaagttctcctggataatatcctgcagaatgttttccaacttggttccattctccccatcactttcaggtacaccaatgagacgtagatttggtcttttcacatagtcccatatttcttggaggctttgctcatttctttttattcttttttctctaaacttcccttctcgcttcatttcattcgtttcatcttcctttgctgatatcctttcttccagttgattgcattggctcctgaggcttctgcattcttcacgtagttctccagccttggttttcagctccatcacctcctttaagcacttctctgtattggttattctagttatacattcttctaaatttttttcaaagttttcaacttctttccctttggtttgaatgtcctcccgtagctcagagtaatttgatcgtctgaagccttcttctctcagctccttaaagtcattctccgtccagctttgttccgttgctggtaaggaactgcgttcctttggaggaggagaggcgctctgctttttagagtttccagtttttctgttctgttttttccccatctttgtggttttatctacttttggtctttgatgatggtgatgtacagatgggtttttggtgtggatgtcctttctgtttgttagttttccttctaacagacaggaccctcagctgcaggtctgttggaataccttgccgtgtgaggtgtcagtgtgcccctgctggggggtgcctcccagttaggctgctcgggggtcaggggtcagggacccactcgaggaggcagtctgcccgttctccgatctccagctgcgtgctgggagaaccactgctctcttcaaagctgtcagacagggacatttaagtctgcagaggttactgctgtctttttgtttgtctgtgccctgcccccagaggtggagcctacagaggcaggcaggcctccttgagctgtggtgggctccacccagttcgagcttcccggctgctttgtttacctaatcaagcctgggcaatggcgggcgcccctcccccagcctcgctgccgccttgcagtttgatctcagactgctgtgctagcaatcagcgagactccgtgggcgtaggaccctccgagccaggtgtgggatataatctcgtggtgcgccgttttttaagcccgtcggaaaagcgcagtattcgggtggggtgacctgattttccaggtgccctcagtcacccctttctttgactcggaaagggaactccctgaccccttgcgcttcccaagtgaggcaatgcctcgccctgcttcggctcgcacacggtgtgcgcacccactgacctgcgcccactgtctggcactccctagtgagatgaactgggtacctcagatggaaatgcagaaatcacccgtcttctgcgtcgctcacgctgggagctgtagaccggagctgttcctattcggccatcttggctcctcctgcttctttcctt

SEQ ID NO: 10695 - DNA, 5786 bp, Homo sapiens
ttttggggttttttgtttttctttttctttttttaattatactttaagttttagggtacatgcgcacattgtgcatgttagttacatatgtatacatgtgccatgctggtgcgctgcacccactaactcatcatctagcattaggtatatctcccaatgctatccctcccccctccccccaccccacaacagtccacagagtgtgatgttccccttcctgtgtccatgtgatctcattgttcaattcccacctatgagtgagaatatgcgtgtttggttttttgttcttgtgatagtttactgagaatgatgatttccaatttcatccatgtccctacaaaggacatgaatttatcattttttatggctgcatagtattccatggtgtatatgtgccacattttcttaatccagtctatcattgttggacatttgggttggttccaagtctttgctattgtgaataatgccacaataaacatacttgtgcatgtgtctttatagcagcatgatttatagtccttcgggtatatacccagtaatgggatggctgggtcaaatggtatttctagttctagatccctgaggaatcgccacactgacttccacaatggttgaactagtttacagtcccaccaacagtgtaaaagtgttcctatttgcccacatcctctccagcacctgttgtttcctgacttttaatgattgccattctaactggtgtgagatggtatctcattgtggttttgatttgcatttctctgatggccagagatgatgagcattttttcatgtgttttttggctgcataaatgtcttcttttgagaagtgtctgtttatatcctttgcccactttttgatggggttgtttgttttttttttttgtaaatttgtttgagttcattgtagattctggatattagccctttgtcagatgagtaggttgagaaaattttctcccattttgtaggttgcctgttcactctgatggtagtttgttttgctgtgcagaaactctttagtttaattagatcccatttgtcaattttggcttttgttgcccattggttttggtgttttcgacatgaagtccttgcccatgcctatgccctgaatggtaatgcctaggttttctcctagggtttttatggttttaggtctaacatttaagtctttaatccatcttgaattgatttttgtataaggtgtaaggaagggatccagtttcagctttctacatatggctagccagttttcccagcaccatttattaaatagggaatcctttccccattgcttgtttttctcaggtttgtcaaagatcagacaattgtagatatgtggcgttatttctgagggctctgttctgtcccatagatctatatctctgttttggtaccagtaccatgctgttttggttactgtagccttgcggtatagtttcaagtcaggtaatgtgatgcctccagctttgttcttctcgcttaggattgacttggtgatgtgggctcctttttggttccatatgaactttaaagtagttttttccaattctgtgaagaaaggcattggtagcttgatggggatggcattgaatctgtaaattaccttgggcagtatggccattttcacaatattgattcttcctacccatgagcatggaatgttctttcatttgtttgtatcttcttttatttccttgagcagtggtttgtagttctccttgaagaggtccttcacatcccttgtaatttggattcctaggtattttattctctttgaagcaattgtgaatgggagttcactcatgatttggctctctgtttgtctgttgttagtgtataagaatgcttgtgatttttgtacattgattttgtatcctgagactttgctgaagttgcttatcagcttaaggagattttgggctgagacaatggggttttctagatattcaatcatgtcatctgcaaacagggacaatttgacttcctcttttcctaattgagtaccctttattcccttctcctgcctgattgccctggccagaagttccaacactatgttgaataggagtggtgagagagggcatccctgtcttgtgccagttttcaaagggaatgcttccagtttttgcccattcagtatgatattggctgtgggtttgtcatagatagctctgattaatatgagatatgtcccatcaatacctaatttattgagagtttttagcatgaagtgttgttgaattttgtcaaaggccttttctgcatctattgagataatcgtgtggtttttgtctttggctctgtttatatgctggattacatttattgatttgggtatattgaaccagccttgcattccagggatgaaatccacttgatcatgatggattagctttttgatgtgctgctggattctgtttgtcagtgttttattgaggacttttgcatcaatgttcatcaaggatataggtctaaaattctctttttggttgtgtctctgcccggctttggtatcagaatgatgctgacctcataaaatgagttagggaggattccctctttttctattgattggaatagtttcagaaggaatggtaccagttcctccttgtacctctggtagaattcggtgtgaatccatctggtcctggactctttttggttggtaagctattgattattgccacaatttcagatcctgttattggtctattcagagattcaacttcttcctggtttagtcttgggagagtgaatgagtccaggaatttatccatttcttctagattttctagtttatttgcgtagaggtgtttgtagtattctctgatggtagtttgtatttctgtggaatcagtggtgatatcccctttatcattttttattgcatctatttgattcttctctctttttttctttattagtcttgctagcagtctatcaattttgttgatcctttcaaaaaaccagctcctggattcattaattttttgaagggttttttgtgtctctatttccttcagttctgctctgattttagttatttcttgccttctgctagcttttgaatgtgtttgctcttgcttttctagttcttttaatcgtgatgttaggttgtcaattttggatctttcctgctttctcttgtgggcattaagtgctataaatttccctctacacactgctttgaatgcgtcccagagattctggtatgttgtgtctttgttctcattggtttcaaagaacatctttatttctgccttcatttcgttatgtacccagtagtcattcaggagcaggttgttcagtttccatgtagttgagcagttttgagtgagattcttaatcttgagttctagtttgattgcactgtggtctgagagatagtttgttataatttctgttcttttacatttgctgaggagaggtttacttccaagtatgtggtcaattttggaataggtgtggtgtggtgctgaaaaaaatgtatattctgttgatttggggtggagagttctgtagatatctattaggtccccttggtgcagaactgagttcaattcctgggtgtccttgttgactttctgtctcgttgatctgtctaatgttgacagtggggtgttaaagtctcccattattaatgtgtgggagtctaagtctctttgtaggtcactcaggacttgctttatgaatctgggtgttcctgtattgggtccatatgtatttagaatagttagctcttcttgttgaattgatccctttaccattatgtaatggccttctttgtctcttttgatctttgttggtttaaagtctgttttatcagagactaggattgcaacccctgcctttttttgttttccatttgcttggtagatcttcctccatcctttcattttgagtctatgtgtgtctctgcaggtgagatgggtttcctgaatacagcacactgatgggtcttgactctctatccaatttgccagtctgtgtcttttaattggagcatttagtccatttacatttaaatttaatattgttatgtgtgaatttgatcctgtcattatgatgttagctggttattttgctcattagttgaagcagtttcttcctagtctcgatggtctttacattttggcatgattttgcagcagctggtaccggttgttcctttccatgtttagtgcttccttcgggagctcttttagggcaggcctggtggtgacaaaatctctcagcatttgcttgtctgtaaaggattttatttctccttcacttatgaagcttagtttggctggatatgaaattctgggttgaaaattcttttctttaagattgttgaatattggcccccactctcctctggcttgtagggtttctgcctaaagatctgctgttagtctgatgggcttccctttgagggtaacccgacctttctctctggctgccgttaacattttttccttcatttcaactttggtgaatctgacaattatgtgtcttggagttgctcttctcgaggagtatctttgtggcgttctctgtatttcctgaatctgaacgttggcctgccttgctagattggggaagttctcctggataatatcctgcagagtgttttccaacttggtcccattctccccatcactttcaggtacaccaatcagacgtaggtttggtcttttcacatagtcccatatttcttggaggctttgctcatttctttttattcttttttctctaaaattcccttctcacttcatttcattcatttcatcttccattgctgataccctttctttcagatgatcacatcagctcctgaggcttctgcattcttcaggtagttcttgagccttggttttcagctccttcagctcctttaagcacttccttctgtattgattattctagttatacattcttctaaattttttttcaaagttttcaacttctttgcctttggtttgaatgtcctcccgtagctcagagtaatttgatcgtctgaagccttcttctctccgctcatcaaaatcattctccatccacctttgttctgttgctggtgaggaactgcattcctttgcaggaggagaggtgctctgctttttagagtttccagtttttctgttctgttttttccccatctttgtggttttatatctacttttggtcttttatgatggtgatgtaccgatgggtttttggtgtggatgtcctttctgtttgttagttttccttctaacagacaggaccctcagcttcaggtatgttggagtaccctgccgtgtgaggtgtcagtgtgcccctgctggggctgcctcccagttaagctgcttgggggtcaggggtcagggacccacttgaggaggcagtctgcccattctcagatctccagctgtgtgctgggagaaccactgttctcttcaaagctgtcagacagggatatttaagtctgcagaggttactgctgtctttttgtttgtctgtcccctgcccccagaggtggagcctacagaggcaggcaggcctccttgagctgtggtgggctccaccctgttcgagttccccggctgctttgtttacctaagcaagcctgggccatggtgggcgcccctcccccagcctcgctgctgccttgcagtttgatctcagactgctgtgctagcaatcagtgagactctgtgggcgtaggaccctccaagccatgtgtgggatataatctcgtggtgtgccgttttttaagtccgtcggaaaagcgcagtattagggtgtgagtcacc

SEQ ID NO: 10696 - DNA, 6044 bp, Homo sapiens
ttgttttgttttttttttttaatttattattattatactttaagttttagggtacatgtgcacaatgtgcaggttagttacatatgtatacatgtgccatgctggtgtgctgcacccactaactcatcatctagcgttaggtatatctccccatgctatccctccccactttccccaccccacaacagtccccagagtgtgatgttccccttcctgtgtccatgtgttctcattgttcaattcccacctatgagtgagaatatgcggtgttgggttttttgttcttgtgatagtttactgagaatgatgatttccaatttcatccgtgtccctacaaaggacatgaactcatcattttttatggctgcatagtattccatggtgtatatgtgccacattttcttaatccagtctatcattgttggacatttgggttggttccaagtctttgctattgtgaataatgccgcaataaacatacgtgtcatgtctctttatagcagcatgatttatagtcctttgggtatatacccagtaatgggatggctgggtcaaatggtatttctagttctagatccctgaggaatcgccacactgacttccacaatggttgaactagcttacagtcccaccaacagtgtcaaagtgttcctatttctccacatcctctccagcacctgttgtttcctgactttttaatgattgccattctaactggtgtgagatggtatctcattgtggttttgatttgcatttctctgatggccagtgatggtgagcattttttcatgtggtttttggctgcataaatgtcttcttttgagaagtgtctgttcatgtccttcacccactttttgatggggttgtttgtttttttcttgtaaatttgtttgagttcattgtagattctggatattagccctttgtcagatgagtaggttgtgaaaattttctcccattttgtaggttgcctgttcactctgatggtagtttcttttgctgtgcagaagctctttagtttaattagatcccatttgtcaattttggcttttcttgccattgcttttggtgttttagacatgaagtccttgcccatgcctatgtcctgaatggtactgcctaggttttcttctagggtttttatggttttaggtctaacatttaagtctttaatccatcttgaattgatttctgtataaggtgtaaggaagggatccagtttcagctttctacatatggctagccagttttcctagcaccatttattaaatagggaatcctttccccattgcttgtttttgtcaggtttgtcaaagatcagatagttgtagatatgcggcattatttctgagggctctgttctgttccattgatctacatctctgttttggtaccggtaccatgctgttttggttactgtagccttgtagtatagtttgaagtcaggtagtgtgatgcctccagctttgttcttttggattaggattgacttggcgatgtgggctcttttttggtttcataggaactttaaagtagttttttccaattctgtgaagaaagtcagtggtagcttgatggggatggcattgaatctataaattaccttgggcagaatggccattttcaagatattgattcttcctacccatgagcatggaatgttcttccatttgtttgtatcctcttttatttccttgagcagtggtttgtagttctccttgaagaggtccttcacatcccttgtaagttggattcctaggtattttattctctttgaagcaattgtgaatgggagttcactcatgatttggctctctgtttgtctgttgttggtgtataagaatgcttgtgatttttgtacattgattttgtatcctgagactttgctgaagttgcttagcagcttaaggagattttgggctaagacaatggagttttctagacatacaatcatgtcatctgcaaacagggacaatttgacttcctcttttcctaattgaataccctttatttccttctcctgcctgattgccctggccagaacttccaacactatgttgaataggagtcgtgagagagggcatccctgtcttgtgccagttttcaaagggaatgcttccagtttttgcccattcagtatgatattggctgtgggtttgtcatagatagctcttattattttgagatacgtcccatcaatacctaatttattgagagtttttagcatgaagggttgttgaattttgtcaaaggccttttccgcatctattgagataatcatgtggtttttgtctttggttctgtttatatgctggattacatttattgatttgcgtatattgaaccatccttgcatcccagggatgaacccacttgatcatggtggataagctttttgatgtgctgttggattcagtttgccagtattttattgaggatttttgcatcaatgttcatcaaggatattggtctaaaattgtcttttttggttgtgtctctgcccggctttgctatcaggatgatgctggcctcataaaatgagttagggaggattccctctttttctgttgattggaatagtttcagaaggaatggtatcagttcctccttgtacctctggtagaattcagctgtgaatccatctgttcctggactctttttggttggtaaggtattgtttattgccacaatttcagatcctgttattggtctattcagagattcaacttcttcctggtttagtcttgggagagtgtatgtgtcaaggaatttatccatttcttctagattttctggtttatttgcgtagaggtgtttgtagtattctctgatggtagtttgtatttctgtgggattggtggtgatatcccctttatcattttttattgcgtctatttgattcttctctctttttttctttattagtcttgctagcggtctatcaattttgttgatcctttcaaaaaaccagctcctggattcattaattttttgaagggttttttgtgtctctatttccttcagttctgctctgattttagttatttcttgccttctgctagcttttgaatgtgtttgctcttgcttttctggttcttttaattgtgatgttagggtgtcaattttggatctttcctgcttcctcttgtgggcatttagtgctataaatttccctctacacactgctttgaatgcatcccagagattctggtatgttgtgtctttgttctcgttggtttcaaagaacatctttatttctgccttcatttcgttatatacccagtagtcattcaggagcaggttgttcagtttccatgtagttgagcggttttgagtgagtttcttcatcctgagttctagtttgattgcactgtggtctgagagacagtttgttataatttctgttcttttacatttgctgaggagagctttacttccaagtatgtggtcaattttggaataggtgtggtgtggtgctgaaaaaaatgtatattctgttgatatggggtggagagttctgtagatgtctattaggtccgcttggtgcagagctgagtccaactcctggatatccttgctaactttctgtctcgttgatctgtctaatgttgacagtggggtgttaaagtctcccattattattgtgtgggagtctaagtctctttgtaggtcgctcaggacttgccttatgaatctgggtgctcctattttgggtgcatatatatttaggatagttagctcttcttgttgaattgatccctttcccattatgtaatggccttctttgtctcttttgatctttgttggtttaaagtctgttttatcagagactaggattgcaacccctgcctttttttgttttccatttgcttcgtagatcttcctctatccttttattttgagcctacgtgtgtctctgcatgtgagatgggtttcctgaatacagcacactgatgggtcatgactctttatccaatttgccagtctgtgtcttttaattggagcatttagtccagttacatttaaaggtaatattgttatgtgtgaatttgatcctgtcattatgatgttagctggttattttgctcattagttcatgcagtttcttcctagtctcgatggtctttacattttggcatgattttgcagcggctggtatcagttgttcctttccatgtttggcacttccttcaggagcacttttagggcaggcctcgtggtgacaaaatctctcagcatttgcttgtctgtaaagtattttatttctccctcacttataaagcttagtttggctggatatgaaattctgggttgaaaattcttttctttaagaatgttgaatattggcccccactctcttctggcttgtagaatttctgctgagagatctgctgtcagtctgatgggcttccctttgtgggtaacccgacctttctctctggctgcccttaacatattttccttcatttcaacttcaatgaatctgacaattatgtgtcttggagttgctcttctcgaggagtagctttgtggcgttctctgtatttctgaatctgaatgttggcctgccttgctagattggggaagttctcctggatgacatcctgcagagtgttttccaacttggttccattctccccatcactttcagttacaccaatcagacgtagatttcgtctttacacgtagtcccatatttcttggaggctttgctcgtttctttttattcttttttctctaaagttcccttcttgcttcatttcattcacttcatcttccatcgctgataccctttcttccagttgatcgcatcggctcctgaggcttctgcattcttcacgtagttctcgagccttggtcttcagctccatcagctcctttaagcacttctctgtattggttattctagttatacattcttctaaacttttctcaaagttttcaacttctttgcctttggtttgaatttcctcctgtagctcggagtaatttgatcatctgaagccttcttctctcagctcgtcaaagtcattctccgtccagctttgttccgttgctggtgatgaattatgttcctttggaggaggagaggcgctctgcgttttagagtttccagtttttctgctctgttttttccccatcttggtggttttatctacttttggtctttgatgatggtgatatacagatgggtttttggtgtggatgtcctttctgttttagttttccttctatctgacaggaccctcagctgcaggtctgttggagtacccagccctgtgaggtgtcagtctgcccctgctggggggtgcctcccagttaggctgctcgggggtcaggggtcagggacccacttgaggaggcagtctgcccgttctcagatctccagctgcgtgctgggagaaacactgctctcttcaaagctgtcagacagggacatttaagtctgcagaggttactgcggtctttttgtttgtgtgtgccctgcccccagaggtggagcctccagaggcaggcaggcctccttgagctgtggtgggctccacccagttggagcttcccggctgctctgtttacctaagcaagcctgggcaatggcgggcgcccctccccaagcctcgctgccaccttgcagtttgatctcagactgctgtgctagcaatcagtgagactccatgggcgtaggaccctccgagccaggtgcgggatataatctcctggtgcggcgttttttaagcccgtcggaaaagcgctgtattcgggtggaagtgacccgattttccaggtgccatctgtcacccctttctttgactaggaaagggaactccctgactctttgcgcttcccgagtgaggcaatgcctcgccctgcttcggctcgtgcatggtgcgcgcacccattgacttgcgcccactgtctggcactccctagtgagatgaacccagtacctcagacgaaaatgcagaaatcacccatcttctgcgtcgctcacgctgggagctgtagaccagagctgttcctattcggccatcttggctcctccc

SEQ ID NO: 10697 - DNA, 492 bp, Homo sapiens
tttttcttataaatctgtttaagttctttgtatagtctggatattagccctttgttgaatggatagattgcaaaaattttctcccattctgtaggttgcctgttcactctgatgatagtttcttttgctgtgcagaagctcgttagtttaattagatcccatttgtcaattttggcttttgttgcaattgcttttggtgttttagtcatgaagtctttgcctatgtctatgtcctgaatggtattgcctaggttttcttctagggtttttatggttttaggtcttacatttaggtccttattcatcttgagttaatctttgtataaggtgtaaggaagaggtccagtttcagttttctgcatatggctagccagttttcccaacaccatttattaaatagggaatcctttccccattgcttgtttttgtcaggtttgtcaaagatcagatggttgtagatatgtagttttatttctgagacctctgttctgt

SEQ ID NO: 10698 - DNA, 872 bp, Homo sapiens
ctgagttcattttaaaaaactgcatgaatcctttctagcagaccagagccacttgttgtcttggggtgatgggcttttacatgtagctggtctttctgtttaaacccaaaggatgggaaagtgcccttgacagctttcagcaaggatctctagcacttacaaaaagggggctttaggggagtcatgccaatctatggaggtcactgggctggaaccgatcaggctttcaacaaaaaaagtgttgatagaaatggacaatgggattccaggtactgaatccatatcattttaaactgtttatctttaggacttggcgcatctgctagagaaaaacagcaaatagcacatctaaaaacagcttggtggttttttgcatctttagagaaagctgctttaggagggtctgcagtatagacctcctgtatctgcaaggtgacagacggaggaccccaagccgtgggaactggtcacctactgtggggcccaggcctctccccactgcaggtcaagcccatcttgaagccaccacctgcttagtgctcaaggtcaccgctctcagcctggtccaggtgctgaaggatcatctcgacacgagggggcgccatctcctcacattgtgaggaagcctctggcatcgggatgaattttgttctagagctttccttctacaaacctcggtgttgttctcgctcacatgcaagaaagaatcggagtattgtgaggtctgcaaatgaaagggtcccttgccaaatgctctaatccaggctcctggtgtttgcgggcccagatagctacagtttgttgtcccctggctgcaaaccttctaggagtttctagctttagaaaccctagaaacaaaccccttctaatgt

SEQ ID NO: 10699 - DNA, 395 bp, Homo sapiens
tcaagtagctgggaccacaggcgcacatcatcacactcggctactttttgtattttttgtagagatgaggtttcatcatattggcaaggctggtcttgaactcgtgagctcaagcgatttacctgcctcagcctcccaaagtgctgggattataaatgtaagccatcatgcttggcctgaaccaattttaacttttaaaaatcaccttttctttgttatacattcaagaagacactgagatgggcattagactaacatcaagctaagttgcatataatttcataaactctgagctttcttgaatatattttttaatttgtgggaattccttgtacacctgagccccaaagacacagcaaactccagtcatagcttggcaattaaatgaagcaatg

SEQ ID NO: 10700 - DNA, 274 bp, Homo sapiens
gaaattaaatacctctgttattgatgaagccatattttaaatattatcaccactaaactcagttaaatatttccactgttaactacaaggttcaaatgcttggatattatagaagatatttgacttcaaagataaacgctacaattttgggtcataacaaatagcttttagaaggggaaaaaataagtcttgggaggaaaataagcagtctcttagtttaatatagcggttggcaaatatagatgcttaaaagttctgaaaatccccattgcag

SEQ ID NO: 10701 - DNA, 703 bp, Homo sapiens
gtgtcttggtacagctcgtggctgtggtcagtgtggtggagggtaggtcttctcagatggtaacatgcatgagagtcacctggggatcacattaacatgcagattctgattccctggatctgggtgggacctgaggttctgcatgtctaacaaactcccagagaacacccatgtagcaagagtacagacaaaaggattcaaagcgaagggactgcaagaaccatggaaccagcctcccacgattttgcggatgacgaacccgagccttggggagtttcagaggccatggagagatgaagtataataaacagcatagcagttgtatgttgagccaagaatcagacatgcacagaactgctgattggaaaattaaatctgtttctcatagccctggtgtggcaaaatgcctagctggaagtgggtgaccgcttgatttacagtgggcctcctgggtagggaaaattagtccatcccatttacagctacttccaatgcagctgtgtcaggggagagagaagaaaggacatggaagagagcgtagaggtatgatcttcagtcctttcaggcaggcacataagtaaatttttatttaaaagataagaattggtcatatgcgaatctcctgttagataagattaaaaacaaatttccattttgtggagaagttgcagataaatatttttccatgggatccaaaagaatc

SEQ ID NO: 10702 - DNA, 274 bp, Homo sapiens; identical to SEQ ID NO: 10700

SEQ ID NO: 10703 - DNA, 703 bp, Homo sapiens; identical to SEQ ID NO: 10701

SEQ ID NO: 10704 - DNA, 349 bp, Homo sapiens
tggagatagagtctcgccctgttgcccaggctggagtgcagtggcaccatcttggctcactgcaacctccacctcctgggcccaagaaattctcccacctcagcctcccaagtagctgggactacaggcatgtgccaccatgccctgctaatttttgtattttttggtagagatggggtttcaccatgttggccaggctggtcttaaactcctgacctgaagtgatccaccacgcccagcctgcctttgtcttttatgtctagtttcttaaatcagtaatgttatctgtccacttcagcaatatgtgctactcaccttaaccctagggttatccaacaatccaagaaaa

SEQ ID NO: 10705 - DNA, 274 bp, Homo sapiens
gcagtcacaaaaagattaaaaacaaaaaacaaacaacaaacaaataccgagatagaccacccatgtaccaaaggtgccataaacgttgagaccattctataaaaactgtaatacacagaaaacaaatgattaagaacaagtatatccaaaacacttaaccacagctcaaaagctatcagaaggcagcatgatgtgatgtagggatactatttctgtccagcacttggagtagcgaaggaacaaagtttccggtgagaaatggaagtctcagacc

SEQ ID NO: 10706 - DNA, 537 bp, Homo sapiens
tgggttggttccaagtctttgctattgtgaatagtgccacaataaacatatgtgtacatgtgtctttatagtagaatgatttataatcctttgggtatatacccagtaatgagattgctgggtcaaatggtatttctaattctagatccttgaggaattgccacactgtcttccacaatggttgaactaacttacacccccaccaacagtgtaaaagtgttcctatttcaccacatcctctccagcacctgttgtttcctgactttttaatgatcaccattctaactggtatgagatagtatctcattgtggttttgatttgcatttctctaatgaccagtgatgatgagcttttttttcatgtttgctggctgcataaatgtcgtcttttgagaagtgtgtctgttcatatcctttgcccactttttgatggggttgtttttttcttgtaaatttaagttctttgaagattctggatattagccgtttgtcagatggatagattgcaaaatttttctcccattctgtaggttgcct

SEQ ID NO: 10707 - DNA, 516 bp, Homo sapiens; identical to SEQ ID NO: 9390

SEQ ID NO: 10708 - DNA, 137 bp, Homo sapiens
tttgatgatggtgacgtacagataggtttttggtgtggatgtcctttctgtttgttagttttccttctaacagtcaggaccctcagctgcaggtctgttggagtctgctggaggtccacttcagaccctgtttgcct

SEQ ID NO: 10709 - DNA, 561 bp, Homo sapiens
agaattttcagcttttctgctctggtttctccccatctttgtggttttttctacctttggtctttgatgaacctgaccttcagatggggttttggtgtggatgtctcttttgttgacgttgatgctattcctttctgtttgttagttttccttctaacagtcaggaccctcagctgcaggtctgttggagtttgctggaggtccactccagaccctgtttgcctgggtatcaccagcagaggctgcataacagcaaatattgcagaacagcaaatgttgctgcctgatccttcctctggaagcttcatctcagaggggcacctggctgtatggggtgtcagttggcctctactgggaggtttctcccagttaggctacttggtggtcagggacccacttgagaaggcagtctgtctgttctcagatctcaaactctatgctgagaggaccactgctctcttcaaagctgtcagacagggatgtttaagtctgcagaagtttctgctgccttttgttcagctatgccctgcccccagaggtggagtctacagaggcaggcag

SEQ ID NO: 10710 - DNA, 146 bp, Homo sapiens
tgcacccactgtcctgcgcccactgtctggcactccctagtgagatgaacctggtacctcagatggaaatgcagaaatcacccgtcttctgcatcgctcacgctgggagctgtagaccagagctgttcctattcggccatcttcgc

SEQ ID NO: 10711 - DNA, 332 bp, Homo sapiens
tttttaatttatgttacattttggttcacttttaatagtaaatgatatctcaaatgtttagacatttagctgattgtaaaacgttagctaaaatggatcttctcttgaaatggtgttgccagatttttaaaaatgaatagaaattatattctttttcgtttttaaaccatcacttttaccttctgagtttctggaaattgaggtgcacctgtatatagaaacctttgcacttaatttcatttctagttcacgttctatacttgtctcttctcattatagcaattagccttaaaatctaatttccttggctttattcagtcctattgaaacag

SEQ ID NO: 10712 - DNA, 143 bp, Homo sapiens
ggcatggtggcgcacacctgtaattccagctactcaggaggctgaggcaggagaatcacttgaacccaggaggtggagtttgcagtgagccaagatcgcgccactgcactgcagcctgggcaacagagtgacactctgtctca

SEQ ID NO: 10713 - DNA, 712 bp, Homo sapiens
aacttctttgccatgggttcgaactttctcctttggctcagagtagtttgatcgtctgaagccttcttctctcaactcgtcaaagtcattctccatccagctttgttccattgctggtgaggaggtgcgttcctttggaggaggagaggtgctctgatttttagaattttcagtttttctgctgttttttccccatctttgtggttttacctacctttggtctttgatgatggtgacatacagatggggttttggtgtggatgtcctttctgtttgttagttttccttctaacagtcaggaccctcagctgcaggtctgttggagtttgccggaggtccactccagatgctgtttgcctgggtatcagcaggggaggctgcagaacagtggatattggtgaacatcaaatgttgctgcctgatcgttcctctggaagttttgtctcagaggagtacccggccatgtgaggtgtcagtctgcccctacggggggtgcctcctagttaggctactcgggggtcagggacccacttgaggaggcagtctgtccattctcggatctccggctgcgtgctgggagaaccactactctcttctaagctgtcagacagggacatttaagtctgcacaggtttctgctgccttttgtttggctatgccctgcccctagaggtggagtctacagaggcaggcaggcctccttgagctgcgg

SEQ ID NO: 10714 - DNA, 644 bp, Homo sapiens
cagcagaaacttctgcagacttaaatgtccctgtctgacagctttgaagagagtagtggttctcccagcacgcagctcaagatctgagagcgggcagactgcctcctcaagtgggaacctgacccccgagtagcctaactgggaggcaccccccagtaggggcagactgacacctcacacagccgggtactcctctgagacaaaacttccagacgaacgatcaggcagcaacatttgctgttcaccaatatctgctgttctgcaggcttcgctgctgatacccaggcaaacagggtctggagtggacctccggcaaacaccaacacacctgcagctgagggtcctgactgttagaaggaaaactaacaaacagaaaggacatccacaccaaaaccccatctgtatgtcaccatcatcaaagaccaaaggtagataaaaccacaaagatggggaaaaaacagagcagaaaaactgaaaattctaaaaatcagagctcctctcctcctccaaaggaacacagctcctcaccagcaacggaacgaagctggacagagaatgactttgacgagttaagagaagaaggcttcagatgattaaactatgatgagctaaaggatgaagttcgaacccatggcaaagaagtt

SEQ ID NO: 10715 - DNA, 48124 bp, Homo sapiens
gtgtgtcttgtgatggaatatgctgaagggggctctttatataatggtgagtgtcattagacctgtctttatctagtggattaaaataatttgaaaaattttaatataaaccctaagttgtttaacattcttcacaatttgccgtcagagtcccaaaagggcataatttttaaaaatctgctaagaataaaaatggaaagataagattctataacattagtatgtgaaatttagaggtctatcaattttttaagtagatggtactttgcatttcattaaaagcatttaagtaaaagtttactttttaaatagattttaaaatatcttcagatttttttctttttgccctctcataactttgagcctcctcattttagaattctttaaccatatttcgatttcactctgctttattttttcttttttttcaaaaaaaaatgtgaaaactcacttcacacaaccttttatttgtagtaatgaaaaaaaactttgtgtagttacattggagaacagagttcttttaccctaaaaataccaaccatatgcagaaatgtattgtctcttgtagcaccagttatataaaacaaattgttacattttattttttaattagtattattttatgtaaacttttacttatatttactgcccatgtgttcatcattgtgatggatatctaataccccattgtcttatttgattgaactacttctggtttttagccattacagaaaatacaggtgcaaacatcttgatatacattgttttgtttctttctgtactgttctctgcctctctcttgtagtagtgtgccataagactgctcataatttatattactttataaaagtctttatctgtttgaaaaaatgtggtaatgtatattgattttacttcaatgtaggaataacatttaatagatgtactattaaatgttaatatcatggcaattatccactcaaaattagtagatattttcatcctttttatttagaagaaaaattaaaaggccaggcatggtggctcactcctgtaatcccagcactttgggaggccaaggcaggcagatcatgaggtcaagagatcaagaccatcctggccaacatggtgataccctatctctactaaaaatacaaaaattagctgggcgtggtggcacacgcctgtagtcccagctactcgggaggctgagccaggagaatcgcttgaacccaggaggtggagtttacagtgagccaagatcgcaccactgcactccagcctggcgacaaagtgagagtccgtctcaaaaaacaaaaagaaaaaagaaagtaaaaaattaaaagcaggactgatggagcatatgtatatgtagaaaaatacccagtcatgtgttctgatagtgcttgcattcacattgtgtcttttgttatatgcaataaagttctttttagtttgtgcctttctttcgcagtgctgcatggtgctgaaccattgccatattatactgctgcccacgcaatgagttggtgtttacagtgttcccaaggagtggcttatcttcacagcatgcaacccaaagcgctaattcacagggacctgaaaccaccaaagtaagttataataatgtgacacccctcagcctcttcctccttctctctcactctcaccaccccgaacccactctctaattcaagctcattattgtacaggagtttctcttttctctatttggcttactcagtgtttacttttaactcaccttcatcatttagtcatttatctaagcttgtattttagatgttgtctttagtgggatttttatttttggtaacctctaccttagattagcatacttctagaatctgttagcctataaaaatctcattttgtgcctgcagtatataatgttgctgttagacaattccttgggggcagagataggtctgacgtttttcttgctgtgtccctaacacctagcacataaacattctacagaaatttgcagagttgttattacttgctctttcagaggaaagtaaaagggcatttcttggcatctgggtagaaattgaaaatattctggattcttcataatgtgaatacttgggactttaaaaaacttataaattccttagataagtattttaaaagactaaaactttgggggttttgtttgtataggtattcagttaaagaaaacatacacataaaacatattgtttccttttctctctttttttttcttttatgcacctgtgacacagtaaaaatagtctccacgtatcttctttaccctccccccaagctcccaccccagcacattagtctttacagaagaggtttcccttaggaaatcagtatagtcttcagttattccattctcttgatactggttaaagcattaaaacatcccttctgggtgcaacttgtcactctcaggtctaatctgatatactctacataggttccaactcttagaatcactgttcttgctatgtatcttatctctactcccaaacttaaactgatttctgtttccccaggtcactgataaaataatgtttaagcttttatttttcctgaggctattatcttagttacctgccttaactaatgaaaaaatcacttagcctttttttcttcattgtgaatattcagtcatcctttttccactatattaacagagttgaattattaaagcaaacttatgagaatcacagctcttaaccagcaacaaattgacaaatgatccaaaggatataggcaagcatcagatacagccaaagcattcttttcctaaaagagtctgaacgcatctgatgcaacacccaaaagtatcccttttctcctcgttacagtatgttttggctttggaataaatgattagttattgaacaatatatggagaaatatcttacaaaaggaagtcatttccattttctaacatcttttacattgcactaattacatggtttaaatgactatccctaatcttcatccaactacaccccatgaattttaggtttatttaatcaacctagttagaccagatatatccttctaaaatcatttgtagatagagattctccttttgctagtaaataccattaacatatttacagaaggtctggtctaggtcatttattccaggcctctccatgattggattcatcttgcaaatcgtctttggagcccctggtatacaagttggactttagaatcagaattgattctagttcagaaagtactgggtaaaagaaattctttggaatggctatgattttatatataattggacatacatgaatacctgctatatctttattttttaattatttttattattattattattttttattttgagacacagtctcgctctgtcgcccaggctggagtgcagtggcgcaatctcagctcactacaacctccacctcccgggttcaagcaattctcctgcctcagcctcccaagtagctgggactacaggcatgtgccaccatgcctggctaattttttgtatttttagtagagacagggtttcactgtgttagccaggatggtttcaatctcctgacctcgtgatctgcccgcctcagcctcccaaagtgctgggattacaggcctgagccactgcacccggccaatacctgctatatcttattgtcagtggaaaacctacagattctgtggtcaggaagagttcctcaaaatggtatctaaagaaggtacctgatgatctagggaggtgttttatacactatcaagttgtgcttgtgcttgtattttatcttttgcaagtttattcacatttacattagaaattaaaatgtgtttttaatcttaacagtgtgaaagtaagcctacaaagataatttaagttcagatttcagtgagccctgaatttcctgttcaaggctggtgaacttttgaagtcgagtaaaggagtactaacataaaactcattcaggaaaattatcttgaatcatcagaaattatcttgatatcttgaatataccagtataaaacaaggaaactagttacagagttcttataattttcttgggtaaaaagtgtaagagtttgaacaagaacattgagatgcgggaaaaaagctttgttgaagtacatatagaggtatactggatttagcattcttttcactggaatgattatgagagtctttttggtattatggaactgtgaatagtagtttatctgacttattttagtcacattggactaaaagagaagaaatttccaaatagtctctccagatgtaaaaagtttataaaacttgtaattaaaatgaattcctatgtactgctattggatattactacaatgtgatggtgcaaattatattacccatttctatttctctttgtcatgaaaagcaaaaccttgtaagtaagagtatgctacttggtgactgtagttgggtaatagtacacctaggaaagtccgaatcttaagttcagaaaattttccagaaatctctcattaggtcattttagctataatagatttgtattcctcccacacattcatagtctaagcacaaaaatggttttgggattgaacatttttagaagtatcttcaaaataaagacattaaattacagaccatttttttccttctatattggattattttctttatatagtgttactattttttaagtaatacatatttatgattaaactcccatttcaggataccgtaatgttgacctaacagaagttttttaaaccccacgttttattttggccagatagaagtatgatcaggaaagattttggagctagagatgaagacatcagaatgtgagtctagcagccttccaaagagagctaggttatggttaattaatttttgcttattatttctctgaactattaggcttttatagtgaccaagtaaattagtcatttcacagaagttgaatgataacattcattttgcttaaccttttccatttccacaaatgtctcttcttttattgtagaataaaatgttggccttgtaacttttgatgttttttgtttttttttaaacagcttactgctggttgcaggggggacagttctaaaaatttgtgattttggtacagcctgtgacattcagacacacatgaccaataacaaggggagtgctgcttggatggcacctgaagtttttgaaggtaaaatggcaaaagtatggtatgtttgataatctccctcactccttgtgaattcatatgtttttatagattttccccatttccatggttttatttctgcataatacataaagtatacaatgaaatctaaggggatattaaatatagtgttatatcctaaattttatagtaagatttaaatcttctatgcttctaagcatatgtacagttgatcctcattgttcaccaatttcttaattgcaaaattgcctatttgctaacatttatttgtaaccccaaaattaatactcatggtgctttcatggttatttgcagacagtgctttcatgtactcgcagacagtgtgcatgcgctgagcagtgcaaattttgagtcatctaacgcatgcttccagctgaggttgaacaagacaacgtttttccgtcttgtttcagctctcatgctgtaagcaggtgtccttttttgtgctgttcagagccctttttcatttttgtgatttttgttggtaattttgctacttaaaatggccctcaagcatagtactgcctaagtacaagaaggctatgatgtatcttaacagacaatatacatatgttaaattatcttcattcaggcatgagttacagaaatgttgactatgagttcaatggtaataaatcaacagtatatatgaataaggtgtctttaagcagaaatacgcatgaaacaaggctatatattgatcagttgacaaaaacatggtgaccagaggcacacaggaacctacccctgtattttccttaggagcagtgattcagtgttcactaattcagtgttctcagaaactttatagaacataaataccaggaataatgagaattaactgtgcttttgtattggtttcctagcaattaaaaattgagagccctaaagtttaaatgaggatgccttaaaaagaatgcaaatagctgggcgcggtggctcaggcctgtaatctcagcactttgggaggctgaggtgggcggatcatgaggtcaggagatcgagaccatcctgtataacacggtgaaaccccatctctactaaaactacaaaaaattcgccgggcgtggtggcgggcgcccgtagtcccagctactcgggaggctgaggcaggagaatggtgtgaacccgggaggcggagcatgcagtgagccgagatcgtgccactgcactccagcctgggtgacagagcaagactccatctcaaaaaaaaaaaagaatgcaagtaattggacagaaataagatactaagaattacaaataaatgtcaagcttatatgtttaccttcttttatacctccatatgtcactgaagttttaaaagagttgtctgtaaattatatgctaggtttctgtataaaaacatcaaattatcttttaaatgaaagaagttgaactgaaggtatgtgatttgtatgttaggaagtgtaaatgcccataaaattcagatacattcagttaatcagactctggttatagcttatttctttcagttttgatgactttaaagggttttctgtttgtttttagccaccccagaggaagagaaattgcaatgcaactagtcacctgagtggagctcttttgccctaaaattcaatttagtaataaatgaataatcaggtgttatattacacaagattaaataatgcctcctgtttcatatacagaatgtatacatttgacattgttttaaaattatttacttatttaatatacctttatgtgagttaaaatgacccaatgttactgtatgtggagagcaaaaagatttgtttatacaaaagattaattttattgctctagacaacccttaattgtctagagcaacaaaatgcagactgttaggctgtgtaagtttcttcatttctgaaagatgtcagtcaacctgtagcccaaattagactgtagcatggttgtagtgctatattacagtgtactgcttagcatgtaaagctatagctataataattgttcattcttacagtgagttgagtgtttgtttgtttttgggagattatgacgggtgcttattgtgctggctgattcaaccacctacttagtttgtaaattttgctgtgtaactcaggttatccataattttcgttacttacaacgtaatgtttaagtttataaattaagaatttcccttcaccatatattgaggaaaaaactgtaacactaaattagaaagttcttctgctttgatagcagagtagtgctgtctgtcagagtgggaagaaaatttaagattaaaatgtaacagaaaggaggccaggcacaatggctcatgcctgtgatcccagcgcctcgggaggccagagcaggaggatcagttgagcccaggagtttgagaccagcctgggcaacatggcaagaccccatctctacaaaaaatttaaaaaattaaccagttgtgccagcgcatgcctgtagccccagctactcaggaggatcacttgagcccaagagtttgaggctacactgagctccagcctggatgagagtgtgagatcctgtctcagaataaaataataataaacaacataaaggaatgtacagatgtttcatactctgccccagagaaagtatcagtctaaatacataaaagtcaagtcctgtgcctcttgatgaaaaaactgcctcttgatgaaaaaagatagaaaataactgagtttctgaagtagttttttagtgtattgttgatacttaattcatttaaaaatgtacttgttgaaaagacaaagtacttcagaaagagtagtttcttagttctacatgtgacagcctcatttttatccctgatacccattctcaaaatttaagccattgtttctgtaagtcatgtggaaaaatagtctttaggttatatactaccttttttttttctaggtagtaattacagtgaaaaatgtgacgtcttcagctggggtattattctttgggaagtgataacgcgtcggaaaccctttgatgagattggtggcccagctttccgaatcatgtgggctgttcataatggttcgtaaaaagaaatttttcttaaaagtactttttgtgttttctacttggaagactactcctgtccccttccctaaagaatatcatttatctctaacattaaaatgtacaattctttgttaagagactgctttgctattatcagactctgccctgtccctgccccagagtccagcagagcaggattgagagtagtcctggtctacacatgcggctgaggatgttcactggctccgctgattagggaaaggccatcagtacgcaacctagacagttggctctctcttagggagaagcatcaggctggatcatggaaaaaataaaaaaatacatacataaaatctctgacatggttaatataactggagagttatagcccttttctcctgaagaagcaagggcctcatcaaggagaagaagcaaagaataataatgcttcacatatttttcctgtttatattctcacccacccttagaaggtgagtactgttgcctcattttacagattaggaaactgaggcctagagaggttaaataacttgcttaaggtcacaagattagtaagtggtagagctgggattcaaatccagatgcttctgacttgaatgctcatatcttaagtcatattgacttatggactcaatgtccttgcatctgtcctgtttcttttatagttctggtaatgttgtttttaaccacatatgatgttagaatgcatcctcttcattagtaaagttactttacatttgcttgggaaaatagcttttcatgaaggaaaattacttaccttcttaattttagcgccactcttagttatttcatttctatgccttgtttataatcatgtgactaatggccattttttacattattccacaagtctaaaaacaaatgtctgcctaattatttaggtcattcatagatttatcaaacagtaccatcatctgagtaatcttagctgtttttaccagtttcctatactgcctttaatattactaccattagtatcattgtggagactgttcagcattgaccaggacagcttgcttgcttgctttctatcagttgtcagtaaataattgaacgtccgtgaagtaaagagtaaaagaactaacttgttaattgataaaattacaaagcacttttattactccaaattacagatcttaaactacaagatctataaaataaataccactttggaaatacgtacaaagagtttgcatcattctttgggtaaatacattcttccccccttcctctcattttcaattgtaggtactcgaccaccactgataaaaaatttacctaagcccattgagagcctgatgactcgttgttggtctaaagatccttcccagcgcccttcaatggaggaaattgtgaaaataatgactcacttgatgcgggtataatccttcttttgaggggctttggatttaggggaatttaatatgtgctgagttttaatggaattttaaaagggatgttattactatattctgctttatatattgctatgttttctaagtgagaatgggcatttattactcatagtcagaagaggaaacatttcgagagggaaaatctagttctttatcactggaaagatggctagactaggtttctagacttgcttttttctttttgcttacattagtggacaagtatgtttgtctctgggcctgttgcctcatttgtaatgtgggagaaactgaaatagatagtctctaaagccatcacaggacttggatatattaatattatgacttcaatacatgataaactaaattttacatttttctgataccaattttcatcaagcatttagtcatttatgcaaggcaataggttgcattctcagacacatttatttgagtgacttttactatttggcctattttcaggtttttatatcccagtaaaaagttaaactttcttctatttagaagaacccttttaaatgattatcaaattttcctagtctgtgaatcaagcgcctttagaattatttggaatattttacgcctctggtttttggtacattaacaaaaactgtgaagtggtatcttggctttaaaaagttcaaatatctatgaaagtgcctgaattttgaaacagtttgttcagtagaagaatcttacaatctccttaaatatagactaagtaatttcctaaatggtaaaacgttgtttattcaatctattgaaaatttcttacgcaaagcagcttgaactaatctactaaaagtttaccatcgtatttggataccagtcatatatagaagcctaggccttaaaggtgtgtgcataagaaaacaacttagtctctgtagtcagattacttaaaactttaggatatataagttattgcagttgtaattttgcttctctgttccttgtctaatttgaggagaatacgtttcctttttttctctaaattctaacatttttgtccagcagatactttgagtattatgcctccagtttgtagaaagacattcataatctatcctcttaatatttaaaatgttctaacaattattctatggtatactagtctcagtcttcagactaacagtcactggaagtttacatcactactgtaagaacatgagtatgttttacataattatgagaaatgatactattttatttcatatgtttctctagagaaatatttgctgttttcttcaagactatctagactccaatgtaagctagattcttaggtaggtgcatggcattgatcaaagttgaaatccaagagtacattattgtaatctttgtaaaataaaaaacttaggcacctacaaatttagtatataacttagggaaaataaaacattaatcaggatttaatttgtattaaggaaattttaagctgtggtttacttttttatatatagtactttccaggagcagatgagccattacagtatccttgtcagtattcagatgaaggacagagcaactctgccaccagtacaggtaaatggatagattggaagagtattgacttgatttttctttcatctctattcccatgaaattataatcaagaagtaatgaataatgtccccatttgcattttaattccttcatttcatatgattgactgcaatttgagtttacaggtgcgtcattcttcatgtaggtaccctgattaaagagttattgaagacctgcttccaagtcttagaattcctacataattatgaataaaaagatggcatattgtattacagtgaatgtcattcttaacttgaaaaatcacttttacatgcatactactagatcaagtagtattagaaattattgtaaatgtatttaaacatttcttcatcacgaacaccctagtttttgttctcttctacagaggctctgatttaagaagctatgttaaaagttccttagttttccgaaatgtgaagtagtagtgggacatgtaatttgtggtcatcaaaaagatagtagaaataatactgtaacttagaaatattgtacttctcaaaatatagtggcattataagcatttcattattaattgaaacttaaagatatgtgtgtgtctatatgcacatgtatttaccctgcatttattgaaaaatacttttactgatctatttctcccacctcaagaatagttttatttattttaagatggttactgcttggctagttattctcaaattccagttttactgaaaatattttgagttgctctgaattctaaaatgtacttctctaaaattctatcatttgtgtctcccacgtcctctaaactctctcttcatttccttactgtgaccttgaattttttgagcctcccaccttttcactggtcctcagtcctcttaggtccttttttctttctccctccacttaattccaatcaactattataattcttttgggaataattttcatctttctagcctctctctcaagcttgcttggctaaaccacaagcctaatgaaagctgacactcggcttactccttgcctgtaccaatgcagctgagtgtggctggagatagcacaggtttactatcctcacgtgcatgtttagtgctattggacagttgtactgtattgtagttcatctctttcctcctatatgtcttaattttatactgtagcctctcctcagacttcaaacacctcctcgccactcctcactctcagctgatcttgtttgctctttctctgagaaaattggagtaatcggaagacagcttccacaacatctgtgcccatctactctgctttcttctgttactctggctaaactatccatacttctggccaaaggtgtacctttctgcctgtgcattatatcccatctgctcctctgagcaattctcccctgtctcttgcatcatcagttttagctttctactggatcattcctaaaacatacgtagtctgtatttgcattcactagcttctcttttccccttctttcttgagctgactccattcagacgtattatgccagtacttcagaattgttcttgtcaaggtcactagttatctctacatcactacatttaaggaatcattttcatttctcatcttgactctcagtagcacttgacctaattcattactttctccttcttacagacagcactttcttcagttggcctccgagataccatactagcctagattccatcttacatctctggccgtctgttctcagttttctttgctggttattcctcatctccccaacctagaaatgttggagtgcccagggcctgctcatttggcttcttcacttatctgtctgcactcatttccttggtaacctcattcattattatggccttatataccatctgttggctcataatgttttccatcttatacctgaactctatactcatatatccaactatttcctttacatctactagaaactcaaacttaatattttccaaactgagttcctgatacttccttcaaactcactcttcctttagtctttccgcatctcaattaatagccctcagttcttctactagctcaggttaaaaaccttaagttattcttgactattagaagactatttaggcatcttggttccttttttgtgctatccttaagtttctcttaaaatgggtttgtttggatatcttcattagcttgaaaagtcttattttatttctgttcctgcctggctagtttataaaagaatgtaagttacataataccaagtgaagcatttgtattatttccagccattagtcataaatgtttctgcttttcctaggctcattcatggacattgcttctacaaatacgagtaacaaaagtgacactaatatggagcaagttcctgccacaaatgatactattaagcgcttagaatcaaaattgttgaaaaatcaggcaaagcaacaggtttgttatgttattacaagtaaaactggtaaccttaccagtagtcacaatattatactaactgaaattaattatttaccatcttctattttataaatcctgaattttcttcctgaaacatgcaaaagagcttacaaatagagacacgtaatgagattctcctaccatttattaccaaatggtttttccttctaatgattgctacctttgccaattctaaatccctatctataataatccctaaatgtaatggttgatggttaaaaatgtaaaatgggtatattttggctgcgctgcccagttagaggagttgttctaagtctatcatttcatgctgttcagatttattatatttttgccattgttgatttttaaaaatatttcaaggagtgagtttattcattttgcctgaggcatttaggttaacgaataattggggcttttagctcccagttctagtgactgccttttcataaagacagtatctgcagcttgctttcccttacccctgtagctccctctcgtacaaacttccctctcctttcagagcagaacaggatctatcagaatcccatttgccatcttcctccttttaggttgcctaagattgctaaatctaaagaacttcagtaattcagattgacctgtaattttaacagagtgaatctggacgtttaagcttgggagcctcccgtgggagcagtgtggagagcttgcccccaacctctgagggcaagaggatgagtgctgacatgtctgaaatagaagctaggatcgccgcaaccacaggtaaaaaggaactacaagtctgaagagtgaaaatgtatataagcctttttggccatggtagtttcagttgtcaaaggttttttgtgtgtgtcttatatttttttttaaataggaagtaggtttacaatatatttttctaagttactagcaatagtttatgcatttatctcaaattccaaataaggaaggtatgacttgtaaaattatttggatgagaaagtatgccttcctcatttacagattttatcaaatgtaattctttctgctcaaacatgagttgaaagtctaagtgagaaattgaaattctgccaaaaccagaatattttggggattttcagtgatactactagatttttgtgctgaactcaaataatagcaaatattttgtttcaaatttaacagaaaaatgtattccagatccatgtatgatttgaccttctatctgcttcttcattccagtgacaaaataatagctaagctggttgtggttaatttttttaattgtaaaataaaatatcataattttattagatcttgaaaaagctagcatttaaattccattgttcagttcttaaaattattaatcatggaagaactggtcagcacaaaaacaattacatgttttgttacttaagtaaactgacaacctaattctgtgaccaggtttcattttagtaatgctggtttaatttggacgtttttggttttttgctgattctttccagggatcagggggagctgattttaaaagtaaacacgtttctgttgtggaaaatgtggaaatgtaaacaagccaaaaaaacttacataattaccccactcagagataaacacttaacatttttgtgtatttaccccatcttttaactatgtatgtgtataaatgtatatattcatgtgtatttgcatcttttttaacttagctaaccaattttttaggtctttttttcacttatttggtttttttctaaatagaatattctcattgtgtgtggagctcttttcagaaagaagttgtcaagatggaccatcatactatacttgtcttcaactaatcatgatcattgattttatcagctactattagaatccattagatataacagaatatccgaaataacagtgtctataacacataagcattatttttcacatataaacaagtctggaggtagtgggctctgtgatcttgaagtaactggtctcctatttctgtgctgtaatccctactgtatagcttccattctcaaagttatcctgtgctccaaaatggctgttgaagttccatttcatcacttctacattccaggcaataggaaggaagacatgggggcagggcaaatagacatccaagttctttgaaggaacattcccagatgcctctcttaacaacatccacacatcattggtcaaagtaacatggtcgaatggctacacgtagctccaagggaagaggagatctgccctcttttatctgatgacttttctgtcctaaataaaatcagagtactattgctaaaacagaagggaagagtggaaactggcagaagatagctgtgtctgccacagatgggtcttcagaaactatcaagttgagtagaagtcaccagccactgacaagcccatgagtctccatgagtcacaagtatttctttggagcagggttgtctcactgtagtgtcagatgaaccctactcaccgggacataccctcatgctttgaggaacccttttcacttcagggatgttgttcaggatagatctgccacatactaattgctgtctcaaaactgaaaattgttataataatggtttcatgtcttcgctagtatcatatttctagtcaagcactggttttttattattatttacagaaatgactttgctagaaggataaccacacacattaaaattttgcctaagtgtagaacaaatgctattgtacatcccttgagttttacacaatttaaattttttcatgaattgtcttacttggaaagagtcatactttccagccttttgacagactttgtgtttactgtgaatgtaccctaaactttggaaaatataataaatatttggtactagaaatatgtataagtatgactacaaaagcatatacatttcacactttgattcaataattattatttaatcattggattttactttatagcacacttcaagaaacacctaacttgaacatgtattcctgtgtttgtgtaattaaaacaaatacgacaacttactttttaacgcctttcttcctctcctccttcgttcccccacccccatcacagatcagtgatttcacttaggtagactgtttctatgaatatatttgaaattttgcttcctcattaccctgcagctttgtctctgttctttttatttttttctgctaattaaaaccagtgtgtaaaacatcttgtatttggtagttgtttgctctttaatctcgccttttctgagcatggatgaaaagttaggtagttctgcatgccattctgcatgaaatgttattaacatgaactatttgaaaatgagtctatttttgtagttaatcattttccgtgttactgtttgtggttgtttgcatgtatactgtatatatgtgtttttgcagcctattccaagcctaaacggggccaccgtaaaactgcttcatttggcaacattctggatgtccctgagatcgtcatatcaggtatcatagaccacctgagttggtctaatagctgtggaaccggaataatgatccctggtacttgtaaaatgcttcttgctccaatttttacaagacatgaaaatggataccttgcatgcagtaattagggagacagattgaaaaactacatttattctgaagcagtcttgaaaagatacctctgatctacaataagtgaggataaaatagaagagaaagtaaacctttttggagaagggagaacaccaacccagaattctaccaacttcctctctacttttaagtgagcacatgagctaaacccagaccttttttgcacccaacagaaagaggaaacaactaattaaaatttgttattttccttggctcctttccttcctcagttactgctttttgggtcccctctagactttctgtcctaacctctttctgttggtagcaagtgaatgtgaagttgagagaagagagttgctaaatagcattttgccttaacctggaaaacaaaaagtaaagctaaatgagatgtgctgttttgcagggtatcttgccaaagaatcatgtaaaatagttggtcaattctgatttttgtgtattatcaggagaatctcataaattacatgtttttatacctaacttacacatggtactttagtgtctaaaattggtaaactgctttatttcttatggtgatcatttcatagaggaatatgttaccatttttaatagaaacttaaatggcatattgaccttcagtattgattaatgtattatcaaaattatcatttatttatccctttaggcttttctctacctctttacccaaaatcttgataaggaaatacatattttccacacacgttcatgagtgcgagttggatgaattcttcagcatgctgtcctttgcctgtgattgtgtttttagcagtgttgataattctagttgaatacctaatggttattttctcctctactaaactgaaaactatgtaaggatagaatccatatctttgtgcattattttgttgttgttgcttattattgattgtatcagcagttgctggctcagtgcttcacatattaagcatattaacatagtgtttaataaatacatttattaaataaatgaacagacctattgagcatctcccctggtgagaaactagcatacaaaaatatgaattatactattcttaggtgccattttgtctgtataaaactatcttatattaattttcccctggttatcaaagtggtttcttattttacaacatcattactattgctattcaaagagtagagttaacccatttttcacatggtaatttttatttattgaatctggactgcttcagaaattaacaaagagatcattttacatggagatcagtttacctccatgcggaaaggtactgtgtataagggacgtactttaaagaggtggaagcatttaaacttacataccgctgaactgtgcttcccttaaatgtttgagggaatcaggaaaatttagacagatggcagtgtaatcttatgactaagcattaagaataaatttatatatggcagcgtagcccacgctatacaagataatgggggagggaaaaataaggaaagaataatagtttataactgtcaggtactactggcatctagtgggcagagaccagggatgctgctaaacatcctgatgtgtaccaggcagtcttctccaacaaagaatgatccagcccaaaatggcagcagtgctgaggctgaaaacccctgattagatgttctttgtgccctacaaagtagcttaaagtacatcttattttacctttatacaatcttacaactaggttatcggatgaaattatagctgtttaacagacgaagaacttagatctgatgatgtttagtggtttttccagaatcatatagccaggaccccaacccagatcttctgactccaagtcacatccattttttgttcttttgtttaagtcagagaagctagagtaatttcttcttgctttctcttagtgttcacattaaggagagctcttcagccagggagatcctcttttatgacattgggcctttatggaatcaggtaaccttaattctcttaattgccagagcagcagtgctattcatatgaaaatattattcagtaataccttttattaaatattctttttaggcttttcccccctcagatatcaaacattaacttactcaggtgcactttctttaatagaagaatacaagctgtagaattgacactagtggacataaaagccaatcatgaatgtgctcataggtaatgtttttaaattaaatataaaaataccgcccatcctttgggaatatctcaaatttcctacatgacattttaattgtaaagaagggtgatacttaatttccaaaatttcttaatactttctagaaattgttttgttctaagtggatttcccacaagctttatggtattagcaaatacttcttgatatattcaaactgtttaattagcattaaaacccaattgcaaggattctttttaaatatagctttttaaagatcttatttacatggataagagtttcgttaatacttccctttggccaagtgcaatgtactgagtctaatgtacttcttggaatgaactacctctcttaataagagcaatccttcaagcatcacaaaaaaggttttgtatatatatctttaaagtcactaaaatgtctaacctagtcataggtaaagaaatgcaaagaccctaatcttgtaatcttgttttttgctcgctcttcaaaatgtgtatactatgccatcagtcaaatgtggaagaaaaagcaacttagcaaaacagcactatttatcaatttagtagtctctcagatcatacagaaattaacctttaataccttaggactccctgtgggtcagactgtacaattttttatacctcttctaccatattactggctctgaagaactgacaaacttttgtacggtaacccttccttctttccactgtccatctgcccttaaaagagtgagctttatagattagcctggctcctttttaccaaggaagacacgcagctaagagcaaattaccagtagagtgtgtgacattttgctgactcttcctttgtagagaaggtcctgccaagtagcagtgtgctacctaagcaaagtaaatgtaaatgtggaagtttcttgcccagtatttagaccatatgaactacagttttctaatgcatttgcttgctggtaagttggaagggacttcgagaaaagaaatagattttcttaaatgttttttattaaaacttgagttttaaaaaccatatcctttctcctttcagccagtacatctaatttgttacatttatatttgaagaaaagggaataggtagcagattattggattctttgaagtttttctagattttttttgttctaggactttaataagggcagtaagaacacagatcattgttttgcatggattttctttactttttcccatattttctttttgtcactatctaagcttccaagaatctatttttcacccaccttcatctcaagtacacaaatgaaatagattattgggattgtgaaactatgtaagacattctaatgcagttcatctgatgttagaagaatacctaaattttacatttcttttaaaaatccaaatgtcaaagaggaacaggtagaatgcctaaatattacaaaaaaagaggaacaacctttttcagtttaacatgtagagtaagagaataagtagttaagaaagcgaattatttttcatgcttgtagcatcagtaatggaagatgggttgttctgctctggagcctttgtgtgagtagttatagcatttaaggaaataaactgtaattataatgcattctaaaatctactggaaaaaaatactgtcatatacatatatacttaccacctataaaagatttaattaaacattagtcttctgcacttctactctgatataaaatttgttgtacatggttcataccggcttgattgcttttataaagtgaaatgagtttcccaaatgtgatatgcaaaagtaaaattttctaaattacagacatttttaatgctattatatcatcatagataaatttatttcttagttcagattagattataatgcttgatttcaagtacttgaaaaccatccattctatagatgaacattgccttgaagtgcttcaatttgagaaccttgaacagtgttgctttagtgtaccttttgttatttctaagcctaaaataatatggcataacattcgagagcaataaaatgccttgaccaaagaggattttctgtcttacatactgttcttaaggatatgcaaaagaagattgaatatacaaatgtttttgagtcagatcttactgaaatagataagatttttgcctagtttcctgaagaacctgaacttaattgatatttattgtttgttatatcattcttaaagctaaaaagaaaccttaggtgtccttatgatttcagccgcatttagatctcttaactgaataaaaaacgcgtattcgcttttaatttcagtcaaggacgtttagctctattgtatattggttttttactaacagtatgataagtagtaaattggagtaagtagaatgtagagaggcccaaacattttaactgaaaaatagatgagtagttaggcttctaatacttgtatcttgttgccctccttcagaagtttcaaatgtcaggtattggcaaataaattatctaggtggggagggctttatagaatgcttaaacaactggaagcagagatgcttttcaaggacacctgagcactattttgctttctccaccaggatgaaaatatcacttttttaatagtatatttggttcaagagccggtcggtaactaatgtttgtaaacctttctttaactggaagcatgtaagttattaaatatttcctccagactactgcagcaccaatatgaagaggcaaagagagaaagaattgagtttttctagatctggcaagttctcacctagcacagatagtgtcattagcagatgtaagcctttgatagggatcctagggctaaggggtgctatactaagatgtactgtactagtttctgtgtatagccacctcactttcaataaaattctctatttgtggcatattaaatagggaagttaatctaactttataatgaatatttaggtggcctttctgccatattgtatagtctaccaagatcactttttgtaatctaaaaaattcaactctaagctaataaagctggtttattggaaagcaaataaaccacctgacggacctttccagtgaaagagccagaatttgttaaaattagtaaagaaatacgaaactttggcagcctaaattagaacatatattttaaaattacatgttcagtttaccatgaagcagtaatgtaatgctagtgtatcatgctatgcatttttttaaatcttgggtattttacacatgaagagaatggtgtcccataatgtgtaatattcaaaactcgtgaatctcaaaatttctaacatttaggttaagagaagtctccaggaaaatgtagtgttgattcttacatgaagacagtcttcaggaagttttaaagtagaaaataagagtagtgtaagtcaaggaaaactatgagcttaactgataagaaaaattacaggagtggctgtctgggacctaagccagcagtctctggaagaaacccgggataacttttaaataccagctcaggaaatcagttgtacttaaaagagcagcttttttgaagaggggctctgttttaatgacattactgtaaaaagaatggaactgacccctaagttgctttctatttgcggtgggcaggagtgcagatttagtatgcactggcaatgtgatgtattcttagaagtcattctaaaaagtggaatttgttctctattataagacatgaacgttccagaattcattacagaatgaaatactcaggatagcatatgcaggtttcagattccttgatcaggcatctgtttacatcatgctgtcctcatttctactactttttccatttacactaccatgtataatataggtatgtacatatcaaaggaccaaaaaaggtaaaatgagtgaatgtctaaattagtattcagttgcaaaaaacttcagaatcaattcaaatttactgagaacacacccagtaattttcatttgaagtaataggaggttgatttttcttacattcatatttctaaattatgacttaaaatttaatattggagcaacaagtatttgttgattgcaatcctgttttgctttgtctgaactatctgccagatggtttctgccatggttgtgctaattaaaatgcattgcctaatactgcttgctttgattcatgcagtagcttaaagatttctcattttatggcatttgttaactgtcagctcttctttaccttacttccttaaaaggttttacttcccttttctcctatccttccacctaaatttaagttcagtttttgttgttattgcaatggtgatgtaatggtttatagacacatgtgtcgggtggttcctcagattaacaaatgttgctgtgttgctaatctgaaaagagaattccagacacttttacaagcctgtctcatcaccgctaattttagaatgaatgtgttgaatgaaatgtgcctaaaattgcttattagtcacggttgtggggatcctttttgtccttgggaaacaggggtagttgaaagtattcagaaaagtaatctagtggatctaattcaataaatgcacagttttgttgttttagtttgtaatgaaaagttgaaatttttggaataaaatgaaatttgaagtaaatgtgaattcagataatgcaaagaattataaaacgtagcttaaaatggaaaaaaactgatgatgtcttacatttgcaagaggagttacaaatttgagtttttatattcactacacatattattctattaaacattcttattccattgtaaggtccttttagtttatctgcagcataataatggggtcatgtgggttaaggtgctaaattatattgctgattggttttaaaaggatgtctctacgaaagattctggaagtctaaaattttaagaatgaattctgtctactaatcgggaaactacaattagagtgagtacatgttctaagtgttgcccactagttgagaaattacgtaatacagatttcagagtcaaaagaattttgagtattgtatcagctgttactcagtattttggtgtttccttttagacagctgatctctcacgttagaagatactgcataaacagctttattcccaaataaaagtgctgagtgaagccattgctcaattcattgttttgctgaggacttatatgtgtagaattctctcataaattgatttttaattaaattaattataaacatagaagtttctaaagcagaattaacacaatagcccatttcaacaagctgtatatttgagaacagagtgacagttattaacatccagtaggaaattaagagttgttgttcacaaataataaattactagattctgacaaagactaatggggattaagtaagcgtgactcaatataacaaatttaagcctaagcatcttctaggccctgaaatgaacaaggtattgctgccagttaaagtcagttgtgtcttacaacctgctagctgtcttgctgtaaaaactgtaacgtaaggcccttgaaatagatgccgtcatcagccccagcccccaagcattcatctatttaaacacatgacagaagatggtggaagagagttcagcagctattcatgtggtagaagtggttattgtattaggacatactctgttgtaggccagcaacttttgagttaaaacaccgcagctgtttctcttcctttctttacatctttctcttcttttttttttttcttagcaataaactcacttttttttccccacaaacattttgtgtagatccaaggagcaacaaattccaactttctgctgtagcaattacacgctttttgtctgtttgactagattttagtattttactttttttcttctttttaaaggcaacggacagccaagacgtagatccatccaagacttgactgtaactggaacagaacctggtcaggtaagacaacattcaaattttctatctttgaagaatactaggcagaaaacaagaattaactgtattctactctgcaaaattagttttatgagttgacctaaagttgtgatagagaaattcattgcacctgaacttaaatacttaggggggaaaaaaacataggtgccattgttaatttaacttgaaagataatttattaaagtaggtttattaaactccatggaaaagtaaattgttcattagcgctgtatatatgttatatggttttatgtatgttttaataagtattcaattttataatttaacaatttatcattaaagtgtcctttaaagtgaatcattaatatgtctcctttttactaataagggtagtaaacatttccccaataagttgctactcctctagcgccacgtagggcattacatggagaactctaacgtcttttaacttggcatatccactggattaatatttttttcaaatatccttaagataacatttactaagcaaatgtgtaaactctcgaaaggcttctattccagtggttaagatttcattgtttatatttctggatcctcctctaaactctccttgtctctttatcactgctgctttgcagatgatgcagacagtgttataatttaagccattactgattagtgcagagttttaacccaccaggtatataaaagtagctcagtcattgttttttctgtgttactcagattaatacacttgacatatataatttattatatactatattctgtaaaatgaatgaagattaattataaggtgtttgttttcagctgtacaagaataagttttatgagagcagcataaaagtaatgaaattaagtaatgaaattgttacatattaagaagtattaagtattaaattattaagtattaagtaatgaaattattacatcgtgacccatatttttgtaaaattttagcgtttatatattataaacaatctgttgtaatttatgataatatgtattagtacttgtcatcctaaaaaggtattttattattatatcatttgtataatatacttaaaatttgggagatcctttgtagtcattaataaaaaagtcttttatacccatcaaccaacttaccaaaaaccacttcaaatatttaagtggtgaatatccttgatcttcatttatatctggaaatatgtttatttcacaaaatgcttataaacacatatataaataaaatctatatagacacattaatttattatgttttgtgatactagtgactctaaatcttgatttcattatttagtgatagtttttttcagtgcatctgtttttgtaagaccccagaacttttggctgaagtttcccgttttctccccctcagatacttaaaagttttaatcagcccatttagtaacagatagtttgacatctgctatttgctttgattctttggaggtttgatgagctcagccttttaaactctgtttactattgccactgatattccagttatgagaacttctagccaactgtttgactaggaatgagaagcttgtcctaagacatgtcaggagcagctactagtttgaaagcttttctgtagactctagaataaaagtgttgccataattcaggactgatcttcccacaccaagtcttacttatttcttcacaagttccacattatttgagattttcgttgttacccttttaattcacaataccttcaggtagtaaaacgctggaactgaggccaactatgggtgtgggacagtcatttgtggaattgtcatagaccactctgaaagatttggggtgagggagagtttgatatgggtgagggagagtttgatatggcagtaaaacctgttctgaaacaggtgatgtatgaccattgtgtagccacattttaaaactgatccactctttcaaaattatttgtgttatagccttaaaatgcctaatgttcagcttggcatgagagtggcaaatactaatcctaatgtactatgaaaacatttctcccaaaaaatgtatgataagtgaccattaaatcttttaaattactcacaaagatgatattcatttgaggaagaaaagtattcacaatatgtgttttcaaaattggaaggtgccatcctttttgaagtctggctaagcgtgattccatcttgcagaggaaagtaaacttattgtactgtggctcttgactcaaaacataatcttagtaaaaccacttagaatttccatctgtaaactaaaattaaattggttgtttttctgctgccatccatttgagaggaacagtaaatgaagcaagcttcttaattaaaagtaatgatataagtataggtgtaaaagattgcattcttacaacatacaactcactttcaaacatggttttttcattaattcaggaagctttttaaacactcaatagatgtgacttcctagaagctttgaaaagatactgagaaagaaaaaagcagtccctgacatccaggaactggtttgacactgtggcctcactgttgttagtagctagccttattctcaacggctggctgtcacagctagagcatgttactgtcttattggacataatctctcagaacaccaatatcagacaagataatgctgagaccgtgataaaaggagacaaaacaagactacttcggaatgttttctaagcacagacaaaaacaaggtcactgtgccacccacaaaatacctaacattgtcctctcccagctattaagagtgactgctgcttctttaccaattacagcttggtcctcactctggactgccctccctgtggaattgcccttgctttctgacagcggccaatctggaacgaacccctccttcctttgagtttccccaaaatcactcaaccaaagcctaaatcctataatactttctttttctaaaaccctcttactgagacaccccatgctgccccatggtaagcattctccttcactgcaataaatattaaacccaactctttccactattggtgtgttcctggcagtctttggctagagggctttgacaataccaataaagcctattccgcaaggacctcatttggagagatcagacttatgcccaaatcaattagaaaactaaagtaataacagcttccatttgttgtgcactgactttgtgccagataggctcttagtatacattatcagaatgttaatcctgttatcaggatcttagtcctgtgaagttggtactttttcacctaatttgcagccaggtaaagtgaggatgagagaaactgacctaagtctcttacttccttatactgccagtaattcctataaccaggttttgaatccagacctgattgcaaagcacacaaactctatactttaatcattctaacttgcatgtgaaactagatgtgatgcatgctgttatagccctagatctcttacatttaggtattttggcttctaatagtctgcattgtcattaattatttaaacagttgttaagtgatgatgaattgtagctgtatcatatcattgaacaaggttaacctatcttgataataaatttctaccaatgactgcacaaatttatgttttatacacctgggtgagccattctgtgtttcactaaaacaatatacattcttataaatgcctgaataccccttctggaattgtattcagtatagatctatattcaagaattctcttagaggaggctgcagtcagtgaaaattacgactgcaagatgatacagttatgattatttagagaagtgggcatattacatttccatatggactttataatctacttttactagtcaaatatgtgactttgggcaagttccttaatttccctgagcttctgcacccttatctgcaaatagggaccataacacccacctcccagagttcttaacagatgtgaaagtgccagggcacacagtagatactaatccatgttgtatgccagcctctccacagtgtgcctcaccgggctcttgatatcacttccttgctctcatgatagtgagaaataaaaagaaaatagcacttggaaagaagtaaaatccaccagcgttctttctgtatcataaggaaaccttgtgtcaaggatcatggaaagtatttgctttaaaggtctcttatcgcatattgagtgatattaatatacattgttattatttatttaagggatgtgatttattatactacttttttccatcttcattctgcacctccttttgtgtaaacaaatgttctggtaaactctaaatcagaaacttatgtaatagttttgaataattccttcttcatagtatacctttctattggagaatagacacgtttcttcttttttttttttttttccgagacacagtccccgctgtcagccaggctggagtgcagtagtgtgatctccgctcattgcaacctctgcctcctgagttcaagtgattcttccacctcagcctcccgagtagctgggattacaggcatgtgccaccacacctggctaatttttgttttatttttagtggaggcagggtttcaccctgttgcccaggctggtctcgaacttctggcctcaagcgatctgcccgcctcagcctcccaaagtgctaggattacagtcgtgagccactatgcctggcctctgttggagaacagacacctttctattgtagaagaccatgtaagaataataaaattctgaaatttccttatgaaaaactgtagtgaagccaaaatagatcaagcctacagacctttagattagaaagaatattttcagtacaaccttcatgtatagatttaattatctgtaactaccataataagtacccatgtaaatccacattaccaacttatacccattttaaaaatatttatattattgagatgttactttagcaagaatatcatagaagtcatcatttaatctctgtgttttgtgcttgtataattttagctactaagatttctgagggtattaaatagcttttaaatgtcagtctaaataataacactgggtgtaaattcctgacttatgaaaatattttcccagtctttcaggtaagatattaaaagctgagctttatttttgtctgtaaaataacttccaattcctttttataaatatagggataaatttctggtcaaaggccaattctggttcatgtctactgatggtaatctgcccctgaggtttaaatttggcttagtattcttttgctgccttaaattgctgtgtcacgtttctatactcttgtgactttcatatccagttcttttggtaagtcaagtttgcctatatctcttaaactttgcaattaatgtggggatagaataagtaattttaaatgtcttagaggaaggagcaacttaaatgagttttaatagtttgagagcatttgtgaccctcagaattttaccagtgattttaaaaaataagtactgtaaaaacttcttcagtagttggttacaagcagtaacataaattcagccacaaactagtttgagttttttcattgattgtcagatgttatgtgttcctcttatttatgccttgtattattcacatactcaaaaactacagttatgccttgtttttaaatatttccttagtttttttatacaaacatattagcatatttttatttattgagatacacatttcttaaaatataaagatttatttattagttaatggatttaaatctaactgtgctggtctaaaaacagttttgaaacttgcattaaaagtgcaagccttatatttcttagtttcatagctgttggaaattacaagtgggacaaacaagcatgcacagaaggtgctaagagtttcttggaaagtagaaggtgaaaagaaaggtgtagcaaagaatcattttgcaaaagatttaagcttaaggagtactataaaattcctattaggtccaacttatttgttttaatattgcagatgttcagtgacctcttttttaaatatactaaatccattctcattttaaaaacctaattattacttctactgtattttgttgatttctcacaactgatactgattcttacatgtcacaaacatgtgtttctctttttaaaatgtgcattagcattacactgactctgaaaccctggtctgccaccactttgaaggaaaaatgcctttgatttataatagcagttataactatgggcatatttgtgtacttgctttcagtcaaagaaagttaaaaagactcaggaataatttcataatgtctatacttgctttgtcaagggtaaaagtatcctaaaagtaagagtgaaacatttcatcactggttttctttggtgtatgtcgttgttattcttatatactaaaggtaaataagcttaagcaccaatcttgtatctgagtgctaatagcttgtgttctcattttattcaatgagtatctattatgtgtttattatatattcagcaatttcccagatcctgggaagtacaatataaaaagtacgcatggtctctgcccttaagaggttataatacttttgaagaggagtaaaactttgagactactataatttcgggcacaagttgaagtaggaactgactatacagccaaaattcaaagaagaaaaaaatctcgtgtgaagacatttcatgtacatcatttcatttaatttttataaccttatagatagataatactgtccttattttcctattgagtcttagaggttaaataagttacccaaagctgtactagttagaaatggcagagcacagtcaaactctgggctgtcttgtctccaacacccaacttcttactgctactactttttctcattcacacttcatcaatgagaaacctaagtctcagagaggctaagttacttacacaggttcacacagctgtaagtggcagaatggagacataaccccaggtctccaaagtattagactgaaacatgtgaagttgctgagttttcaactacaaaaacaccagttttatctggttcagttttatgcatgccctgtgcactacgccgtattatctttaggtgaatatgaggtcaggattaaaaactgcaagggaaacaggggcatgaggaattttaagaggagagaaaatccagatgggcaaggtaaacctgctgatggagagtcatgaatgccagagtgagaatttcagaattgattcagtaacaatcagtaaacgaacattttgcctgcagtacactgttaggcactccatgtcctcaaacacaaggtctggccttgtacacaaacaaccagagaagtggcaagaatcaccacataatgtagaagaaaacctgagctgggccttacagggtggggaaggattaacaaggagaagaaaagaacagaatgagcaatcttatatggagttaaaaattggttatggtgtagaaaagctttttggaatttctgaagcaatttcagtgggtacccaaaatgaaagtcatatttcatcagtttttcttcaaagttaatttatgatttttttctctgaaattgttaggaaagtacctttcactaaaagtataattagattgtttgtaacacaaaggataaatgcttgagggaatgggtaccccatttttcatgatgtgattattatgcattgcatgcctgtgtcaaaacatctcatgtgccccataaatatgtacctactatgtacacacaaaaattaaaaattatttttaaaaaaacagaaatgagaggaaaacaaagtacctgtcactgtttattatcctgaatccattgtggcttttcaagacctaaaatcatataattttagcactatatggaacacttctcatcacattcttaacccagccccaacccctctccagataaagagaggttgaagtgatctgaagcagacattacagcataattagaactcacatacgatggattctactcaaaggtacttttgtattgcatttcattttacttgttgcagtcttgaatttgagtgtttgtatatatgttgaagctagatataagattcttcatgaatttattttaagttttattttctataactccatgttcttttttaagtctcttctttggtactcagtaacacatcaagaaaaaaaaggtgctttttaaaaagtccttatgaggccgggcgcggtggctcacgcctgtaatcccagcactttgggaggccgaggcgggcggatcacgaggtcaggagatcgagaccattctggctaacacggtgaaaccccgtctctactaaaaatacaaaaaattagccgggcgtggtagcgggcgcctgtagtcccagctactcgggaggctgaggcaggagaatggcgtgaacccgggaggcggagcttgcagtgagccgagatcgcgccactgcactccagcctgggcgacagagcgagactccgtctcaaaaaaaaaaaaaaaaaaaaaaaaaaaaaagtccttatgaaacccattttagtttctgtgtcctttgaaaggctttaatatatgaaatataaatatgtagacaagaatgtatataatgtataagttatgaaaataaaatgagcacttgtgaacccaccacccagcttaaggaatggaacattagcaatcccagtgggggttggtccctgtgtgttcctcgcctgtggccttccctgtcatttccccaccaaccctcagtgccatgttctgtcatatgtcatgtttccagatatcataaataccttttatctgattaagaagtcctcttcccactgggcacaggggctcacacctataatcccagcacgttaggaggctgaggcaggaggatcgcttgagcccaggagttcaagaccagcctgcacaacacgggcgagaccccgtctctacacaaattttttttaaaattagccatgcatggtgccgtgagcatgtggttccagctactgaggaggctgaggtgggaggattacttgagcccaggaggtcaaagctgcagtgagctgtgttggtgccattgcacaccagcctgggcaagagaacaagaccctgtctcaaaaaaaaaagaaagaaagaaaaagaaattctcttctcatacatggaatttaagtttgttaaatgtcttttttataagtagatgttaaatgttgtcaaatgctttttctgcatctgttgaggttttgtcctttaatctgttgatgtgattaattttattaatggaatttcctaatgtcagatgagtgacctttgcagtcatttgcaaagttggataaactaaactttttaaatggtttttattgcttctacactgccacattatatttgctaatataatttttagaaattttgacttttgtgtctttttatttttattttatttttttggaagtgaggttcagttgtaactttctttctcacactgtccttacatattgatttttactgccttcacagaatgggtcagaaagtttcttctttctttgtttaggataatttaagattggaaaaatccttatcttgaatgtttgatagaacttacctgtaaaaccctcctctgtgcttggtattttctataatgtataggaatttttgaaacttttttttaaagaatgtgttcatttttatagtattgtctccgatttcaaaatactatcttttactatttttcattttgggaggcaaattcttttttttaactaagttagatctctagcttataaattgtcagtgtttctggttttttcatatatatatttagaattaaatattttcctttaaatgctcttatagtcacatccccaagtattagcatgattcacgttaaaagtcagttcaagtactttctaatgtcccttttgttttcttctttgaccaatgagttatttagaagtgtttttcaaaacaaaagatttttaaaggttttgaaatcagtataaaaagtaattaagttatgatactgaaattttttttaactttgagatttgctttatagcttagtacataatcagttttcattagtgtcccatgaatgcttaaaaagaatgtgtattcttcatttgctaggcgtaaagtcacttatgtttagattaagcttgttttttatggagttcaagttttactgtgtgtgttttgttttgtttttttggtctccttttatataatttacagaagaatattaaaatatattactgtggggctgggcacagttgctcacacctgtaatcccagcactttgggaggccaaggtgggaggatttcttgaagccattaggtcagcctgggcaacataacaagatcccatctctacaaaaagtttaaaaattagccaagtgcaatatcatgtaactgtagtcccagctactcaggaggctactcaaggaggatcacttgagcccaggagtttgacgatacctccttgagcttttttactttatgtgtttatatgtacagcatataaattttgaattgttggccaggcacagtggcttatacctgcaatcccagtgctttgggaaactgtggagggaggatcacttgaggccaagaggtagagaccagcctgggaacgtagcaagaccctggctctacaaaatattttaaaattaactgggcatagttgtgtgtgcctgtagtcccagttactcgggaggctgagatggaaggatcgcttgagcccaggagtttgagggtacagtgagccatgatggtaccactgcactccagcctgggcaacagagcaagaccctgtctttaaaaacaaatctcactgtgatggtggatatgtcctttttccttgcagttttttgatttatctatttgtatgtacagcatataaattttgaatcgttggccaggcacagtggctcatgcctgtaatcccagcacttagggagactgaggcaagagggtcacttggggccaggagattgagagaagcctggtcaacatagtaagacccatttctacaaaaaaaaattagtttttaaaaaataaattttgaattgttgtattctgaattgaaccacttatcatattatctctttctctagtaattttttggaccctaaaatacattctctctgatattaatataggtaccttatttggggtagtttttgcctggttttctttttttatcctttaactttctgttttctctgtctctgtaaattagatatgtctcttataaatagcatttaattcatcctgacaatctgatttttttttaaatatcttaactggagagtaattcatttacatttattgtggttactgataagtttgctctcttatgttttatttctctttcttttctttcaagttttgagttgaataaatttattcttcattttattattttctttctggtttgggagttatatattaattactacttttagtaaatacctttgaaattttaacattcatgcccaacctagtaaagatctgtaccctcatcctgaacaatatttaaaacaaggagttttaagtcagtgcttttcatgcttgtgctattgttattataattttagtgccatcttgtttgtttgataattctataaattcactgtttctgtcactgaatgttttcagtgtgtagatttatttccctgtttatcactattccttattgcatcttgatccttctatcaagtaaaatttttcttcttccaaaaatacatgcttgaaaaacttatgtggtaagaatgtatggaaggtaaactcagtttttgcccatctaagaatgttattttggcctctatcttcaaattttgttggctagacaattctagactggcagttatttttcagcactttgaagatattgttctgctttcttctggctgctttttctgtctcctgttgattgtttcctagaatttgaatgtatacgttccatgttgaactcaatttgtgagcttcctcctatttcttatgctggggatttgttgtggttggaatttgttgtaacctgcatccaatctggaaattttttgtggattcacagttaatacatttctcccttccacccagagccactaacccaagagagacaaatttgtttcctgtctgcttttgtaggtcagattttttttttcctagttgagtgaccttttctctgagagtgaagcctttgctgagttttagctttaagcagaggtttctccagtcttacttccatcctacaaaggcccaaggctttatggtccattcctctgagtgcagcagcctgtgaaaacagtagctctaggccattggtgtttagttgaaattccgagggctgtcagcttaagcacttactagtttcctgatattgttttgtttctaatctcagagtatttcttagtttcttgcaagctcatcagtttttaataggtatcatgcgtgagtgaatataaatttttacatatatataagagaggatttattttgttgtttacaagagttttggggggatctctaagtctcttcttgccttttaatggaaacgttctcgtcattttttttaatcaaaaaatcacattttgtttctcctgtgacttcttcctgtaggtgagcagtaggtcatccagtcccagtgtcagaatgattactacctcaggaccaacctcagaaaagccaactcgaagtcatccatggacccctgatgattccacaggtgaccagtctgtttcttcatacttatgaagttgaatcagtcatgtttatattcatttggccatgtcattactctaatgtttacaaaggcaggcattatactgttgtttagatttttatattaaataaactatttagtaatacatgttaaaataccattttgaatacagagacagagactgccttgccttctgtattttttttaatccagatactaaacatgtattttaaagattgtctgtttggggtttttttccagttgcgaagcgtattgaattcttgatacttcagcctgtgattttcctactagattcatcctactagatgatagtagtaaagtcattttttcagtaaccaaaatcggagaatggtaaaaatcatccccatcatcttcatctcaatcttttaaggacacgagatgtcatgtaccttaagttgaaaaaaattctgaccattgaccttttgaattgtttttaactgataagagacaccattttcagttatacaaatattctattagacctttagaaacctgtgatgagttattaaagctccccaacatgaataactaactgttcacaatattagtattaatgtctacctgcctaaaggtagtgacggcatcgtttcattatgggcaaacaggaaatgatgtgccatagtagaattaacttttccctaactttaagagaataccttgataaatgcttttaagtgtacttatgaaattttttatttatattatattaagtcacgaagggaaagatgatctcttagcccttggaaaattaaagcatttgatattttatataagatcgactatgttattaatagtaacaattagattgaagtttaaaagccagctttctgtctttacaaactaaaatacaactcaagtatttatagttatctgatgtggtttggtcaagtttataatttaatttaaaaaattaactgggtggtttttctgtgtgtcatgtaagatagaactatgtttagccagggtgtactctctagttttagtaagtttaaatttagtggcggcaaaaactcctgtttcacccctagcacagcccaacctaggactgtccagagcattcaccactacgcagcacatgtgtagaattcattatagacttgctcctccccagtggtagacagggcaatgctcttgcccagttttatcattaacattcaggtgatagcagctctttttgatttctgaaccccctggcaagggagtacgttctctgacattacagcatttgcccgggtctggtactcaactcagcagagccttctgtcttcagtctacactaatctgtatatgccagtcaatagtgtggcagattgtgacttcatgggggtaaaataaaaaatgtttaaggctctctctcacataactgctacatttctgcctcatatgttgcttctaccttccaactcccgtcccattgttttctttttctgtacctagaaacaccacaaaataccaattgctagaaataatttgcaatatcagctgaattttgtctttgccttgaaatatattgcacatgtgtggctataattttgaatacattttaaaaatggatgctctggtttaagtttataattaattcagctgtgcagtatttgtaagaaaaatattgataaccaagctaatagaataaattagggaacagataggtaaagtctttttctttgaaggcccactgaccaaggaaaaaattaagagtgtaaatgtaagttaaagtgacctaattaaatttttttaatttgagaggtttttgtatattttcagagaaagctaaagagcataacaatttaataatcatagccgataataagcgctcttcagttcctatttataatataatgggtattcaaaaagacacacatactgagaggatctagtgagagagagatctagacgcagtagagggagccgcagagggggaaactcactaaagaattttcacctttgcttagtactttgcaaacatgtattaatataaagtgtaagacatggcccattccttgcagtctggttagagtcataatactgacacattaaaagtaaacttatactatataataacttactaaatttatagtacaagctgagtgttttgatagttgtaagagaaatcagttcaacaagacttggcatagtctctggccttttcataaaatgatgagacttttctttagccataaagcagaaaggagaaggcagcattccactgaagggaatgcatactcaaagaatatgagatagtaacaagtgttgtgtttgaggggtcagaaaagagagtttgccttaatttaaccaaaccaacatgagctttgacattcaggagaagcaattagatttgattagcaattgaaacacacacacacacacacacacacacacacgcaaaaaactttcattaaataatcttccgatctgtgaccaattattgctagtagagattggaagttcaatatcaatttagtgtaaagtgagaaagtgaaatcccacttctttttttagagagaagatgaaattcaatgaaggaccttaagttccccaccatacaagggctttaattatttgaataacacaatccttggactttttttctgctcccagaataccacgcaacactgatgtattaagcttaattctaaaatacatatcagatacagggtgctgatataatgagatatataatgtatcagtgatttaagaaagaataataggaatggaaatcttaaattgaaactttttcaagacacttaaatttttctagtaaatcaggaggaaatcagtcatttttaatcagttttagttttgtggaaagcagtgtttatgtgggagcgtagtttgaaaccactgttggggtgggagaagagttggtcagagaaataacaaattaagtatatttcttgtttagccacttcagaaaaacacacatttatgttagtactgtatatgagccttaagggtaagggtaagtgccttaagtctctactgtttttctgtattgccctgcaatatttaataaacattactttttcaatatggaattcatactatactattttaaattgttctttctaattctccatttagtatgaataataatgataactaccgtcatgtattgagtgcttaatatacgccaggatttgcatggtgttcctcacatgcactggctcatttggtctgatttcgctaattagcttttggagtttcttgagagcacgttctcagtggctttaaaaaaacaaaaacaaaagcaaaaagaaaaaaaaacacctggattatcagttgacaataaattagaagattactgagccagcaacccttcttgagtttttttggattgcatacagtgcgtctgctgtcttcctgacttgcctttatccacaccactccttcaaggagttattcgtcagaaaaaggctgaagagctcactcatttagctctttttttgtctactaacagtgggaaagcaactacttctgaagtagaaaagtctgtattgcttcagagttactctgtttacttctggaactgttctacataaccataaatgttgagaagagactgtcccacgcatctcagtcaagttgtatggcagttttacctcttttgaaatataaacaaaagcattctattcaaataattttataaaattgactgattgtttgaattaatcaacttaactgttttcggcatgacattgagccacaggtttcaacctcattttggttccttactgttcgtatttgtaatatactctcatcaccaacatctcgttttctgcagtgattcttactgggaagggcaggatgagtggtggaggtcacattataatctatataaattgaaaatgatccactggaagagaatgtgtctctgctttctccctttccctgttaaggaacattgatattagcggagttgatatagccttctataaaataaacttagcatgataaagaaaagagatggggagtttgattagatagggtcaattaagactgaatttaaaatataaaggtctcatcactgtttttgtttttaattaagagcttagaagctctaatatattgtgttctattcagtttatagccaacttaaattataggtatgagaatataattgcattctaatatctgataattgaatatcctttttttaacctttagaattcagaaatagactcttcaattaccaatagctgtaacttttaatttacatattatttactttagggaaaaaaagcatttcattcatgctttcttgctgttcgtttataattatttgtgacagaaaatcaataaaatacatgcttgaattccagataccaatggatcagataactccatcccaatggcttatcttacactggatcaccaactacaggtaaaggagtactttcttattgaaagttgacttttttcttcttagagagtttaagttgacaattgtgttgctacctgtcattgtatagtcactccttaatttatccttttagttggcctccttaaactttttagaatcaaatcaaaataattcttttggttaagttaatcaaactttaaattggcagaatcatattcttatcttttcagtcatcttaaaatcctccagtatctttctttagtactgctaagcattacattttcactctttaattttagtgcattaaaacaaaactcataagcttatttctatttaatacatttgtgatacattctcatgttcatagtgactgaaaatgtaaataatatacttcagtgccccctcatgagtatgagggctataaacatcatttagtttgagcctgtttgcagcctgaaatgtcataccagagactacaactccaacaatcatgattctctgtaacagactgttaaaacagcaagaatagatttaaatgctgagttaattctgacaaaaggacactgagattttctagggcatggtttaacacttatttttaaaagatcattgctttagtgctataaaaatatatcacagtctctgtcttgactctcatcttagctagatattgaaatttgatttaattatgttttaacattcctgattattttcagcctctagcaccgtgcccaaactccaaagaatctatggcagtgtttgaacagcattgtaaaatggcacaagaatatatgaaagttcaaacagaaattgcattgttattacagagaaagtaagttattttttatgaataaaaataaaaatacattagtattttgagtttaaaatatgataaggtgcaatgaaaacgtagtttttagaattagtcattaagtatactttcaacttgtttaagctttaagcacccttttactaaaaattttttatgcaaaactcaatccttttgactatcatattagtgctatggaaaataaactggtgctttatacttgttgttttatgttctcagagctgtttagacttattattataaagatttattgttttcttgtaaatagataaaataatttgatttattaacattcagttgtgccttatcttagaaacatttttgtagatacattttttccaggtgtatgtttagaattggattacttattaaaagactgtatttcataactgagtgtttttctgaggagttatagaaactgccttcctccctttttaaagaaacacagcctaatttccttactactgcattcacagttcttaaatatgtatgtatcttcagttttcttaagcatgacctccatgaaattttatacttaggtaactgaattgttggtggtaactaaaatgaagtgataaggaaaaaattttggcaactttatatatgtatgataataggattcccttcattaattttaatctaaataaatgaaagttgtttttttctgaatttgcgaaaagctttctgtatgtacttcaaaaaaaagagagaaaaaattgttttatcataatttattgatacagtgatttaaatggaaccaacctggtatttgaaaggtaagcctaaataggaaattaaatactacagtttggaaatcgtagaagtaattatcaaactgctggcacttttatgttgaaaaagcttgatttcttatttcacttatttaacctatacttttgccatactttaatcatttgaaagaagtattctatgctggaaaaaacaaatggtggattagggtgttggctgtgaaaactatgacagttttaatcaattttaaatactttcagaagtagtattagttagttattttgcttgaggactttttattaattattcatttatatccagtaacctcactttaggaaatgcctaaagatgcatctttttcgggaatacttaatagttcccaaataagagggacttaaataagtttatcagactataaaagaatgagggtctttcctgaaagtgcttgcaaatgtaagtgttttaaaagaagtggtactttgtcatttttctcactgctttaaaatgggaaaaagctttaaattggatagcatttattttaattagattgcaaatttgctattagcttaccactctctgctatagttaagtaggattgtgacttcagaatgtgaatcagtataaaagtagaatgtgaaggataaaaacttcatgatattttcccatagccacatagaacccttcccagccttttttcatccttcctacacaaaaagaggatagaaaatgaaattttctgaaacttttattttaccattttatctgcttcgctaattatccaagtacagttacttaataaaaggattatgttatttgtatgattacactagaagtagatgagagttccatcccagcccataattatatttgattagtgtacctaagatgcaaaatgataaaccaagaataaaaattctcattaattgagcttccatcatcagctactaaggtatgaatttttccatcatgtgtaatattatgtggtatttgtttgtaggcaagaactagttgcagaactggaccaggatgaaaaggaccagcaaaatacatctcgcctggtacaggaacataaaaagcttttagatgaaaacaaaagcctttctacttactaccagcaatgcaaaaaacaactagaggtcatcagaagtcagcagcagaaacgacaaggcacttcatgattctctgggaccgttacattttgaaatatgcaaagaaagactttttttttaaggaaaggaaaaccttataatgacgattcatgagtgttagctttttggcgtgttctgaatgccaactgcctatatttgctgcatttttttcattgtttattttccttttctcatggtggacatacaattttactgtttcattgcataacatggtagcatctgtgacttgaatgagcagcactttgcaacttcaaaacagatgcagtgaactgtggctgtatatgcatgctcattgtgtgaaggctagcctaacagaacaggaggtatcaaactagctgctatgtgcaaacagcgtccattttttcatattagaggtggaacctcaagaatgactttattcttgtatctcatctcaaaatattaataatttttttcccaaaagatggtatataccaagttaaagacagggtattataaatttagagtgattggtggtatattacggaaatacggaacctttagggatagttccgtgtaagggctttgatgccagcatccttggatcagtactgaactcagttccatccgtaaaatatgtaaaggtaagtggcagctgctctatttaatgaaagcagttttaccggattttgttagactaaaatttgattgtgatacattgaacaaaatggaactcatttttttttaaggagtaaagatttttaattctgtgattgtgtgtatgtgtgttgaaactgtaaagcttttatgactctaatattaatctcttaaatgaaattaaaaggcaaaagaacatgattgagcttaaatgatcatttcttcctgcagtgattcttggattgttttctcatgtatttgaaaaaaaaaaaatgaagaaaaataatggaaaatggaagtaattactccagctaaaaaaagcttggacttagatttctttttatgataccaaatgagaaataaaccaggcaaatcagaaggaagttaaagaagcaaatataaattcaacaagtgtcctaattatcctggatattggaatatttgattttccttacaatcccgttctagaatgcctgccgcctttcaacactttcaagagaatttcaacacttacagagtatttatattgttaacagtaattttgctaccaaaaccttcagaataactttaataataaaatgacactgaaataatagactatacaaactctatattttttcagttggtgttaaaataagtcacattttgataccagtacaagatgtcttttaaataaggatgtcatcagtctgatttttatagcattaatgttttatgaagaaaaagttcaaaatgaaagcattaattgctgtgattattagaattctatcatgactgtattgtagtttttgctctatttcagataagcaagatctaagaagttatcaaaactattctttaaaatgctaaagcaggtaactttttcttccattattttttcctcctaccactgagttttgtaatgaattccttgtgtatacaagcaatacaggtgaatactaaactgttatttttagcttcttcaaaagctattttagaaagcttcctggaaataaatgtcttctgtcatttaatttaaataaaaggagtgttaattgttcccaaatttgattacctagctgaaacagatattggattcagcatagtaatagtaaaataaaattggcagagaaaataactgtagactaggataaagcatgactcctccatagcattgttgcttgtatgtacatctgtcactccactgaaagggacctagtcactttaaagaggccttttatctcagcacgagatatccaagcgtgaatgctaaggcttgatgtttccattaggatttagcattcgagatttcagattttatttatagtcattgatgtgttttgctgtattataacacatttaagggaaattttattatggtttttacatgtagtcatttcataaaaatatccagataggtaaatggaagaaaatagtagattttagtcatggtaccaaatgcaagaggctgttgaacagttgcttgtttgtttacagtaagttccttgagattttcagtactgtagttgccctggacattgagtacagttcagccttactctgtttttaagtagttgtgttgtcaatttcatgcttttaagtcctgatgatccttggagatgggagaaaaagataccagggataattaaaatccacagccagtttcatcagtttcctcatccatcctgcaaataaaaatgttaacaaggagccaaacttattcgttctggttttacaatttattttgaccgttttttgggtgaaaattgcaaacagccaagcaagtggctggaatgccccagtctaagaaattcaaaaacaatcactgagtaagccctaattacattaattacattttactcttgactccaggaaaagaaagcaagcttttatctaatctagagggaagtattcgtgagcaataaaaatcacttttttgagttgaataataatcagttaagaatatttaccgcatagcaacacaacatataaagatttgttacaagttgtttacggatgtttgactatttttgctgaagtattttagagtattgaatgtcttctctcttcaagtttctttcatgttcctaatttcagctcctgtagccagagatcacaggtcttccctgtgaaactttggtttctttctataaatgtgtgtggttttcagcgctcaactcctgtcttcaaatggtagtaagttctacttctacttctgtcattcagaacattttatgtcaaatgatgtaatgcagaaattcttgtgcatatttgtaactgaaggaagctttttagatttatttttgtttttaataaaattcagattcctattctaaactggtacataaaagtggtgaatgacttgtatcagc

SEQ ID NO: 10716 - DNA, 399 bp, Homo sapiens
ttaagtaacagtaagttaatagtaacgtatacagattttataacataacactcataaagctagcaactttatagatttgtaaaaaggcagttgaaatgaccactgcagcttaatagttaatagttctttttggtgtctagtactcagaaacctgttggaaactaattttgtgtagtttgatatccattggccaaattaccatttgaatttactaaagaattcattgcttcactactgtgccatagtttataaaggactttttgagtgctctttgattcttgtctctgaagaatcttagcataatgccaacatagtgccaaccataatagttttccagttaagtacttcctatttctatctaaaaggcttggcatgtgtttaaacaaatattaagttcag

SEQ ID NO: 10717 - DNA, 150 bp, Homo sapiens
gtggtggcaggtgcctgtaatcccagctactcgggaggctgaggcaggagaatcgcttgaacctgggaggcagaggttgcagtgagccgagattgctccactgcactccagcctggacgacaagagtgaaactccatctcaaaaaaaaaa

SEQ ID NO: 10718 - DNA, 140 bp, Homo sapiens
cttctttgtttacctaatcaagcctgggcaatggcgggcgcccctcccccagcctcgctgccgtcttgcagtttgatctcagactgctgtgctagcaatcagcgagactccgtgggcgtaggaccctccgagccaggtgc

SEQ ID NO: 10719 - DNA, 2962 bp, Homo sapiens
gctgacacaggagaattgcttgaacctgggaggcagaggttgcagtgatctgagatcgcgccattgcactccagtgtgagctacaagagtgaaactctgtctcaaaaaaaaagactacacattgggtacagtgtacactgcttgagtgatgggtgtaccagaatctcagaagtcaccatttaagaactttttcacgtaactgaacactgcctgttccccaaaaacctattgaaataataaataaataaataaaacaaagttatggttccaatcatcagaacatagtatagtaaaattaatataacaaaaattaaaagatggataaccacatgaaaattaaaattccgcacatgtaaagcaaaagagaaatctataaacaataagaggatggcttgtaatcaatgaactttataatgatgtagttatattttcatgagtttttactaaatctgtatttaaagaaaactttatcagtttaaatgtctatattagaaaaagagaaaagaaatatagaactataaatgtctcaaatagggaaaatataattaataaaattaagcagaaataagcaaaatgacagtagttgattctttgggaaatttagtcaaagtcataatcattagattagttagacaaagtaaaatgtaaataggatcaggagaagaggtacggtaacatgcaagaaaactgaaatatttgggagaatgttatttttagttagataatgttaattaatagctcaggtcaaaatcagaagtaattaaagtatatgtgtgttgaggggggaggggaattgctagagtggatgcagctaggagtagaaattatagctagaatgaagcttctcaaattactaatttacaaattacaaattactaaattactttagaaagaagtaaggtataaataaatcaaatttaaaaaactattagaacccatagagtcataataaattagcaaagaaaaggacgcctagccctgatgggatttaatttggagaattttttcagaagttcagagaacaattgcctagttactaattagttctaccttcaaaatgtagaaaggtatgttattaagtttctgattcattttacaagcataaatgattttgttttgacaatttgataaaaacaataactttaaaagaatttatggactggggtcattaattgacaatacgatattatattacagtaattatttactgtgagcaagttaattatcctcaaatgcatgagcagcatcataaaagaaaagctattaaaacagaagaggaaatttaggactcatcttcagttcctctttccttcacttctgtgtcctattcatgaaaaaatcttgactgctttaacaagtacattaagaatctgtgggcttctcaacttcgccactgctcctttcctagtaaaagtcaccatcatctcctcccaagttaccgcagtcatttcctgttgtcacttttcacctcacgatgtcacgtttcacctcaactcctaacaacctattttcaatatgtagccagagtgatcattgtaatgtcctttccttggttaaaaccctctagtggcttctcatctaacttagaataaaaatccagactcttcctatgtcttccaggcacgtaatttggccactgcctagctctccaacttcaccacatgcccctttccttaggctttccttggtttaggaaacatacaagaccagggtatgtcccccattaagctagtgtcctccttacagctcttctacttgctgatttctctgtctgaaacattcttccctcagttctttaggcaaatgtcactgtcctggggaggctttctttgatcccataatcttaaatcgcttcccttccatgtactcattgtccgtccaacacacctcactctttagtttcttcatgtacttaactaaaattaccttatttgtttattggcttttaccctagtgtgtaaggcctttgtacactgctgtatccatagtacctatgagaagttgagatgattagtgaatattagttaaatgattgcatgatgtgtaataataggcaggataagcaatataatagtgggtgaaaaatagaaaaattggcagtagaattgaacagtccttccactcccttatagaaatttagcatgtaggacattaatagttggtaacgggagaaagatggtcgcaggaaatagtaatataaagataacagtggtcttaggagtcttcggttttaattctgactcagccatgtaacttggagaaagttacctaatccaacctttagttttcttcatatgtgaaatcaggatagcaatatctcctagatgttggatgtacatacttgtgcatttctgtaggtaaggtcctgctgtcttctttgccttgtccccctctctttggcatagacattttaatgataagtattttatgtcaggcccaagatttcaaaagtggttcaaattccaatgtcaatttagatgtgtaaaatacctcacgcagtgaaaggcacatagaaagtgaacagtagatgttagtttctttcactcatagttgtagtctttaggctggctaattctatatttaacttcaaatcttcctcaggattctcagaaccatatattcttgctattaaaatacattcctgctttttcttaaaccataaactcctaagagtattttctctatgacatttatcataatgatttattcatagctggtgttctataaatgtttgtttaaaatttagcatgcgtttgttaagtgcctgttatgtgcagtgcgtggagttaaacacagaaaacaaagtaaaggaagtggaaagacatattctagctatatggtaggaaaattttgctcacttttgaagagatgaagatatatttaataagatagattagaatttataaaaataaaaagacattggcgccctgaaatatataaaatgaatatggaaaggaaagga

SEQ ID NO: 10720 - DNA, 88 bp, Homo sapiens
cctcgctgccgccttgcagtttgatctcagactgctgtgctagcaatgagtgaggctccgtgggcgtaggaccctccgagccaggtgt

SEQ ID NO: 10721 - DNA, 411 bp, Homo sapiens
actcaatgcttgccccactgtgttggctctgggatatacacttcttacctagacgtttatttttactcacaggatttactaaaccttaggagctgagccaggaatggtggtgcatgcctgttgtctcagctacttgggaggctgaggtgggagatcgatttaacccatgtgtttaaaaccgaacggagctatgatcatgccactgcactccagcctaggcagcagagtgacagcccgtgaagaaagagagagagagagagagagtgagagacagagagagacagagagagagagaccttaagagctgaatccttatcaacggattctaatgaaaggccatgcttttctccaaaatgctggatgaggccatctgtctactattcttgttaataaaaataatgagatgctgct

SEQ ID NO: 10722 - DNA, 560 bp, Homo sapiens
tttctttttcttacatacctaggcaggggaaaaaaatcattagctaagtcaatcaaggggatctgagagccaaaggcattcaatgtaaaaatgagatgcttaattgcttaatttctgcagaattgaatacaccaccttttggctacacctacacttacatgtgtcggaattaggcccccaagagcccccaaagcagcaaatgcttacagaaatagcaaaatcttactaaaggtaatttaaaattacagtggaacattccaaataaataatactgtacttttaaatgtgtgttattgtagcagatttcacacacacacaaagtgcattttaaaatgagggctcctaaagaaggctcttccagggatgcctaccgatgtgcagaaacttctaaaaagatttcaatacttttattccctcattaaaaaaaaaaaaactcttggccaggtgtggtggctcatgcctataatgccagcattttgggaggccaaggtgggcagatcacttgaggtcaggagttcaagaccagcctggcctacatggtgaaaccccatctctagtaa

SEQ ID NO: 10723 - DNA, 228 bp, Homo sapiens
ccaggcgcggtggctcacgcctgtaatcccagcactttgggaggccgaggctggtggatcacgaggtcaggagatcgagaccatgctggctaacacagtgaaaccccgtctctactaaaaatccaaaaaattagccgggtgtggtggtgggtgcctgtagtcccagctacttgggaggctgaggcaggagaatggcgtgaacctgggaggcggaacttgcagtgagcc

SEQ ID NO: 10724 - DNA, 308 bp, Homo sapiens
tttttttttattgtactttaagttctagggtatgtgtgcacaacgtgcaggtttgttacgtatgtatacaggtgccatgttggtgtgctgcacccattaactcgtcatttacattaggtatatctcctaatgctacccctccccccttcccccaccctacaacaggccctggtgtgtgatgttcctcttcctgtgtccaagtgttctcattgttcaattcccacctatgagtgagaacatgcagtgtttggttttttgtccttgcgatagttttgctgagaatggtggtttccaccttcatccatgtc

SEQ ID NO: 10725 - DNA, 544 bp, Homo sapiens
cattcttcctcccttcctttccatccccttcttccaacaaatcccccacaatctatttgtgcacagtctttggctgcatttaagaaaggtgtgtgttcatgtcacaggaatgcttgatcctagtgtactctgcatttgatcaatgaaaaactgcagtattctgtttagatctgacattgatatggacaaatgtgatgcactatagtaggacagatgggctgctcagaggactggaagccatgtcaccagaagagtgaatgggcagctgtgggtatactctgaagaaagaaagacccaaagggtcatgtgtccacatatttgaagaagtatgtagagtacaatgattaagagcatgggccctggggtcagattgcctagggtcaggcctttgaaaggagttagtggagacaggcaacaggctctcacactctttttgaagacttgttcaaaatatctaaagaaaagggatatgccatgtcaccctcctcttgtgtatttactgagcctgacacatcataggtatgtaataaatgccttagcttcc

SEQ ID NO: 10726 - DNA, 105 bp, Homo sapiens
aggctgaggcaggagaatcgcttgaacccaggaggcggaggttgcggtgagccgagatcgcaccattgcactctagcctggacaacaagagtgaaactccgtctc

SEQ ID NO: 10727 - DNA, 557 bp, Homo sapiens
tgtttttatttatttattttttaaattttattattactatactttaagttttagggtacatgtgcataacatgcaggtttgttacatatgcatacatgtgccatgtaggtgtgctgcacccattaactcgtcatttagcattaggtatatctcctaatgctatccctcccccctccccctaccccacaacaggccccggtgtgtgatgttcttcttcctatgtccatgtgttctcattgttcaattcccacctatgagtgagaacatgcggtgtttggttttttgtccttgagacagtttgctgagaatgatggtttccagcttcatccatgtccctaccaaggacatgaactcatcattttttatggctgcatagtattccatgatgtatatgtgccacattttcttaatccagtctatcattgttggacatttgggttggttccaagtctttgctattgtgaatagtgccacagtaaacatacgtgtgcatgtgtctttatagcagcatgatttataatcctttgggtatatacccagtaatgggatggctgggt

SEQ ID NO: 10728 - DNA, 330 bp, Homo sapiens
taatttactattatcaagtcagtggaagtagaatgttagagctatatagtctagttacaatttgatttcattcaaagtgactggtatgttttttcaaaatgaaggccaaactgacgaacagcactcagcccctacttcacaggcacccagatctcaagaatgtaatgaaaccaaaagtggtgtttcccttcagttttgtttgcatctctggataaaatggacttggctgaaatgtgttgaaagcttaaaaaaatgtgtaataccaccatcagttttctgggctccttgaagatcttttaaaacttaaaatttgggttttaattttttttt

SEQ ID NO: 10729 - DNA, 535 bp, Homo sapiens
aaagacagcactaacctctgcagacttaaatgtccctctctgacagctttgaagagagtggtggttctcccagcacgcagcttgagatctgagaacgggcagactgcctcctcaagtgggtccctgacccccgagtagcctaactgggaggcacccccgagtaggggcagactgacacctcacatggccaggtactcctctgagacaaaacttccagaggaacgatcaggcagcagcatctgcggttcaccaatatctgctgttctgcagccaccactgcagatacccaggtaaacagggtctggagtggacctctagcaaactccaacagacctgcagctgaggatcctgtctgttagaaggaaaactaacaaacagaaaggacatccacaccaaaaacccatctgtacgtcaccatcatcaaagaccaatggtagataaaaccacaaagatgggaaaaaaacagagcagaaaaaccggaaactctaaaaatcagagtgcctctcctcctccaaaggaacgcagctcctcacca

SEQ ID NO: 10730 - DNA, 1004 bp, Homo sapiens
tgcccccagaggtggagcctacagaggcaagcaggcctccttgagctgtggtgggctccacccagtttgagcttcctggccactttgtttacctactcaagcctgagcaatggcaggcgcccctcccacagcctcgcttccgccttgcagtttgatctcagactgctgtgctagcaatgagcgaggctccgtgggcgtaggaccctctgagccaggtgcgggatataatctcctagtgtgccatttgttaagcctattggaagagcgcagtatgagggtgggagtgacccgattttccaggtgccgtctgtcacccctttctttgactaggaaagggaattccctgaccccttgtgcttccctggtgaagcgatgcctcgccctgcttcatctcatgcacggtgcgctgcacccgctgtcctgcacctgctgtctggcactccccagtgagatgaacccagtacctcagttggaaatgcaaaaatcacccgtcttctgcatcgctcacgctgggagctgtagactggagctgttcctattcggccatcttggctccactgctgaattcgcatatagtacttttaaatgagaaataaatagccatgaataaacaattctgtcatacaaaagggggaagaaacttttttgtaatttgactttgcagaaaataaaaccccagtgtcagagcctgtcactgtgatctagttctaggaaggtattctgggtttattttccattcttgtctcttggtgaatactgtatttcaaccactatgccttctttgctctctaaatgtaccctgtaatttctgtctctctactctagctcaggggtctctgagctctggatctgtatgtgtatctgtcaatgaacatctatatctggatatcttccaggcacctctggtctaaaacacctaaagcctaactctttaatgtccccatttctactttaatctttatccaggttcctgcgccatcatataactagttgcttaagacaaa

SEQ ID NO: 10731 - DNA, 89 bp, Homo sapiens
ctcactgcaacctccgcctcccagattcaagtgattctcctgcctcagcctcccgagtagctgggattacaggcgcctgccaccatgcc

SEQ ID NO: 10732 - DNA, 421 bp, Homo sapiens
agtggttgcttggctataggctgaagcaatggcgtgactaggcctagaacctttccttgtttagtaagctaaccccagcttgctcccagggtggcagggtcccaagaacagcaagagagcaagctccagtgcataagctcttttcaagtctttgcctatattatgtttgcttgtcctgttgggcagagcaagtcacctggccaagcccagtgtcagtatagagggcactaccaaatggtgtggacacagcgaggcagaaaaagagctgagaccattactattattattccaccacaacttaactgcttgattcagtattctgacgtgaactcagggttatctgaaaactttctcctgccgtaataaatctgtgaatggagcataatcatgtctgaagttgcatagagccctctgaaccaca

SEQ ID NO: 10733 - DNA, 136 bp, Homo sapiens
tttttttttttgagaccgagtctcgctctgtcgccaggctggagtgcagtggtgcgatctcggctcactgcaacctccgcctcccaggttcaagcaattctcctgcctcagcctcccaagtagctaggactacagg

SEQ ID NO: 10734 - DNA, 145 bp, Homo sapiens
cctgtagtcctagctacttgggaggctgaggcaagagaatcgcttgaacccgggaggtggaggttgcagtgagctgagatcacaccactgcactccagcctgggcaacagagcgaggctccgtctcaaaaaaaaaaaaaaaaaaa

SEQ ID NO: 10735 - DNA, 450 bp, Homo sapiens
ttctagatctttgagaaatttccacactgtcttacacaatgtctgaactaattgacactcccactgaatggtattgcctaggttttcttctagagtttttaggattttaggttttatatttaagtctttaatccatcttgagctaatttttgtataaggtgtaagaaaagggtccagtttctgttttctgcatatgcctagccaatttccccagcaccattttttaaatagggaattctttacccattgcttgtttttgtcaggttggtcgaagatcagatgattgtagatgtgtggtgttatttctgaggcctctgttctgttcccttggtctatatatctgttttggtatcagtaccatgctgccttggttactgtaaccttatagtatagtttgaagtcaggtaaagtgatgtctccagctttgttttattgcttaggattgtcttg

SEQ ID NO: 10736 - DNA, 250 bp, Homo sapiens
ctgtaaaggattttatttctcctccacttatgaagcttagtttggctggacatgaaattctgggttgaaatttcttttctgtaagattgttgaatattggtccccactctcttctggcttgtagtgtttctgccaagagatcagctgttagtctgatgggcttccctttgtgtgtaacccgacctttctctctggctgcccttaacattttttccttcatttcaactttggtgaatctgacaattatgtg

SEQ ID NO: 10737 - DNA, 278 bp, Homo sapiens
tcccagcactttgggaggctgaagtgggcagatcacgaggtcaggagatcgagaccatcctggctaacacagtgaaaccccatctctactaaaaatacaaaaaattagccaggtgtggtggcgggcgcctgtagtcccagctactcgggaggctgaggcaggagaatggcatgaacccaggaggcggagcttgcagtgagtcgagattgcgtcactgcactccatcctgggcgacagagtgagactctgtctcaaaaaaataaaaataaaaatacaaa

SEQ ID NO: 10738 - DNA, 734 bp, Homo sapiens
aaaaaaaaaacaaggggctggggagccaagatggctgaataggaacagctccggtctacagctcccagcgtgagcgacacagaagacaggtgatttctgcatttccgtctgaggtaccgggttcatctcactagggagtgccagacagtgggcacaggacagtgggtgcagcacaccatgcatgagccgaagcagggcgaggcattgcctcactcgggaagcgcaaggggtcagggagttccctttcctagtcaaagaaagaggtgacagatggcacctggaaaatcgggtcactcccaccctaatactgtgcttttccgacgggcttaaaaaatggcacaccaggagattatatcccgcacatggctcggagggtcctaggcccacagagtctcgctgattgctagcacagcagtctgagatcaaactgcaaggcggcagcgaggctgggggagggatgcccgccattgcccaggcttgcttaggtaaacaaagcagccgggaagctcgaactgggtggagcccaccacagctcaaggaggcctgcctgcctctgtaggctccacctctgggggcagggcacagacaaacaaaaagacagcagtaacctctgcagacttaaatgtccctgtctgacagctttgaagagagcagtggttcttccagcatgcagctagagatctgagaacgggcagactgcctcctcaagtgggtccctgatccctgatccctga

SEQ ID NO: 10739 - DNA, 484 bp, Homo sapiens
tccgtcaaaagtaaatggatcaaccaactgtggtatattcattgtatggaatgctactgagcaattaaaagaatgaactgatatacattacaactgatggatctcaagtgcatcatgttaagtgacctatgccaaagtcaagtgacttaatactatgttattccatttgtatgaaattctggaaaagtcaaaactatcatcataggaagcatgtcagtagttgttaaggactggtggtattgactacaagagggtccagggaatttgggtatggggggaatgagggaactatcctgtatcttggttatggtagtgctcacaaacctatgtgcatttgtcaaatctcacagaattgtatactaaaaatgtgaattttactctgtataaattgtgccttaaataaatgacaaaaaagaaaaaaaagccctgagttttaactgcagtaggtgctgaagcaagaatagtgtcactaaaccaaaaaaaa

SEQ ID NO: 10740 - DNA, 686 bp, Homo sapiens
cagttcccaaataatacttttataatttcttatgcctgtctttacttcagtctattaatcctgttatctttgtaagctgaggatgtaggtcacctcaggaccactgtgataattgtgttacctgtacaaattgattataaaacatgtgtgtttgaacaatatgaaatcagtgcaccttgaaaaagaacagaataacagcgatttttagggaacagaggaagacaaccataaggtctgactgcctgcggggttgggcaaaaatagccatatttttctccttgcagagagcccataaatggatgtgcaagcaggagagatattgctaaattcttttcctaacaaggaatattaatattaataccctgggaaaggaatgcattcctgtggggaggtctataaatggctgctctgggaaatatctgtcttgtgcagttgagataaggactgagatatgccctggtctcctgcagaaccctcaggcttactagggtggggaaaaactcagccctagtaaatttgtggtcagactggttctctgctctcgaaacctgttttctgttgtttaagatgtttatcaagacaatatgtgcaccgctgaacatagacccttatcagtggttctgcttttgccctttcccttgtgatctttgttggacccttatcagtagttctgcttttgccctttg

SEQ ID NO: 10741 - DNA, 169 bp, Homo sapiens
ggtctgagagacagtttgttgtgatttctgttcttttacatttgctgaagagtgttttacttccaattatgtggtcaattttagaataagtgcattgtggtgctgagaagaatgtatattctgttgatttggggtggagagttctgtagatgtctattaggtctgcttg

SEQ ID NO: 10742 - DNA, 169 bp, Homo sapiens; identical to SEQ ID NO: 10741

SEQ ID NO: 10743 - DNA, 164 bp, Homo sapiens
tttttttttgagacggagtctcgctttgttgcccaggctggagtgcagtggcgcaatctcggctcactgcaagctctgcctcccgggttcacgccattctcctgcctcagcttcccgagtagctgggactacaggcgcgcgccaccacgcccggctactttttt

SEQ ID NO: 10744 - DNA, 642 bp, Homo sapiens
ctgctcacagctctaatgtaggtctgggggcttttctgtgttacttgaaactagtattgattgcatcagcgctcaatataatgccccagtagtcatccttgctgctttagctgaggaacaaaaggtaaaatcaagctaaatgaaatgaggtaaatgtaggaccagaaaaaccagaagtcttcattgcctgctctcaggcatcatcaaaacaaaaggctctctggctggcaaggtcagtaagggagacgagagaggataggaatactcagagacaatatgttgccctgctaagagcaggtcatggtccttaatgtaagccatgtcatttgcttacagtctttattatttaatctctgacagatggaaattggttgagaacaggtaatggtacagagtcttctgtgtgtgcttgcatgccagtgagatctactgggagaattaacttctactctcccagcacaatcggtggtcattttgagtgaccacatcatttatctccaaaccaggacaccttggagaacacaagaggatactgttaaataaacgtgagtgtataataaacacacagtgggacttccccaggcaaacagggactcttaggggatgtatgatcaccttaacatgttttctgtctggagggaa

SEQ ID NO: 10745 - DNA, 440 bp, Homo sapiens
cttaactctcattactacctgttatctctttgaagacaagggatatgtaaaggtacatatatgtgtatagattgtgtatgtgtttgagtatgtatgtatgctttaagccttgttccaagattggtttatattagaaactaaacaaatacagcccagcacggtggctcatgcctgtaatcccagcactttgggaggccgaggcgggtggatcacgaggtcaggggatcgagactatcctggctaacatggtgaaatcctgtctctactaaaaatacaaaaaaaaaattaggtgggcgtggtggtgggcgcctgtagtcccagctactcgggaggctgaggcaggagaatggcgtgaacccaggaggtggagcttgcagtgagcagagatcgtgctgctgcactccagcttgggcgacagagcaagattccatctcaaaaaa

SEQ ID NO: 10746 - DNA, 252 bp, Homo sapiens
tttttttttttttttttttttttttttgagacagagtctcgctctgtcacccagcctggagtgcagtggcatgatctcagctcattgcaagttccacctcccaggttcacaccattctcctgcctcagcctcccgagtagctgggactacaggcacccgccaccacgcccagctaattttttgtgtttttagtagaaatggggtttcaccgtgttagccaggatggtctccatctcctgactttgtgatctg

SEQ ID NO: 10747 - DNA, 1661 bp, Homo sapiens
tgtaaatttgtttaagttctttgtagattctggatattagccctttgttagatgagtagattgcaaacattttctcccattctgtaggttgcctgttcactctgatgataggttcttttgctgtgcagaagctctttagtttaattagacgccatttgtctattttggcttttgttgccattgcttttggtgttttagtcatgaagtctttgctcatgcctatgtcctgaatggtattgcctaggttttcttctagggtttttatggttttagttcttacatttaggtctttaatccatcttgagttaatttttgtataaagtgtaaggaagggatccagtttcagctttctacatatggctagccagtttttccagcactacttattatatagggaatcctttcctcattgcttgtttttgtcaggtttgtcaaagatcagatggttgtagatgtgtagtgttatttctgagtcctctgttctgttccattgatctatatatctgttttggtaccagtaccatgctgttttggttatgtagccttgtagtatagtttgaagtcaggtagcttgatgccttcagctttgttctttttgcttaggattgtcttggctatatgggctcttttttggttccatatgaactttaaagtagctttttccaattatgtgaagaaagtcattggcagcttgatggggatggcattgaatctataaattaccttgggcagtatgactgttttcacaatattgactcttcctatccatgagtatggaatgttcttccatttgtttgtgtcctcttttatttcattgagcagtggtttgtagttctccttgaagaggtccttcacatcccttgtaagttggattcctaggtattttattctctttgtagtaattgtgaatgggagttcactcatgatttggctctctgtttgtctgttgttggtgtatgggaatgcttctgatttttgcacattgattttgtatcctgagactttgctgaagtttcttatcagcttaaggagattttgggctgaaacaatggggttttccacatgtacaatcatgtcttctgcaaacacagacaatttgatttcctcttttcctaattgaataccctttatttctttctcttgcctgattgccctggccagaacttccaacaatatgttgaataggagtgatgagagagggcatccctgtcttgtgccggttttcaaagggaatgcttccagtttttgcccattcagtatgatattagctgtgggtttgtcataaatagctcttattatttatccaggaatttatccatttcttctagattttctagtttatttgtgtagaggtgtttatagtattctctgatgtattattgtatttctgtgggatcagtggtgatatcccctttatcattttttattgcatctatttgattcttctctcatttcttctttattagttttgctagcagtctatgtattttgttgattttttcaaaaaaccagctcctggattcattgattttttttgaagtgtttttttgtgtctctatctccttcagttctgctctgatcttagttatttcttgccttctgctagcttttgaatttggttgctcttgcctctctagttcttttcattgtgatgttagggt

SEQ ID NO: 10748 - DNA, 828 bp, Homo sapiens
ttttttttgtttttgttgtttttgctttcttttttttattatactttaagttctagggtacatgtgcacaacgtgcaggtttgttacatatgtatacatgtgccatgttggtgtgctgcacccattaactcgtcatttacattaggtatatctcttaatgctatcgctcccccctcccccaaccccatgacaggtcccggtgtgtatgttccccttcctgtgtccaagtgttctcattgttcaattcccacctatgagtgagaacgtgcagtgtttggttttttgtccttgcgatagtttgctgagaatgatggtttccagcttcatccatgtccctgcaaaggacatgaactcatccttttttatggctgcatagtattccatgatgtatatgtgccacattttcttttctttttttttcttatactttaagttccagggtacatgtgcaaaacgtgcaggtttgttacatatgtatacatgtgccatgttggtgtgctgcacccattaactcgtcatttacattaggtatatctcctaatgctatccctccccccttcccctaccccacaacaggcctcaatgtgtgatgttctccttcctgtgtctaagtgttctcattgttcaattcccacccatgagtgagaacatgcggtgtttggttttttgtccttgtgatagtttgctgagaatgatggtttccagcttcatccatgtccctacaaaggacatgaactcatccttttttatggctgcatagtattccacagtgtatatgatgtgccacatattcttaagccagtctatcattgttggacatttgggttg

SEQ ID NO: 10749 - DNA, 424 bp, Homo sapiens
tggtctttgatgatggtgacgtacagatgggtttttggtgtggatgtcctttctctttgttagttttccttctaacagccaggaccctcagctgcaggtcattggagtttactggaggtccactccagaccctgtttgcctgggtgtcagcagtggtggctgcagaacagtggatattggtgaaccgcaaatgctgctgcctgatcgttcctctggaagttttgtctcagaggagtacctggccgtgtgaggtgtcagtccacccctactggggggtgcctcccagttaggctactcaggggtcagggacccacttgaggaggcagtctgcccattctcagatctcaagctgcatgctgggagaaccactactctcttcaaagctctcagatggggacatttaagtctgcagagtttattgctg

SEQ ID NO: 10750 - DNA, 533 bp, Homo sapiens
gttttttcgctttgttttttccccatctttgtggttttatctacctttggtctttgatgatggtgatgtacagatggggttttggtgtggatgtcctttctgtttgttagttttccttctaacagtcaggaccctcagctgcaggtctgttggagtttgctggaggtccactccagaccctgtttgcctgggtatcagcagcagaggctgcagaacagcagatattggtgaacaacaaatgttgctgcctgatcattcctctggaagttttgtctcagaggagtacccggccgtgtgaggtgtcagtctgcccctactggggagtgcctcccagttaggctactcaggggtcagggacacacttgaggagtctgtccgttctctgatctcaaggtgcatgctgggagaaccactactctcttcaaagctgtcagacagggtcatttaagtctgcagaagtttctgctgccttttgtttggctatgccctgcccccagaggtggagtctacagaggcaggcaggcctccttgag

SEQ ID NO: 10751 - DNA, 608 bp, Homo sapiens
tttttttttttctgagacagagtctcgctctgtcgcccaggctggagtgcagtggtgtgatctccgctcactgcaagctccacctccctgggttcacaccattctcctgcctcagcctcccgagtagctgggactacaggcacccaccaccatgcccggctaattttttgtatttttagtagagatggggtttcactgtgttagccaggatggtctcaatctcctgaccttgtgatctgcctgcctcagcttcccaaagtgctgggattacaggcgtgagccaccgtgcccagccttggatgggcttttgatgaactatctctgcctcaagaaccactcccaaaacttagtggtttaaacaacaaccgtgactcttgggttgactggggctcagcaggccagtgccttttcactttgaagatggtgctggatacttgtgctgctccatgtggcatctggacctctggggcttctccacattggcctctttctctatgctagacttttcacatggtcagcctggggctccaagagaaagaattagaagtggtcaggctttctcagtgcctgggcttgcaagtctcaggatggtgcttctccacattttt

SEQ ID NO: 10752 - DNA, 275 bp, Homo sapiens
gaagagagagaaaagaggttgaaggaaaggaagagaggttaaaagagaaagagagtgagaaaagagggaagttttattttctaataccattacagaaatattttgtgctcatatttgacttccaacttttaaatcaaggttcattagacaaagattattaaccagtttcaatgaagcctcagttacctccagccttaaatacagacagaaatatttgggaaacataccattttgttcgagagttaaggattcctaatttaagtatataagctttt

SEQ ID NO: 10753 - DNA, 150 bp, Homo sapiens
gctgcacccactgacccgcgcccactgtctggcactccctagtgagatgaacccggtacctcagatggaaatgcagaaatcacccgtcttctgcgtcactcacgctgggagctgtagactggagctgttcctattcggccatcttggctc

SEQ ID NO: 10754 - DNA, 188 bp, Homo sapiens
atggctcagattatgtgtcagccttgatgttcatgaaaacctagaatgataagatcatgttcctcaaggaaattccagatcttggttagtctatcttgtggttaaaaagatccttaaagtagagcaatttgaaactcttaataatctttaatagtgtttccttttaattaaaaatatattcttcctga

SEQ ID NO: 10755 - DNA, 6115 bp, Homo sapiens
ggaaatggaacaatagacttcaatgaatttcttctcacattaagagtaagtggccccattaatcagtgtatctgctgagtttggctttcacgtagtttgggttggctaccttgaggttttgtttttacaagttgttagtacactgtggggagggggataagcagaaaactgtgaacagacttaggaatttttggagcaattgtagtgtctattacataatagcacacaaatattatttcacatcgttgaggggaatgagatattttatcacataggataccaaaaaagctcatttgcttatgtatgtctctgtatgtattcttctatttttgtagcctccaatgtccagagccagaaaagaggtaatcatgcaagcttttagaaagttagacaagactggagatggtgttataacaatcgaagaccttcgtgaagtatataatgcaaaacaccacccaaagtaccagaatggggaatggagtgaggaacaagtatttaggaaatttctggataactttgattcaccctatgacaaagatggattggtaagtaaaagagcctaatctaggggaaatttcttcaattcgaaattgtaaatgggaaataggtccaaactcttaaaaatgttaacacattgataccatatttgttgtaaatagaagtaaactatttccctaggaacaatctagaaacttctccattgccaggggaaaccttcatgttactttagttgaaacctaatgtatgtttgtgcacgcacacactcatagacatatattgaaatatattggtaggggatccacataagtgatgacctgtcatctggggaatgtgatgttctgattaaacatgccattttatggttactatatttaccatactcagctagttgcactccagtgaactgattataataaaatatatttaactttgaaatgagatcataatttaattttggagaacagatttacaaggcctttcaggatgttttagcgccttcacactcatcctcattcatcttcacactttgctatgtggaaatgccatttaaaggtagtttttggtaaagggaatgtcaaataacagaatttactctgatttattctttagtgtgctttgagattaacttacatttctaaactgcactgaatttgaaaacaaaatcaaccgcccatctccattaacttttatcttcaagttacaaatgcatagcttggtagggtaaggaattatatagctccatgactgtgtctaggctgagatgaaaatgtcatctgtcctttatcaacagccctaaattgactttttagaaaaaaaaaaaaaccctgagccagttctgttcttagatgatctaagggttttggtgataaggaaaggggattgtcccttgagtaacagtcagcagcagcacagccccagggttcattgtctcttaagccctttacagcacaggaaaagataagtggcccagtggacaagaagagagtggttaagggaagaagaaataaaccttcctcttctgaagggaatgtgctccaactttttaaatgaaacttcatgatgagtctcattagcaaggggtgggggataggaaggtgacctttctgttcttcctgctgacatttccctttcagggatggagacataccctctatttcaggctgaggattgtggaggcaggtttacaaaagggccaaaattcaatagggcagccaaaatcttagggacagaaataaaaactacatgttttcttccagtattgctggccttgatcactgagatgtcagtggaaaaatagccaactgccatttccccaaattagcccacccctttgtggatcctagagtgtgtctgcttcctctctgcaggtggttcctcctcattgccaggggaaacctcagctacccttttctctaacaaaagtcaaaatagccagttgtgattcggctgattcaagtctgcacatcaccccttttgatatttatcttaagaagccacattaagctctcaaaagctcataaaggttattgaggtttttagcagttatagcacttgatgtcatctgcatgttacagaccctgtattgatacccaactctggctgttcataatcatcatcagggaggatttattagtaatgtagattcctagctgcactgcagaaccacagaatctgattttttggaggatggagtccaaggctttacattttaatgtataccagatgactcttacactcacgtgtatttgtgatccttagctctaaaagattcagaaataactgttttaaaattactaaatataatatacacatgaccccatttagcataataatgaatctgggcaacactttttgagcacatatcaactgggcatttgctaagggcttaccagggatatctcatttaatagacataataaaagtgtttctgaaaagtgatgtgtaattcaaactttcgcacactgaattgtattttaaatgcacaagaaattgttgttgtagaggaactccatggtaaattcttttatgagaagaataattagcttctaaaatttacctcttgcaaattgcactattttgcatattaagattgcttgtggtgaagcatagctgtacttgaagccagtgtgctcatttatggttaaaaacatcccatataagacaaaatttaaaataatgcaaaaaatttagcatagctcctagctaaaggtaatgttcaaacttgataatctaggttaaactctcaaatacccataaaggttgctggagtttcagcagtcacggaatttgatgtcataaatcttgcactaatacctcactggactcccatagcagccggaagccatttggatggaggtgtgaagcaatcagataacctgtgacacagactttccttaccccttttctatcactaaaccccaccacaatttggtgagacatttacttcttattctttaatatctaagttttgaattcttcatgtgtatatatgactttatcatcactatatttttaaaaagcctcttaggactttagaccttcagggaatatcagtctattgcctcatccatctcataaaaaatttttaaataattaaaaatatgttaggtatattactgagtgtatgtattaatagtaacctagatttgttttaggatttttctgatgaatttggagctgagaaaaagggcttgtattgtgacttccattacccccatctgggacctttccttgtatatatgatatatatcttgtcacataaaggtagcctagtcaagaggcctgctaaaagtaggagtgcccagtctctcatttttttctaatgtcaaataaaatgaataaggatagtgattattgctaaccaacaatttactatgatgagggcaaatttacaggagatcagagaatttgcgattcaggccattcccaatataagttgagtctcagaaaacaagcaaacacctagctaagagtaactgatggctttttctgaaatgatcaaatacattagctctgacctctggcttgacatcatctgacttccaagtgaggtttaatgcttcctttatcttttgcccatcttggattccttctccattctccaacagagccaactcaactcaggtcaccccatcccactgggggagtttgggatggaaggatgggtgacgataccagtctcaatcatgtattggtgtttcagttagggtttgctttcaattgcaagaaataggaaatcttattatacactggaatacacaaattaggttttattttttattctacttgatgttctcacttgagtggcttaaagagagcagagctgaagtctttgtgattttcctggcctttccttcatgatctcaagatggttgcctaacttcagccagcacatctgagtttcaggcagcaggacaaaggagggagaaggagggaacgagaaagggctggagcctgcatcaggaaagcaaaggcttccctagaaattcatgtcaaatttcctttgtatcttattggtgagaaatctattacttggccatcccaagctgaagctgcagaggagtctgggaaagtgagttttgagtttttcaacttctgtgggagagaaaagctagggataggattattacagtggatgtggagggagtctcactcaatggctgtcatccctggccaacaaacagacaatagaaacaataacaaactaaaaatatcgggagtttgataatttttaattaaaaaataattagctgtaaaaaatgttcctcaaactgtcacggtaaagtgcaccgtcaaaatggctcagggtctcgtgggtaactcttttagtttacttgctatttgctgtaaaatgatccacttactttgttggagtatttcaccagcctgcaactttttgaggactgagactttatcttaattatctttgatattcccagttaaattactgtagtgtgcacaacaattaactgggatgtttagatttttaagaagtaaattccacaaccacctgcttcagagattctgatttagcaggtgtggggtacagcctgtgggcctaggcttatgacagacaccccaggttgtcctgatgcaggtggtgtggacccacactgataaacatttccctggaacctcacacaacatgagaaagatagaaagagggcaataatgatgtgtgaaacttaatgtaatcccttaatgagggaattgaaaagcagaggctgaggaatccaaaggaggagaggaataaagaagttcaacaaagggggatgctaatggtatcctaattttgacagaggctctatgcatgtattgtagatgtgtatttacagttcaactatgagctgagttcaaatgcctttctttctactgcccttccttatgtttttagtgggaaggggtggtatgaaagacaactgtggatccagtgacttttcttttctggtcacttataatttcaataggaccagtgggtcagtcatctcttatgattcttggaaggcataggtatgtccccaaccgatcatgtcaaccaacatgattaaattagagtgtacatattatctagacctgttaaaaataagactaataactgtcttttctccttccccaaaggaaagtaatataaaatccccacacagataaacacattagtcaatatttcaaagagatggtcatgggtgtagagtggagagaagccaggatgggtgggaggcatgaagcaggggtaagctttttattcaccctgggccttgaatgagttatttatgtgttagaaaagcatgcaacccgggagcgtttaactagaaatctgtttcttcacccacaggagagaactccatttttggaaagggaaaacatcacttaccctgacacaaggacatgacatgttgtttctgacgtgtcacagaaagacagaaataactacagttgcagagcacttccttcttactctgagtttcagtctcccttacctgaaccgacgggctcccacccttagacaaaagatgacaacctatgcgtcactttccatttaggttggcttagaaactttcaagactttctttctctcttcctaggtgctgttctcacaccatcctcagcttcacttgttcttttgttttagatcagttcctcagccatgatcacatacacaaagaaatcctctatttcccttctatttacaggtgcacaaggtgggcgcccattgacagagtgagaagcaaagtttcgtttttgtttctaacttttccactgcaggtgacccctgaggagttcatgaactactatgcaggtgtgagcgcatccattgacactgatgtgtacttcatcatcatgatgagaaccgcctggaagctttaagcacatgacctggggaccaggccctgggacagccatgtggctccaaatgactaaatgtcagctcaaaaaccagaatcgtatttgatttcacactcatcctaatgtttttttctgtgtcaaaatattgcattttctggggccaaaaaacaggcagaaataaaagacattgagtagccaactgtgagtttgccttgcctaagactgtttcctttgttctaaaataggacttaaataaaatgagctctgtaaa

SEQ ID NO: 10756 - DNA, 6466 bp, Homo sapiens
ggaagcggtgttgtgtctgcagctctggcagaggactgttccactagacacgctgaagggactgggtacgtgttttccttcaggaccagagctgagaggagctgggatcgcggcggcaatggaacgggcctcagaaaggcgcacggccagcgcgctttttgcggggttccgggccttgggacttttcagcaacgacattccacacgtggtgcggttcagcgcgctcaagcgccggttctatgtaacaacctgcgtgggcaagagtttccacacctatgacgtgagtgacttcttttgttagcttcccaggaaaaccaccctccttggcctctaactctgtcctggagcagtccggttctcccttcccatttaccacgggcttcccttctttaacccctccctgtcctattaatatttcgccatccggtcacgtccacgtgctgatttggcacttgcagtcctcctggggcgtgtttcagaggcagcctggccaaggggaaactgctagagaacatctcagttgtatggcagtaatatttgttcagtgaatatttattgaccttcccttgaaggtggaaacataattaagacaaacctctacctcttgcattcttaatgagagagaaaaacatgcacgctattacgttattggtgacacgagctgagttagaaattcactctaggtagaatacattgggagaaccggagatggtgagattaattaccgttagggaaaatatctaatagcaatcagttattttcaactaacgcaaagtgtctggcactgtcactctaagccttgcagccgtttctttgcaacataggtgtcattataccgtagcacctttatataatctattaaagtaaatttcagataaatcacttgttagtgatgattttttctcctataacagttcatcgatcattgtaatagtgtctcttgtttacttgtttcttttgtcttctccgaaagaatgtaacctctgtgagaacagaaaccttgatgaggaggatgataatagtcagtgttaattaagtactttcttttctggaaaacaggtagagttgtctctcttggaggattgtgaatatcaaatggcttattagcaaaaagagctgggaggtaggaactagttgagttagtggaaaaggaaagtgagggcagagctgaggtgaagagcaattgggtttctcagagtctgagctggtaatggagacagggtgggttagaaccatattaatcatgtgaaagtatttagtgttaccattctctgcacttgttccttgcttgctaacttttgcttttgctggttaatgttttcttccttgaaatgtaatttttctgagtttattactgaaataactcttgaaatcttgtctttggtacagtgtctttcctgacactgcattacacacagacacaggtgtttttccctatattctacttccaaagaaaccctgtggtgaggagagtaacatatttgtacattttataaagttaacaatttacttactgtgtgttgacatttagtcataataaagatggcttttaagttctcctctagttctaacactgatgatacattcgtaacatcatggcatgtaaatgttctttacccagactgtacactgctcagattaaccaatgcattgggctgtgacctctaaaactgaaaatacttgggagtaaaaagaaaaaaaaaaggagctaatgaacctaagtcactaattgggtctacaagtgctctatcccatgactatggctatatatgctgtccccagtcagacttcctacagtcctacagattagtttcttctacaggggaaactagacaagttgtgaataggtggtggtagtgatggtagtagctatcatgtattgagcagttactatatgactggccccattctgttttacacaaatttactcattgaatcctcataacaatcccataaagtaaataaatacctgttttacagatgaagaatttgaggcacagggagcttatttttccagggtcatacagctggatcagtagccatgattggggtcagcaaattacagtctgtaagccagtctagcccactgtttgtttttgtatgacccaggagttacgaatgattttgacatgtttaaatgtttgtgggggcaggctgggggtagggagaaggatatttcatgacatgaaaactatgtgaaaatcaaatttcagtatctatagataaaagtttaatatacccatgcacattatttatctattacgtatggctgttttcatgctacggtggcagaagtgagtagttggcaacagagaccacatgcattgcctgcaaagcctaaaatatttaatatttggcccattatagaaaacatttgcctaccccttccatcaccactcctggtgaaatacagttgaaaatataaactttcctaataaagaaaattagtgtcagtaagtgtctttcttatgaaggacagcatagcaaatatacgtatgaggttatatcttaatcttcaggtgttaggttattatgattatgtttgttaatgaaaatttaaccttttttcttttttaaacaggttcagaaacttagtctggttgcagtaagtaagtatggactttattctgaatttatgcacatctaaactttttttttattttgacataaatgtgagacttacagagcatataaggaagccaaggtaacatgtatgtcttataaacttacattatcagcaacaaaaaagggtgccaggataaatcatgttttgcttttagttgttatgtatctttattttctttaatctggaactgttctttagactttctttgtgcttcatgacattgacacattgacatttttgaagagtacaggctcatttagaatgtccttcagtttgagtttttttgacatttcttcaggattagatttaggttgtaccccttgggaggaatcacagtgaattgtatcagaaggcacatgctgttagttggttctgttcctggtagtgattggttaggaggctctatttttaagttagtgttttgtcatttgtaacgaataagtatcttttggtagtatgcactgggactatgtaaatatcttagtactcttcaaagttattacctgctgcttttatattttatgatgatacttgcctgaatcagttattagtatgatggttgccaaatgcatgttgattatccttaatccaaaaatttgaaacccaaaatgctcctaagtctgaaactttttgagagccaacatgacgttaacagggaaatattcattggaacatttccgatttcagattttcagattaggaacattcacctggttatacatatagtccaaaatccaaaaaaatccggaatctgaaacacttctggtctcaaacatttcagataaagcatagtcagcctatagtgattttcttttgccatcattccttctactgtaaggagaagttttcccttttctcacattttggtatttctttccaatggaagggtttttttttaaactatctaatagaataaaacatttctcagggcagagaggtacttgttttaccatcaaatatggttcttgtgagagaaacagaagacctacaaggactgtaatgtgtatgtgtattaaacttatattttaataatagattagaaggcagaagaaaggcattggaacttaagttgaatacaaaagtgaatgataaacttataaaacagggttatgcaaacaaatactaatatggaatttgcagcatgaaaagtacaacaatcctgtgtctactaaccctcctgccccaaaagaggaaatgaaaaggtcagtgtgaccaggatactgagagaagaatcatatgtcacgtgagaaatgctaaagattgataggcatatttcccttggagaagactgtagaaacaatattgtctttaaatgttttaggaataggcatatagaataccatatgtaatatttttgggttggtccaaagggtagagttagagatttagattttgagttacttttaaaatttttctggagttattagtgaacttgatgttccagaagatactcacatgggttaggcatgtggctcacgcctgtaatcccagcactttggaaggccgaggtgggcagatcacctgaggtcaggagttcaagaccagcctgtctaacatggcaaaaccctgtctcttctaaaaatacaaaaattagccgggtgtggtggtgcactcctataatcccagctacttgggaggctgaggcaggagaatcagttaaacctgggaggcggatgttgcagtgtgccaagattgcatcactgcactccagcctgagtgacacagcaagactccgtctctcaaaaaaaagaaaaaaaaaaagatgttcacgtgaagactggatgactatctgtcagagctttgtgtttcaaatgacagttttttccaaataacctcaaaaagcttgttttcatttctctaggattatgtttttatttctgcaaatcctagacattctcttagggaaggacaaggtgatttcctatccttagtttgatagttactattagatatctaaaatattttagttaaaattttatacactgattctcaactttgatctttatttatatatttttttaaattatagccatgaaaaatgttatatgtatacttgaggtttctctttaacatcttaaaaatccctgtttctttcattttgtattttctgctaggtaattctgttccacaggatatctgctgtatggcagctgatggcagattagtctttgctgcttatggaaatgttttctctgcatttgcccgtaataaagaggttggtatcgctaaactacttgtttgtcagtcagtatttgtttgtcatgatagtggagggaactttaattttgtcattctttacccagcacactctggaactatacagtattcttttttttctaatgtatattcagttttctggaggaagataaattttcagaaaaggcttacttaaaactggtgctttacttcagtttctttgccagagatgaatatcaaaattacttggagaccttcttcaaaattttttatgccgttagttcccatctcaggagttttctattttgtatatttgttgagataggacataatgtgtattattaagtgtagttttaaaatactttcctagaaaattcatatttgcaccaccactttatgtggattggttatttattatgtataacttagcttataactctttttctaaaaatcagatgcctgttcgctgtttagagaaagctagattctatgttttctccactgctaaggaaagatcttttctggtctaaatctaccagttggtttctgaatttgtcctggaacaactagcttgagaagtgacctggccttaatggtctagaatgaaaggaaatgtaggaatgggggtacaaagatagccaaatgatagtatcactgtacttgtcagggacttggagtgaggtggttcccacagtctttcatcatcacttcctgtggcagaggaaggtaacttatctgtagagttctttaatggaaggtgttcagatttttagaattggaaaaaatgttcatttttgtattgttgtttatagttttcccagggagatatatgtgatttacatgaggagactttatcctatatgtataacctatatgtggttcagatgtggagactttaataaaggacctttatgcacaggtgtggtcagggttaggggaacaaaataggggtggggaggcgtcagacactgtcaactgtaggaagttgttaccacccctaaggccaaagggccaaggagaggaaacagtgttactggaatctagtgagaactgaaaccatggagaaggggctatacttatggagggatcagctactgtaaggatctctgtcaaagcagaagggtatggggaagaagaccctatatccccctttcccatctcatctgaaagccagttggtgatggagtctttagagatcagccttctggaatataccatctcgctaggatatatgtagttgcactgattgaattgggtgagggaactaggtgtgtgtgcatgcctcctctctaacccaagatggaaggcagagcctcagaggtctcatttctttgttcttaatggacagtttacttccttattgttgaactggctgagggagcagatgaacatgcctggtcccttaatatttatgtgttcatcctaaccttgaataatcaaaagttggggtacatttcttaacagaagcatctcaggattagcatgtttttgggataatatgaataatatgacatgatgactgagtaataatatgaaattcttttaaacttcgatgttttagatagtacatacctttaagggtcataaggcagaaatccatttcttgcaaccctttggagaccacattatctctgttgatactga

SEQ ID NO: 10757 - DNA, 787 bp, Homo sapiens
tacaatgaactccaacaaatttacaagaaaaaaacaaacaaccccatcaaaaagtgggcaaaggacatgaacagacacttctcaaaagaagacatttatgcagccaaaaaacacatgaaaaaatgctcatcatcactggccatcagagaaatgcaaatcaaaaccacaatgagataccatctcacaccagttagaatggcaatcattaaaaagtcaggaaacaacaggtgctggagaggatgtggagaaataggaacacttttacactgttggtgggactgtaaactagttcaaccattgtggaagtcagtgtggcgattcctcagggatctagaactagaaataccatttgacccagccatcccattactgggtatatacccaaaggactataaatcatgctgctataaagacacatgcacacgtatgtttattgcagcattattcacaatagcaaagacttggaaccaacccaaatgtccaacaatgatagactggattaagaaaatgtggcacatatacaccatggaatactatgcatccataaaaaatgatgagttcatgtcctttgtagggacatggatgaaattggaaaccatcattctcagtaaactatcgcaagaacaaaaaaccaaacaccgcatattctcactcataggtgggaattgaacaatgagatcacatggacacaggaaggggaacatcacactctggggactgttgtggggtggggggaggggggagggatagcattgggagatatatttctaggttttgaaacccgaat

SEQ ID NO: 10758 - DNA, 466 bp, Homo sapiens
cttgctttgtaaatgcaagcccccgggctgaatgactaatgtcttggaacttccttctgagagcaccaaaccactgccagtaatcattagagacccctcataagatctgaatagacaaagtcattcatgttaaaattaaattgggttgggcatgctggctcacacctggaatcccagcactttgggaggccaaggcaggtcaatcacctgaggtcaggagatcgagaccagcctagccaacatggtgaaacgccgtctctactaaaaatacctaaaattagccgggcatggtggcgtgcgcctgtaatccaagctactcaagaggccgaggcaggagaattacttgaacctgggaggcggaggttgcagtgagatgagatcatgccactgcactccagcctgggtgacagagcgagactctgtctcacacacacaaaaaaattaaattaaaaaaatcaaattcttg

SEQ ID NO: 10759 - DNA, 534 bp, Homo sapiens
gctggtgaggagctgcgttcctttggagtagagtagaagaggcgctctgattttagaattttcagtttttctgctctgttttttccccatctttgtggttttatctacctttggtctttgatgatggtgacatacagatggggttttggtgtggatgtcttttctgcttgttagttttccttctaacagtcaggaccctcagctgcaggtctgttggagtttgctggaggtccactcctgaccctgtttgcctgggtatcagaagcggaggctgcagaacagcggatattggcgaacagcaaatgttgctgcccgatcgttcctctggaagttttgtctcagaggagtacccggccatgtgaggtgtcagtctgcccctactgtggagtgcctcccagttaggctattcgggggtcagcacccacttgaggaggcagtctgtccattccagatctccagctgcatgctgggagaaccactactctcttcaaaactgtcagacagggacatttaagtctgcagaggtttctgctg

SEQ ID NO: 10760 - DNA, 1001 bp, Homo sapiens
tctaaacttctcttctcacttcacttcattcatttgttcttccatcactgataccctttcttccaaatgattgagtcagctactgaagcttgtgcattggtcatgtagttctcgttccatggttttcagctccatcaggtcctttaaggacttctctgcattggttattctagttagccattcatctaattttttttcaagatttttaacttctttgccatgggtgcaaacttcctcctttagctcagagtagtttgatcatctgaagccttctctcaacttgtcaaagtcgttctccatccagctttgttccattgctggtgaggagctgcattcttttggaggaggagaggtgctctgatttttagagtttccagtttttctgctctgttttttccccatgtttgtggttttatctacctttgatctttgatgatggtgacgtacagacggggttttggtgtggatgtcctttctgtttgttagttttccttctaacagtcaagaccctcatctgcaggtctattggagtttgctggaggtccactccagaccctgtttgcctgggtatcagcagcggaggctgcagaacagcagatattggtgaacagcaaatgttgctgcctgatcgttcctctggaagttttgtctcagaggagtacccggccgtgtgaggtgtcagtctacccctactagggagggcctcccagttaggctactcagggttcagggacccacttgaggagacagtctgtccattctcagatctcaagctgtgtgtgggagaaccactgctctcttcaaaactgtcagacagggacatttaagtctgcagaggtttctgctgccttttgtttggctatgccctgcccccagaggtggagtctacagaggcaggcaggcctcctttagctgcggtgagctccacccagttcgagcttcccagccgctttatttacctactcaagcctcggcaatggcaggcacccctcccccagcct

SEQ ID NO: 10761 - DNA, 350 bp, Homo sapiens
aaacaatacacaggagagcactttatgaaccgtaaaatgctatacaactactataagacagtgtcaccatgtaattatgtgtaatatggcactagaattcatgtactatttcataaattcccctggataattaggttcccggagtattttcaggtagcacatgccgatttctcaatactaagggagacttgagaaatattcttgccacagggttctgttagtatattttattagtgggaaaaactgtattacacatatatatgaaaatatcaaaaattgcacaatagggctgcaacctgcccatctcacaaccaccaacatttgcctttttctgaataaacatatgtgct

SEQ ID NO: 10762 - DNA, 432 bp, Homo sapiens
aattcagcagaaggtctttaatctagttagtgtaactgagattttgccatataaatgattttttcttcatcccatttggatttcaaagccactgataaacctttttttggagtgatcctaatggaattaatcaaatttaaggagatgttgacttaaaatctttattagtggaaagaaaagaatattaataaaaggctaaaccactgcatcttgcatccctaaaaggattattttaaattcaatttttgcactgttattattaaagcagttcactcaaccagtcactaggtttgaactttgatttgaatcgaggtttgcagggcttccatcaaatctctgctaaatccagcttcggagaggagcagttaagtgtaactgcagccaaggttagaaaccttggctcacaacacttggccttgaccagcaggtacc

SEQ ID NO: 10763 - DNA, 301 bp, Homo sapiens
ctctttttgatggggttgtttttttcttgtaaatttgtttaagttccttgtagattctggatattagccctttgtcagatagatagattgcggaaattttctcccattctgtaggttgcctgttcactgtgatgatagtttcttttgctgtgcagaagctccttagtttaattagatctcatttgtcaattttggcttttgttgccattgcttttggtgtcttagtcatgaagtctttgcccatgcctatgtcctgaatggtattgcctgggttttcttctagggtttttgtggttttagg

SEQ ID NO: 10764 - DNA, 672 bp, Homo sapiens
ataatagacaaacagagcaccaaatcatgagtaaactcccattcacaattgcttcaaagagaataaaatacctaggaatccaacttacaagggatgtgaagaacctcttcatagagaactacaaaccactgctcaagtaaataagaaaggacacaaacaaatggaaaaacattccatgctcatggataagaagaatcaatactgtgaaaatggccacactgctcaaagtaatttatagattcaatgctatccccatcaagctaccattgactttcttcacagaattagaaaaaactactttaatttatatggaaccaaaaaagagcccatatagccaagacaaccctaaacaaaaagaacaaagctggaggcatcatgctacctgacttcaaactatactacaaagctacaggaaccaaaacagcatggtactggcaccaaaacagatatatagaccaatggaagagaacagaggccccagaaataacaccacacatctacaaccatctgatctttgagcaacctgacaaaaataagcaatggggaaaggattccctatttaataaatggtgctgggaaaactggctagccatatgcagaaaactgaaactggatcccttccttacaccttatacaaaaattaacttaagatggattaaagaccgtcagctt

SEQ ID NO: 10765 - DNA, 452 bp, Homo sapiens
ctttcatacaaacacaataataatatgatataatgagtggttgttgagagaaattcttaacataaacctttgtcaaatacagttgctatagccaaagaaagaaatagttctatgtattgtaaatctctatttgaaatactatgccaaataaatgatgcaactcataatcgcacattagggctggttgcagtggctcatgcctgtaatctcatcactttgggaggccgaggcaggtggatcacgaggccaggagttcgagaccagcctagtcaacatggtgaaactccgactctaaactacaaaattagccaggcattgtggcaaacacctgttttccctgctactcaggaggctgaggcaggagaattgcttgaaaccagaaggtggaggttgtggttagctgagattgtgccaccacactccagcctgggcgaaagagtgaaactccatct

SEQ ID NO: 10766 - DNA, 219 bp, Homo sapiens
actcacaagagtgaaagaataattcaaaaatctaaatgtgggaaggaagagggtgagaagggagaaaaaaatagagaagtcaacaagagccttggcagggggtgaagtccgcagtgaaaatcccatggtgccaaaatggccaaaggatgctttaaagacaaaaatgttctaatgtttaatttcaaatggtttgtttttccatgatgcaaacccattctt

SEQ ID NO: 10767 - DNA, 720 bp, Homo sapiens
gaaatttgcagttatatttttattaaaataaaaccctcatcctaatcctgaaaggagaaactgtgtagtagcatacaaagaacattaactttctaatcctgaccttactgtttcttggttatgtaactttaggcagcttacttacttttttctgtgcctcagtttctatacttgaaaaatggtgacactgctaggtacacacacacacacacacacacacaaaatacaattaaaaagtgggtgaaattcacaatagcaaagacatggaatcaacccaaatgcccatcaatgatagtctggataaagaaagtgtggtacatatacaacatggaatactatgcagccataaaaaggaacgagatcatgtccttttcaggggcatgggtggagttagaagccattatcctcagcaaactaatgcaggaacagaaaatcaaacaccacatgttctcacttataagtggcagctgaacaatgagaacacatggacacagggagggcaacaacacacactgggacctgtcagagggggtagggggaaggagagtatcagaataaatagctaatgcatgctggacttaataggtaggtgatgggtggttaggtgcagcaaaccaccatggcaaatgtttacctatgtaacaaacctgcatgtcctgcacatgtatcccagaaagtaaaattaaattaaattaatttttgttttttaaaaagtgagtg

SEQ ID NO: 10768 - DNA, 133 bp, Homo sapiens
cccaccaccatgcccagctaatttttgtatttttagtagagatggggtttcaccatgttggccaggctggtctcaaactcctgacctcaagtgatccacctgccttggcctcccaaagtgctgggattacagg

SEQ ID NO: 10769 - DNA, 246 bp, Homo sapiens
cctggaattcaccttgaattgatttctattggagacagttatccaatctaatttgcctcatatggataaccacttgttctattactgctgtaacaaatttctacaaactaagtgacctaaaataacacaaacttatcatcttacagtgtacacaagtcagaaatcaggcatgcattttagtgaactaaaatcaagttgtcgacaggcatgtttctttatggcggctagggtagaatccatatcctg

SEQ ID NO: 10770 - DNA, 554 bp, Homo sapiens
gctctaactattgaaacaagcttgaatttctggaataagcccaatgtgatatgtattcaacaaatattcattgagtatacctagtatgtaacatgctttaagaatacaccagtgaaccaaacagaaatatctgacattacagaacttaacattccagtatttggagacagatgataaaaaagtgaacatgtatatttacagtttgtcaaggaatgataaatgaggactcttaaagtagatggggaattgggagtgaagtctgtaatttaaatagtgtggacaggaaagcttcgcagagaatgggacatttaagaatagacttgaaggacaggcaagagcaatctctatgtttatatgggagaaaaggttccaggcagatgcagtaacaatggcaaatatcctgaagtaagatcatgctggagtttttgtgcagtagcaaggaggctagtgtgactgccacagaatcacccaagggaagatgagaagatcagaccagaccagcacttgggcatctaatgggaaaagtttctcaagccatcataaaaatttcactt

SEQ ID NO: 10771 - DNA, 324 bp, Homo sapiens
agaattttcagcttttcttctctggtttatccccatctttgtggttttatctacctttggtctttgatgttggtgatctacagatagggttttggtgtagatgtcctttttgttgatggtgatgctattcctttctgtttgttagttttccttctaacagtcaggtccctcagctccaggtctgttggagtttcctggaggtctactccagaccctgtttgcctgggtatcaccagcggaggctgcagaatagcaaatattacagaacagcaaatactgctgcctgatccttcctctggaagctttgtcccagaggggcacctg

SEQ ID NO: 10772 - DNA, 927 bp, Homo sapiens
cactgcacccactgtcctccacccactgtctggcactccctagtgagatgaacccagtacctcagatggaaatgcagaaatcacccatcttctgtgtcactcaccctgggagctgtagaccagagctgctcctattcggccatcttggctccaccgtatccttgttttaatagaagaaaactgtataatatcaatattggaatggttaaatactgttttacttattatattgatattatacattcattagaagatgacttaattagccaggtgtggtggtgcatgattgtagtctcagctactcgggaggctgaggtgggaagatggcttgaggcaaggagttcaagaccagtctggacaacatagcaagaccccatccataaaaaaattcccagactgacaaagaaacttaaaaaataaaacatagactaagatctcattaacaaattaacattgtatatatataaaacagctgtgaaataaactaccaaaaagattctcttctacatcatatgtcaccagggaaatgtgagttaaaacaacgagataccactacctaccaattagagtggtcaaaatccagaacatgctgtggaaaatgtagagcaccaagaaattttatccattgctcatggggatgtaaaatggtacagccacttaccaaactaagcatactttgaccatactctccagcgatcacactccttggtgtttaccctaataaactgaaaatttatgtccacacaaaaactggcacataaacatttatagcagctttattcatacttgccaaaacatagaacaaccaagatgtccttcagtaggtgaatggataaacttggtacatcaggacagtgaaatattattcagtgctttaaaaagaaagaaagaagccatcaagccatgaaaacatctagaggaaactta

SEQ ID NO: 10773 - DNA, 434 bp, Homo sapiens
tcacagatatggagcatctttaatgaaggggttggggaattaaaagcaaggggaaaagtattcatgtcttttctgggaattaggtagataacttctcagaaccagagtttttgtcccccttttttgtccttttatggtttcttctggtcgttgtcatggtgattgtcagctgtcttggcactggggggagggtcatttagcatggaaattagattataatgaagttagaggttcttcagaggtcaagtgagctgccatcttggttcccaccactcttagctggtttggtgtcatgatggggagcttttgaccacagacatcccgtttcctaaagataaccagagttaaggtggggaagaaatttacttaggtcacacagacgttacactgggtaacaacattactttgacaacaaaaataaatgcactttataa

SEQ ID NO: 10774 - DNA, 149 bp, Homo sapiens
gctgcacccactgtcctgcccccactgtctggcactccctagtgagatgaacccggtacctcagatggaaatgcagaaaacacctgtcttctgcatcactcactctgggagctgtagaccggagctgttcctattcggccatcttggct

SEQ ID NO: 10775 - DNA, 521 bp, Homo sapiens
aatcagcaaaacaaacccaaacaatcacatcaaaaagtgggttaaggatgtgaaaagacaattctcaaaagaagatatacaaatggccaacaagcatatggaaaaatgctcaacatcactatggaaacgcaaatcaaaaccacagtgcaataccacctcactcctgcaagaatggccataatcaaaaaattaaaaaataatagatgttggcatggatgcagtgaaaagggaacttttacactgttggtgggaatgtaagcttgtacaaccagtatggaaaacagtgtggcaattccttaaagaactaaaagtacatctaccatttgttccagcaatcccactactaggaatctaccaagaggaaaagaagtcattatgtaaaaaagatacttgcacacacgtttatagcaccacaatttgcgattgcaaaaacatggaaccaaaccaaattcccattaatcagcgagtagataaagaaaatgtggcgtgtatacacacacacacacacacacacacacaca

SEQ ID NO: 10776 - DNA, 331 bp, Homo sapiens
agaattttcagcttttctgctctggtttctccccatctttgtggttttatctacctttggtctttgataatggtgacctagagatggggttttggtgtggatgtcctttttgttgatgttgatgctgttcctttctgtttgttagttttccttcgaacagtcaggttcctcagctgcaggtctgttggagtttgccggaggtccactccagaccctgtttgcctgggtatcaccagcggaggctgcagaatagcaaatattgcacaacagcaaatattgctgcctgatccttcctctggaagcttcgtctcaaaggggtgcctggctgtat

SEQ ID NO: 10777 - DNA, 276 bp, Homo sapiens
cgccaggtgtggtggctcacgcctgtaatcccagcactttgggaggcggaggcgggtggatcacgaggtcaggagatcgagaccatcctggctaacatggtgaaaccctgtctctattaaaaatacaaaaaattagctgggcgtggtggtgggcgcctgtagtcccagctgctcaggaggctgaggcaggagaatggcatgaacctgggaggtggagcttgcagtgagctgagatcgtgcctctgcactccagcctgggtgacagagtgagactct

SEQ ID NO: 10778 - DNA, 98 bp, Homo sapiens
gctcttggaaacacccagaggacactggaaacatagccacagggacatagaaccaagccccaggcctgctcagctacaggaccgccgctgggatccgc

SEQ ID NO: 10779 - DNA, 250 bp, Homo sapiens
taaaactctggacagagggaataaatccaggcaaatacctctacgtatgaaatggacctgaaaagaagctttacctggaggaaaccttacctgactccagagacctttttggtttagaaaacaggaagtaacttgtatctgtcagtatgacacttttgaacatttctgtattagtttgctaaggtgctgtaacaaagtcccacaaactatggcttaagacaacaggaatatattctgtcacagttcagga

SEQ ID NO: 10780 - DNA, 129 bp, Homo sapiens
aaggcaaagtgctgagcgaagggggaagacccccttataaaaccatcagatctcgtgagaactcactatcatgagaacggcatgggggaaaccacccccgtgattcagttacctccacctggctcctcc

SEQ ID NO: 10781 - DNA, 155 bp, Homo sapiens
ggcgtagtggcacatgcctgtaatcccagctactcaggaggctgaggcaggagaatcacttgaacccaggaggcagaggttgcagtgagccaagattgtgccattgcactccagcctgggctacagagcaagactctgcctcaaaaaaaaaaaaa

SEQ ID NO: 10782 - DNA, 524 bp, Homo sapiens
tattttgtttaatttttggtctccacattagaatgtaagttccatgaggacaaggatttgggtctgttttgttcttggctgtatcctcattgcctagggaagtgcctagcacttagtaagtcctcagtaaatatatgaatgacttaatgaacaaatgaatctttccctgcagggcagctctacattctgtattttggtataaaaattggcttagttagaaatggctactcacacacaactcaccccttggctcaagccccacgtctgtactctgcaaaaggcctgcagccactgaatggttgggcacgaaggcaggtttccaaacttaatagagtggtgccctttttgaaggaaacaagacatcaaaagcctctgtagtacactcggagtcctcatgttgagaaactttagctaatgttgtatatttaccctaagaccatcttccatttgacaccaaaaaaagaggtaactggtaagcatttttaaagattatcactaaaataaaagtaaatttaaaaatcttt

SEQ ID NO: 10783 - DNA, 226 bp, Homo sapiens
gacagagttttgctcttgctgcccaggctggagtacaatggtgtgatctcggctcactgcaacctctgcctcccaggttcaagcaattctcctgcctcagcctcctgagtagctgggattacaggcatgtgccaccatgctcggctaattttgtatttttagtagagacggggtttctccatgttggtcaggctggtctcgaactcccaacctcaggtgatccgcc

SEQ ID NO: 10784 - DNA, 452 bp, Homo sapiens
ataaatgtcttctttcgagaagtgtctgttcatatcctttgcccactttttgatgggattatttttttcttgtaaatttgtttaagttatttgtagattctggatattagccctttgtcagatggatagattgcaaaaattttctcccattctgtaggttgtctgttcactctgatgatagtttcttttgctgtgcagaaactctttagtttaattaggtcccatttggcaattttggcttttgttgccattgcttttagtgctttagtcatgaaggctttgccatgcctatgtcctgaatggtattgcctaagtattccagggtttttatggttttagatcttatgtttaagtctttaatccatactgagttaatttttgtataaggtgtaaggaaggggtccagtttctgttttctgcatatggctagccagttttcccagcaccattta

SEQ ID NO: 10785 - DNA, 601 bp, Homo sapiens
tttgatgatggtgacgtacagatgggattttggtgtggatgtcctttctgtttgttagttttccttctaacagtcaggaccctcagctgcaggtctgttggagtttgctggaggtccactccagaccctgtttgcctggatatcaccagtggaggctgcagaacagcaaatattgcagaactgcaaatattgctgcctgatccttcctttggaagcttcgtctcagaggggcacccagccatatgaggtgtcagtcggcccctacggggaagtgcctcccagttaggctactcgggggtcagggacccacttgaggaggcagtctgtccgttctcagatctcaaactccatgctgggagaaccactactctcttcaaagctgtcagacagggacgtttaagtctgcagaagtttctgctgccttttgttcagctatgccctgcctccagagatggagtctacagaggcaggcaggcctccttgagctgcagtgggctccacccagttcgagcttcccagccactttgtttacctactcaagcctcagcaatggtggatgcccctcccctagcctcgcttctgccttgcagttcaatctcag

SEQ ID NO: 10786 - DNA, 26496 bp, Homo sapiens
actgccgggctcggcgtgagtcgctgcggggctgacggggtggcagtgcggcgggttacggcctggtcaggtgagcgggcgttgcggttctcgctgcccggagcagcgtaggagatccttggggtggccggtgggaggaggggtagcggttatgggtaccggtgaggcggggcgggccggggctggcggtggaggcgcgcgttgaggcggcgcgtcggtgtccagggcagcggcgtctcgggtcgcgcgttcccggaggggctcgcccccgcaacccgggcctgcgcgctctgctttgcaggcggaccctccaccctgctgcgattttgcagtgctcgggaaggcagagccgccctcccgcaaagaccgaggtggggcccgcccccttgcggcgtgggtgtgcggtgttcgccgggacagcgggtgtgaaagtgatacccccagcgctggaagtttttgattgctggctcgcacccccgccccatcgcagggtccctgggagagtttttgggcctgctcgagcagcagcggtgatgggtgaaatggaaaagcatctaacccccgtcagcatctcactgacttgttgcgcttttattcatttatttgagttcccaacaaagcgttgtactagttttgtttttgaatgagttgtgcatatatggtcaaacatggacactgcctgaaagaagcttaaacctaatttagttgttgaggctacgagtcagaagacctatctgcatctgcaactgtcccttcttagtgaggtatttttcactgtcctaaacaaatgtttttctaattccgtctctctccctcccaccttacttctcttccctccgcctaaagctttgactcttctcctacctttttggagattttgccccatcactcatcctttttcctgtatcttttactttgttgctttttccccagactatgctcaagaacaagtcttatattatcaaaggcaaatgtactgtaatctccatataatctcatttacgtaactcatttcattcccccccctcctttttttttggtcccaggctggagtgtagtgggcccgtcaccgcccactgtggcctcgatctcccgatcctcccacctcagcctcctgagtagctggaactataggcaccctccaccacgcctggctaatttttgtgtttttagtagagatggggatctcgaagtgttgcccaggctgatctaggaactcctgagcccaagctattccccctgccccccaacctctgcctcccaaagtgccgggattacaggcatgagccacctgcggttggccttccaccctttaaaaaaaatcttattgaaactctaaatagaggtcaggcgcggtggctcatgcctataatcccagcactttgggaggccgaggtgggcggatcacttgaggtcaggagttcgagaccagcctggccaacgtggtgaaaccccgtctctactaaaaaaaaaaaaaatacaaaaattagccgggcgtggtggcctgcacctgtaatcccagctgctcgggaggctgaggcaggagaatcacttgaacctaggaggtggaggttgcagtgagctgagtttgcgccactgcactccagcctgggcgacagagcaagactctgtctcaagaaaaaaaacaaaaactctgaatagtctttttatgactaaatataatgcactttctttccctctgtggcatttggcactgctaacctctcactttcttcaactcattttttgtcatctgtaacagtacactctaggtttttctcccaactgtctaggtgctactgcctacttttttcttccttggcatctctttctccgtttagtgttctccaggttcaccccattccccagttgtcacaatggttaaacatggccacatccttgattctagcttctacctttctgctagtgacaccggaatttatctctattcctacatagctacctatggggtatctcttcgccccattagcactcaaattcagcatatcccaaacaaataatctgactttccgtttgccctccaactttgatgcctcttttccttttaacattgtatttcttgactcaaaatggcatcagtaatcttaccggggtcccaagccagaaatctaggccactgtttgagtctttctctgttctccaacacctcagtctagtcagtcatcaagttctttttattttactaccttgatattttcacataactttcagaatataggttagacctcatggcctgccatttcaagtctgtcccatgtccacctctttaattttcttttccttcattctccctcataattcctcactctgcctgcccactcctccctgttagtcacttggcgggcccctttgaaatccagctaaagttccaacacctctggggactccttccgtgacaccaccaccctactatctgatccatgcctattttttgcagtcagttccatagcatctgtatgtacctctgacgcagggttctcaaccaggggttattttacctctcagggaacatttggcagtgtctgggattcttcgttgtcacaatccatgagaggaagggataatcctggcacctagttggtagaggacagaaatgttgccaaccctcctacaatgcacaggacagcactcttaaaataaattttttggcccaaaatgtcagtagtcccaaggttgagaaaccctgcttaacatattttgttactagtgctttatatatttttttcttctccactgcacaagggaccttgtcttgtttttgcatccctaaatcttgattcagggcctttcacatagtagaagttaaatgttggaagaaaaagaaataaaggaggtaatcgctcaactccagagatgagcagcctgtctgctaccacaggctacctgataatttcagtgatttttctccccattacctttctttaatgttgcctttcaaggatgcttcaacttgtctatttttcatttgtttattcagcaactgatttatttttaaaatattatattgatttttctttattcagcatcagttggctgtcttctgtccatgtatcttggccacttatgaagtggtaaaagataattagctagctttcagaaaaataaaccaaataggcctattcttatcagaggttggttgttcaaaactctgcagaccataatgacttcagcaaataaagcaatcgaattacaactacaagtgaaacaaaatgcagaagaattacaagactttatgcgggatttagaaaactgggaaaaagacattaaacaaaaggatatggaactaagaagacagaatggtgttcctgaagaggtaaattaagaattcgtaattaagatccaccaaaactaattttataaaaataaagcataacttttaaaaatgttttgtgaaaatactgaaattgaagtgacttgcttcactgtcaattttcttttctttttttttgtgatggagtcttgctctgtcaccaggctggagtgcagtggcgcgatctcggctcactgcaacctccgcctcctgggttcaagcagttctcctgccttagcctcctgagtaactgggactacaggcgtgcaccaccacgcccagctactttttgtatttttttttttttagtagagacggggtctcatcatgttggccaggatggtcttgatctgttgacctcaagtgatccacccacctcggcctcccgaagtgctgggattacaggcatgagccaccgtgcccggcccactgtcagtgtttttagaaattctgcttttcaaaaagtctttgtaataattaaatatattaccatattttaaggcttagtgagtagttactgaagggatgatcatgtgataatacttagaggtaaataaatgactagcatcataaaatatgtagaggtgtgtgtgtataaaaataatatgtgtagttatatactaatgatatattaacataccatattggcataaaaatgcagatagtacctaggttcaaccaaaagtttttcttaagactgcatttaaatatggctgggtttttcatactgtacataatatggaggcagttcagtttgtctttgcactactgctggttcatcgtactaaggctgaagataggtcgtttttgaagtttgaatttaggattgcaaattaaaggtataattagaatttctaggtaatacttttttcttgtgattgaacaatgttcaacactcatcaaagtatgaattaaacttttaaagtataattgttataagtgaaggtggtaaattggtctttttaaacactttaaaattaaaaaattcttagaagaaaatatagtgagaattttaaacatagctagttatacaaagagtaacagagcataatactcacaactttgtgtttttttttccctccttagaatttacctcctattcgaaatgggaattttaggaaaaagaagaaaggcaaagctaaagagtcttccaaaaaaaccagagaggaaaacacaaaaaacaggataaaatcttatgattatgaggcatgggcaaaacttgatgtggtaagttaatctagtcatttgcttcttaatatttgagtaaaattttctgggagttagctgataatcatgggttaagtgaaaaataatgtagagttatggcctgtgtttttctcttattcatgattttatgtggaataaacatttaatgacatagctctttagttaatgagataatttttttttctgcaatcctctttcagcaaatggtggctaaaacagccaggattttattcttttttctttctttttacaaaaattactgtttacttattactatttatttatccagtgtgctcttcatccagtttcctctggtggttacatctttcttagctgtagtatacagtatcaaaactaggaaattgacattggtacagtgtgtgtatggttctgtgttattttatcccatgtgtaggtttggataacccagccgcaattaagatacagatatatggcaccaccacaaagattccctttgtgccatccctttatagtcatactgctcctctctacgccaccttctctaacccctaaacagtcagaattctaagatactcccagaaaagaatgactgtgcagatgtctttgtcataaactgaaggacctgtagaaatgtgctaaaagagaatgcctttgtgtctagtcttaggactggggctgtgtgacgataaacataggcctatcttgatcctaggaagttgggcttctttacccttctagactgggatagcagatatgtgtcctcccatctcccacatgtgatacacaacatacttggagaatcaccatcagtgctctgccttacaaccctttaccagtgtttcaagcagccactgtcgtgtcagcctgtgaaagagaacctgttggccagccctattctgcactgtgatctactttaagggttgatgtggttaggggtatgtatgttgggggatgtgataaccaactgatgaatttggaatatatattcctctttagtttttaaacaagtgtttattacgtaatatttgattcataccaaagaatatgtagagatgtatgttctaaagcatagtaataaaatgaatacatgagcctaccatctaacttaaagagaatttttccaatattattgaagctactggtatgctcctttctaatcccatgttcttttctcccctctactcccagaggtaaccactgtctgatttctctgtttattattttctttgcatttttctgtttaacatttttactgaggtataatgtgcatcaagtccaaaaatcttaagtgtgcatcttcctgaatttttactcaagtgtacacctgtgaaaccactgtttggatcaagatacagaacattctgggaggctgaggcacgagaatggcttgaacccgggaggcggaggttgcagtgagccaagatcacaccactgcactgcagcctgggccacagagggagactctgtctcaaaaaaaaaaaaaaaaaaaagaacatttccagcctcgcagaggccttcctttcagtagatgacctctgaaaagtagccactgttctgacctcttacactgtagatagttttggaatttcatataaatgattataccgtatgcattatttaagtttggcttcttttgctgtcattatatgagatccatattgtgagtagcagcagttctttttcattgctgaccagaattccattgtgtggatgtctcaatttttgtgtccattctcttattgataatacttttgtattgttggcggtttggggctatgatgaataaacctgctgtgaacattcttgtatttgtcttttggtggatataagcaccctagaggggatttgctgggtcatagtttataaatacatgtagttttagaaaatactgtcaaacagttttccaaattatttgtgtggtatttttcttaataaaactaaggctaattaaaagagcgctgggacttttatttagtttgccatctgcttcaggattgtcccaatataagagaggtaaaattttgagtcttgaatttatcactgttggaactactttctgaaaatagaatttattctcaagttcacgtagcctgtcttcattttttgtgtgtgtgactttttgttatatagcctgttccttttcatcagttggtgtcttcttataatgccctttcctgaaaggcatcatctcagatgatttcttacagagatgttttctacactggcatttactcattcaacagatattgattgagctcctgctgtatgtggacaatgccatcaagattgtactgcatagcttgcagttgtcattttggtgtctgtatacaagatatggttgtttaattcccatttcattctagttcagatctgagcagctgctttagtgttctgctgctgttagttttctatacatgtcagcatagcagggttggataatcctggcagcaatgttggtaggctggtggtatttctagaatcttcatgctaaaacacatagctaaattttagtccatgtttcaatgttcatttaatgaaactatgcataatttttttatttttataagcaatttttttcctacgtaaataactttagtgtttgaatgcaaaaagaattttgtttacataataattaaagtttgtatttaaatgtgctttaatgaactctaatggtcgtcacggtggcttacgcctgtaatcccaacactttgggaggctgaggcgggcagattgcttgggcttaggatccagaccagcctgggcaacatggcaaaagcccgtctctacaaaaaataaaaaaattagctgcgcatggtggtgcatgcctatagtcccagttacttgggagagcgaggtgggaagatggctggagcccgggagatggaggttgcagtaagctgacatcacactactgcactccagcctaggcaacagagccagatgctgtctcaaaaataaaataaaaataaaatcttactaaaaatcattgttttatcatataaaaaataagaggaaaattctggtggaggtctatgaaattatttattaccatgaaagtagtgtgagtcaaaagagattgagaatcgtgggactagcacattttttatttttcctttagtagaggcagctatatgttggaatacaccgagagacagtataacatatcgattgagggctcttggaggaagtagacttggtcacttactagctgagtgaccttgaatgagttaactaacttctgcatttcagttccctcaagtgaaaaacatgggtaattataccttcctcataggttattgtgaagattaggagttaatgtgctcttttttttgttcgttttaaaatagcagttttaaaatagcagttttttgttttaaaataaggaagaaaaaaatttttttttaaactttttctgctactgggtgctaattatattagtttagggctatttgcaaacttcctttaagccataagacctaactgctaatagttcgtgatttaggggtgatttgtacaatctgttgacttagctttatgagttcaaagtcagatttttggttttgatcttggttttctaagctaaggcatctttttctctggatataatcttaacaatgagagatttgggttgctttgtaaggctgtaggtccttagattgtaacaatttacattcatttgagtgtatttttttagtatgtctttttttcttttttttcctaatcatataattatgacccctgttttccgtcttttgattttaggaccgtatccttgatgagcttgacaaagacgatagtacccatgagtctctgtctcaagaatcagagtcggaagaagatgggattcatgtagattcacaaaaggctcttgttttaaaagaaaaggtactaattagttaggttttgttttttttcatgtaagcaggagatgttgaaaatcatgtggatcgtaaagtttcttgagcatagttttagtacgtgtttaaactttatgttgtttttggctacatccctctctggaggcattgtaacatggtggttaggagtacatgctctggagccagattacctgggttcaaatctctgataagttctttaaacttctgaacttcagttttctcatctgcaaaatgataatattaccaacctcaacgggttcttatgggtagtaagtgaactattctatgtaaaatgcttggactgtacctggagttgtccagtgtttttagtagtagattgaagtaacttgaaattagtgtgtgattcttggcgtaaatattatattccactcccgggtatcaaaggctatctttggttactttttggaatgttcagtatctccctgagggatgcctcattattataaaaccagctatattactttcacaaaggtggaactcttttcagattaaactcttgatgcttttttttggttacatttctgtaggttggcattgtcaataaggagtataatgctgggtattttactcatttttctgcctgggctcttgggttgtacccatacagtgaccatgtacagttacccttgaacagtgtggggtcagtgcctcatgcagtaaaaaatctgcatataacttttgactccccaaaaacttaactactaatagcttactgttgaccggaagcagtatggataatacaaatagttgattagcacaaattttatgcgttatatgtattatatactgtattcttacaaaaaagtaagctagagaaaagaaaatgttattagaacattttaaggaagagaatgtgtatttatttatataaatatatttcactgtgtagaagtggatctaaagtcttcatctttgtcatcttcatattgagtaggctgaggagggggaaggggaggagttggtcttgctctctcgggtggcagaggcagaagaggtggaaaaggtggaaggggaggcaggcacacttggtgtagacttctattgaaaaaaatctacatttaagtggacccatgcacttcaaacctgggtcgttcaagggtcaactgtagtgaatttcagaatttgtaaaaaagatcattttatataattttctttcagggcaataaatacttcaaacaaggaaaatatgatgaagcaattgactgctacacaaaaggcatggatgccgatccatataatcccgtgttgccaacgaacagagcgtcagcatattttagactgaaaaagtaaggactttctgtgacgtgtgtgaatgtgaatgtcttatgtatatatggagacttattaaaaaaaagtgtggaataaagtgtggaggacagattgaaaatgtattgcattttcttttcaactgtaaattcttatagctcactcctttttattgaattattttgtttaagccattttaaacatctggtgctaaaaccttgttcccatagctcactttactgaggtattcctctaaagatttagtaatagtgttcttttctaattcacaaagctaaaaaagttagttggatatttttagaaattaatatcctgtcattttgaaaaaccatttatccactatttaatctagagaacatttattatggaaaacttaaaatatgtttcaacatttgtttgtctttaagtcatactgacttttaaagtaaataatgtggaagaatataaatgtggtattgtcttatcacatgcaggtaaccaacctatcataggggttttttaaaaagataaacaccatcaaggaagacattcttactgttttaattatttggaaatacaaattttattggtatctgaatttttactatttaacatttttatgtctttgaaactcatgatattaatctctaaaaattaggggaatatttacattttataatattcgatatctgcaatatatgtagcatatacataaattacagagaatagtttaaaataagcctataaagcacccctctcaacttaagaaccagaacattaccattatttttgaagttaccttgatgctcctttctgtatcctgtcccttgcctccctcccagttaaccactatcttgaattatatatttgtcatccttttgatttaaaaaaggtttattatatatgtatatgttcctaaataatatatagtataatcttgcttatttttgagcttaaaagtatatcatactgtgtgtagttttctgtggctcacctatttattatatttttatgattcattcttgttttgatgcttatagctctagagctctcattgtaactgttatataggataatttctttttagaaatataccattatgtgtctattcttgtgttgctggattgttggttcgttcctttcttcctttctttttctctctccctcccactctttcttccctccttctgtccctctttctttctattgcccaccttctgtcctttctttccttatttcagcaatgctatgaacatttttgtacatgtttcttggtgttgggtcataaaatgtgtagatgttcagcttcacaggatgatggcaaaggtagtttgttgttacacagttgttacaaaggtaaatggatgagtttacattctcattagcagtgtataataatacctatttcctacccttaccaacattgatataattgggcttcttaattgttttcaatctggtgggtgtaaaatggcatttcattgtgtctttgaaatgacattttgcatttctcagctattagtaaggttttcatttctcaactattagtaaggttaagcatcttatatattttccatttttgtttttttcttttttttccctgtgaaatgcctatttggtgtttggccatttttttttttagggcttttcctattgatttattttgagagttctttattctggataactaatcttttggtcttttccataataactatcttctctcaatttgtagcttatcttctttatggaattttaatgaatagaaacattcaattttaatatatttcaacttcttgattttttaaaaagattaggactttataaaatgatttgttcaaaaaaatagtttgctgcttgagttcctaatagtctcctctaatttcttctaaacatttttaagatttacttttcacatttaggtgttttcacatatgctgaaggtttttccagctctatttttggaatagccctactttcccccgtggatctgccgtgctactattgtcatatgtcatgtttgccgagatcactttctcatctctgttctttacactggtctgttgcctgtccttacatccattccacactatctttaattattatagcattgtaattgtaagtcttaatatttagtgtactgcatattctcctaccttttattattcaggaatgtcttgggtattcttggacttttactcatcaatataacttttagaatcatcttcccaaattcgttaaaatatcctgttgggattttgattagaattgcattagatttataaatcagtctggagagaatcatattgtatgtttttgtactttattatagatgaatgtgaaatatctccacttagattgtcattaatgtctttgaaaacagtcttacaattttttgcatctgtgtttggtaggtctttgttagatgttttgtttgtttgtctcttgttggtctctcgtagtcaccttactaaacttgtaatacttccagcaatgtctctagattgttttgagttttctttttggaccatcttatcatttgagaataatttcaggcctttttctttgtttctagtccttgtgtttctttcttgtggaactgcattggtaaagacctgtatgtaataccaagaaaaagcagtgataatgggcattcttgtttctctcattaaagggaatgctactaatgtttcaccattaggaattataggcataccttgttttgttgtgtgtcgctttattgcgtccacagatactgtttttacaaaacgaaagtttgtggcaaccttatatcaggcaagtcaagcaactctattggtgccatttgtccaacagcatgtgtttactttgtgtctctatgtcacgttttggtaattgttgcagtatttcagatttattataattgtatctgttatggtgatctctgatcagggatctttgatgtttctattgtaattgttttggggagccatcaagcacacccatatgttgttgtgcattctgtctgcttcattgaccagctacccccgaccccccatctctctccttctccttgggcttccctattccctgagacacaacagtattgaaattaggccagttaataaccgtacagtgaggccaggcatggtggctcacacctgtaatcccagcaatttgggaggctgaggcgggcggatcacttgaggtcaggagttggagaccagcctggccaacatggtgaaaccctgtctctactaaaaatacaaacaattagccaggtgtggtggcgcatgcctataatcccagctacttgggagggtgaggcaggaaaatcacttgagcccaggaggcagaggttgcagtgagttgagatcatgccgctgcactccagccggggcgagagagtgacgctctgtctcaaagcaaacaaacaaacaaacaaaaccctacagtggcatataagtattcaagtgaaaggaagacttgcagatctcttactttaaattggaagctggaaatgattaaacttagtgaggacggcatgtcgaaagccaagactgactgaaagctaggcctcttgtgccagttagccaagatgtgaatgcaaaggaaaagttcttgaggaaattaaaagggctactccaatgaacacaaataattaaaagcaaaagaagcttattgttgatggggagaaggttttattggtctgtatagaagatcaaaccagccacaacattcccctgagccaaagtctaatccagtgcaaggctctaatgctcttcaatttagtgaaggttgagagaggtgagaaagctgcagaagaaaagttgaaagctagcagaagttggttcatgaggtttaaggaaagaagctgtctccataacataaaagtggaaggtgaagcagcaggtgctgacggagaacctgcagaaagttatccagaagatctagctaaggtaattgatgaaggttactgtgttaaacaacacacacattttcagtgttgactaaacagccttctgttagaagacagtgccatctagggcgttcacagctagagagaatgcctggcttcaaaggacagtctgattctctctcttgttaggggctaatgcagctggtgactttaagttgaagatagtgttcatttaccattccaaaagtcctagggcccttaggaattatgctaaatctactctgcctgtgctctataagtaaaacaacaaagtctggatgacatctatttatgaactggtttactgaacattttaagccaactgttgagacctactgcttagaaaaaaagatttgtgggaggccgaggcgggcagatcacaaggtcaggagatcgagaccatcctggcaaacacggtgaaaccctgtctctactaaaaatacaaaaaattagccaggcgtggtggcgggcacctgtagtcccagctacttgggaggctgaggcaggagaatggcgtgaacccgggaggcagaggttgcagtgagccagatcgtgccactgcactccagcctgggcgacagagcaagactctgtctcaaaaaaaaagaaaaaaaaaaggatttatttcaaagtagtgtactgacagcgcacctactcacccaagatctctgatggagatgtacaaggacatgaatgttgttttcatgcctcctaacacaatatccattctgcagcccatggatcaaagagtcattttcaatttcaattcttgttatttaagaaatacatttcacaggctatagctgtcatagatcgtgattcctctagtggatctggacaaagtagattgaaacctggaaaggattaactattttagatgccattaagaatgtccataattcatgggaggaggtcaaaatatcagtgttaacaggagtttggaagaagttgatttcaactcttatggatgactttgaggggttcaagattttagcggaggaagatgtcaccgaattgctgcaatcttgtattcaaacttgaatggatggtcagttgattcttatggatgagcaaagaaagtggtttcttgagatagaatttattcttggtgaaggtgccgtgaacgtttttgaaatgacaactgaagatttagaacattatataaacttagttgataaagtggcagagtttgagaggattgactccaatattgaaagaagttctgttatgtaaatactatcaaatagcatcacatgctaccaccaccaccgtgatcggtcagcagccatcaacatcaaggcaagatcgtccaacagcacaaagataaatattcactaaagactcagattttattagcattttttagcaataaagttttttaattaaggtatatacattgttatttagacataaagcttttgcacacttattagattacagtataaataaaacttttgtatgcactggaaaaccaaaaaatttgtgtgactagctttattgtgacatttactttcttgtggtggtctagaatcaaacccacaatatctttgagcaatggcagtattgcttttattatgcttaattaactgaaagcaggtgggaaaaatgccttcagtgggtaagtaaattctcttttcaaggatttcagaaacaaattttgaagttttggtttagtaaattagttttattaactttatttattttaatgtttttaaattgcagatttgctgttgctgagtctgattgtaatttagcagttgccttgaatagaagttatacaaaggcttattccagacgaggtgctgctcgatttgctttgcaaaaattagaagaggccaaaaaaggtattttctagtcactctctaaagaattctttaacagtgttatctcacagatgctatatggagaatactgagtaatcacagttactaccttcagagagctttctgtatttgaacaaaggtcatttttgcaactgaaatgatatcttgatgtttttaagaaagaatgcattatttgccaccaatcagaatttggttcaaattctcatgttactaagtactaactatgtgaccaatatctcctctgattttcagtttctcatctgtaaaataggcattaatatgtcttgttggctttagtgaggcaagaggtagtgtgtttaaagctcataacacatttttgttcacttataaattctaagccttctattatttcataaaataggtttgtgtattacaaatcacaaaatctgaataaagctgatatttaattggattttgctgctgcttaggtttttttttttcttttttttttttttgagacagagtcttgctttttcacccaggctggagtgcaatggtgtgatctctgctcacagcaacctccgcctcccgggttcaaatgattttctctgcctcagcctcccaagtatccgggattacaggtgcccaccaccatgcctggctaatttttgtaattttagtagagacagggttttgccatgttggccaggctggtcttgactcctgacttcaggtgatctgcccacctcggcctcccaaagtgctgggattacaggagtgagccactgcgcccggcctgcttcttggttttatgatatacaacttatgatagcaggtatccttcctggggctggtggaagatggtttgtcataggattttgtctgccctggggggagaagaagaaagttcagtggcttggctctgcacagtggcttacgcctgtagtcctagcactctgggaggccaaggtgggaagactacttgaggccaggagtttgagactaacctgcccaatgaggagaaaacctgtctctactaaaaatacaaaaattagctgaacttgttggcgtgtgcttgtagtcccagctactcaggaggctgaggtacagaatcactggaacctgggaactggaggttgcagtgagccaagattgcgccactgcactcagcctgggcaacagagtgagaatctgtctcaaaaaaagaaagttcagtggcctaatgatagtatttctttgtttctcctttattttgctgtaggacagttgcctgattgtcacaggcaacaaaagattgttttgtacatgttttaaaatattacctatctttaaaaattttttttatcttctcttttacttagattatgaaagagtattagaactagaaccaaataactttgaagcaacaaatgaactcaggaaaatcagtcaggtaaactatagttatttaaattaagtgtattatgacctttatttgaagaagtaaagctttttgcatagattttgtactatagatttcttaatattgagattttctaattttaattctttgtactatagagttttactaaatgaatttgcatgctagagggagtgtaatggtatttaaagacccttgattgttctagaagttgcctgagatctttaagaactactgctgctttactctttctcagatgacagaattattatttttttatcccactgattttcttcctttttggcttatgcactgactgaaacattgagagaaaagtgacagtgattggggaaagtgtgcttttaaatattaccactactattgcacataagatctggtaaatatgttaacttgattatagttgtgaactgtattacatatgtttaaaattttgccttaggtcaaataatgactgtgaatattgaatttgagaagtttggtgatgtagttgtaatgaactgttatgtctgaaaacagctcctaaaacagtgtctggcccgtatagaaattcaataaatatttgttgaataaatgagcaactacttttaatggatgctacttatttatttatttaaaataattcaacttgtattttagattcaaagggtacatgtgcaggctttttacatgggcatattgtatgatactgaggtttggggtatgaatgattccgccacctagatagtgagcatagtacccaataggtagtttttcatcccctcccctccccaccccaatgtttctctccccaacaggtagtctatagtgtctgttgtttctgtttatgtccatgtgtacccaatgtttacctcccacttataagtcaaaacatgcagtatgtggcgtttgatactaattttaattgaaatgagaagcacattaaatttattatatgcttattttactttttactttaataagtagaaagattttgaattagagcagaaaatgttattttgattatttaaaatgtggcagaaattctaatatatttgaggtatttatgttttaaggtcaaatatatatgcatcttgcattactttgttttattttagctgactgctatgtctcctaggctttagcatccaaagaaaactcatatccaaaggaagctgacatagtgattaagtcaacagaaggagagcgaaagcaaattgaagcacaacagaataagcagcaggccatttcagagaaagatcgggtaatccaaagctattccaacgtacaatgtatatgttttgctgagtgttgatttatttcttgtatatcagttaatttctttcttctctaatattaaagttttgcttgagtaggaattgggaattaaatgcactaaagcctctgggacctactaattcaaaatttgggtaattgatgactttatatataaattaaaaaaataactatagaaacacttaagtttaggaaactacttttgaatgttttatatatttacatatacatagttataaatttaacatagaagttaattacaatccattcttataatgtacttttttcattaattcacactggactgtttctgattgaaattcctctactaatcatgagttgaggtttagtttatttattgcctttcctggacccacagaggattcctaataaatatttatgaaatgattattgattgtgatatttgactgattataagtaaatgttatagtgaaatcaggtatacaaattccaatacagctgaatttatcttatatttgggcatattaaagttattgaagagtgggctttataattctggtactgtattctttcacaaaatttatttgagttatgaagtccttttgtacagcttctaatgtaacttaagacagtatattatttggacctttgttaaaataggtttttaaatttaagctttgcgtaatatgtaattaatggaataatagtgaatgctgcaaagtaatgtagtatacatgtttttcctttttagtactgaaaagagaataatgccattaaaaaagaaacaacccaaaccaacagattttaaaacgtgtctcatgggccagatttttaacaatattctttcttgaaatactgttggtgaatatccttgcagtgtttcataagatttgaattcatttattttttttgaaattttttttttattctccatatctctctacaaaataacaggggaatggatttttcaaagaggggaaatatgaaagagcaattgaatgctatactcgagggatagcagcagatggtgctaatgcccttcttccagctaacagagctatggcctatctgaagattcagaagtaagtattggttacattttagtgctgttcaggataaaaatttacaataaattggtaaatttttaccataagttacctaacatgccaattatggcgtgttaggttagctcacatgccaatttatggtaaatttaagtaagttaaaatttaatttatgtatttttgagcatttaaattaaagtgaaatgagaggggaaaagtagtgtgtgtgtgtgtgtgtgtgtgtgtgtgtgtatgtgtatgtgtgtgtttatgtacctgtggtatacatagttccaggcacaaggtgtgtattcagtagatgttcttgttaatattttcccgcttttaagtctggcattacacagtttaccagtttttctctagtcgctttatgtatagtattctggatcttgattaaaaattatttttcacttcagagccccttgggcaaagtcttatctggaaatgttttatatacatacatgtataacaaaagagaactgctgtcattgaaactgctgattaataacatatgtaacaaacatttgatcctatattaaccagctttttctggttgtgcccaagttggacaatcagtagaattatatccgatggcagaaacttagacttagactttgtttctcttgttatactttacagactaatgccagaattttaaaaagcctgtaaatagtataaataggaattcgaaacttcttcagtgccatgaattcccctttagctgtatgttgaacgcttctcaggatatttttaaatgcttaactgtacaactaggattacaaaggaaaccaattatatcaaaatatagttttgaaaatattaaaaattgtgatatagtagtatatttgattttttattaacacacctcaaaatgagaaattacatttaaaatacaggcaagtgctgtattttatgctcaccaatattcagaattacagtacaaatttaacctgctgcttatttgcatgtgattgtactgtatttgaaactacatttaaaatacagacaagttaatgttaaaaaaattttaaagacatgattgtaaggtttcagtaaggacaccaaattttgggatgatcctcgacacatcttccacgtactgatcaacaagcaagtgtggatagggaatacctgaagcaacgtagatgattagatttccaatgtgataacacatgccttagctctttgtcttctgaataactactagggcagagttgcccaacagttgccagccttgtcacaagagtatctataaaccagacactgcaatcacatgcaaataagcaacaggttaaatttttactgtaattctgaatagtggtgagcataagcaatattttgagataccagtaaccgttataatgtgatatggaaatatctgattttttttttttttttgagacagagtccccctctgtcacccaggctggagtgcagtggtgtaattttggctcactgcaacctccacctcccaggttcaagcaattctcctgcctcaacctcccaagttgctgggtctacaggcatgcgccatgacacctagctaatttttgtatttttagtagagatggggttttgccatgttggccaggctggtctcaaactcctgacctcaggtgatctgcccgtctcggcctcccagagtgctgggattacaggcaggagccaccgcgcccggccaaaatatctgatttttattggtgacaaagtgatagatactattgtctgcatttgtatttgaaagatagctaaattttatttgaagtttagtgaaaacagtgatacagtttttttcctaaacaagtttccacatccctcagacaatctcaggttaggagctcctgtcatagaaataaattctgattatatatttaacctcatttaaagtaatagatatcactggagatagattcttttgttgactagtcagagtgaagatcattgcatctcttgctcacttatgaaaattttgatttttgctatcgaagaattgtgcattggtttaaaaattgtaaagcctgagttcgttggtttgactaatgctaagagtaatgccttcttacaggtgagagattatatatgcatttataagatatctaatttattgtatcagttttatttctttagtttataatcgtattagtggaatatattataccaagttagcagagtatattttaaattaaaagaacttatgactcttacttgtatcttttcctagtgtatcttttagattcacagttaatatcagaatttttttctgtacatggagactgttgttatgtattacggactatgtgaggaacataaaaaagcaacatttcaagcttagactactcctagtttaggtaaccatcctatagcttgaggttctataaactgtgtcaaattagagctaattagaaccagcagtatagtcagtcttacctaccagtgtgcggggtagcagtagggagtaagaagaaattcacctagttaggccaaccgggattcctagagaatgtgctttctggaggtgatagtctaaattagtagtttgcattgggagatgagcaagacatccttgagttacaataatggagtgcctgtgagctggcaaattgtggaatgtaggctggtagatggttagcttcagaaaggctgaagaaataagaagataatcagaaataaggacagaagtttgggccaacattgtagtccttgaagaggactgaccaagaacaaatctgagtcctattcttagagggagtaaagcatagatttagagataggataagaagaaaataacccagtagtattagatattagatttgggaaacagggttgagagttggtcacaaaaataaggtagaatcttggttgctggaactggaaccagactaagacttgatttagtagagggtggttcacttaatggtgattaggggcggcatttacactagagccagagtagacctagggcaagtggacctgactgaaaatcagaaggaatcagggctaaggagctaggcagagatgatagtttttcgcactcaccatttttattctatttttgattagtttgtctttttctccaaccacctaaaagatgtttgttgattggatttttctaaattcactttacaaatggagtgcacaggagacgtgtaataattttaaaggacttaggtgagtctattttcaaagaataatcgtctacctctgtggcaacttcagacttttagaaaaattgttgggttttcttcagctgtacagtagaacatgcaattaaatatgcaattaaatatacaattaaaatgatttcctaaacatttatattctaaattttctttgaatttgggtgttggaaattttttgatttacttattcagcaaatatttattgtgctaaaatgtatcaggtgttctgtgaggcactgtggaaggtattaagtatacaaatattaaatgtatagttgtttttaagaaacccgaaatttgcagggagtgacagaaaaggagaccaatatttgtgaaaatacgctaagatagcgctatgaaggacacgtgctataggagttcagagtgggaagaatactggcatagactgagtccaggcaggggaattcctggaaagcatcttgaaattgtttaggagtagtatgagttagtgaggtgaaaaaacaggaaacaggtcaagtgttctagtgcaggttcaaagacgtgggagtaggcaggttgatggtacctcaacctggaaagggtgagtggttcgtattatggctgttattgcaggggacagtggcagagagaaggccagatactcaggcaggcccctgactttgcgctccaaaggaattggactttatcttgaaaagtatgggggccatgcaggtatcttgaatgatataatcaggcaagtagaaaataacattgataagggcatgaacacagatatattctttatctcttgctggaaagtgagttaaataaatcagagatgtttaagttcattcgaaattctgatttttttcatatgagattttgttttgagggcaagatgacatccatttaggccttggggagaatgcaattacaggagtgttttttttttttttaatattcttatgaaacttttcaaacttatacaaaagtagtataataaactccatgtgtccatcatctagttctaacaagccatactttttttggtcatatttgtttcagcattttccccccgaattattgtaaagcaaatcataaacattatgacgtttattgctaaagaaaggatattttatacataaccacaaccattagcactcctaagaaattaacaataattcattaatgtcctattaatatatgggaatgtctgaagtttttttgttattgggtttttttggtggagggggttgagctcttcttaagcaccttgttgttgtagagcagtaatgagtaagtctgtaagtctgaattgattgctggttgcatggctgagtagaatttatgcaaagtattagatgatatgctatcacattcgtaccaagttctcatttttttgtttttctatgagtatgggaggtttactgtgggtaaatgttaataaagttttattagaaaactaatgccagtcaaaattctaatgtaatacctgtgcatattgagacttggagaagaggtaggcagagaagcagtggcattcttttgtctgccctagtcatatttttgcattattatttcatcgctccagcagactctcctaacattccctcaatctggtaccttctccctcctcaccaaatgattccaggatttggtgagaataaaaaatttataaaatagttctccacttcaaacacagatttagaagttagtgattgaaattatatacaagctttttaaattagaaacttagtttatatgacatttttccataagctgccttttttccagtcagtaattttatcatgttcaatagatatgaagaagctgaaaaagactgcacacaagccattttattagatggctcatattctaaagcttttgccagaagaggaactgcaagaacatttttgggaaagctaaatgaggcaaaacaaggtaagactttataacagctggcactcagtcatcctgatgagtgcccaagttaaagaagcagagattcatgtagcttacccatggttcaaagatactgaacttagggaattatgttttctttccacagtttagatcacgaatagatttggaggaatgcagcttccgcaatgtaccagattatctttttgtttagtagcattctggctaattttgtttagtacattctggctaattgccagtcaatattaatgaaaaattttaattatacatgagaatggaaaacgataaaaagaccagaatggaaaggaagggaatcggtgttgttgagcgaaagggactcactgtgtgatatgcttgaagccaatactgtgacatcaggtttttgagaaaaggctttatttatattgaaagttgactcctaaagagacaggaatcaaacccaaatctgtctccttgtcctggccttaaggcagtaattttattagaaagggtttagggaggtggatactggaattagcaggtaattagtggaaggaaagggaaaagttcttgggcatatgtagctatctcttcttgctaactaatgggattgcaggtgcaaatttggggtagttagtagaacttggtggaaattcagtttgtgacatcagcaaactcgtttttgtgcaaactccacttggccatcttggttccaaatgatttcagcctgtttttttttttttgtttcgtttttttgtttttttttgaatcccagtaagcagaggaagtttctttgtttcagcaagttgtatcttttcctatctgccatcctacaaactgaagaatttctgttagtgattgattttttttttttaaaaaactcttcgggctgtggttttatcagcaggtagggaatggaggataatggagatctgataccattttaattcttgatactattttttttctttgtttttatggtcttctcttttagggtattcattgaattagtcttttcagagaaccaacttggttctcctgtgtgtgttttctatttaatttccttctgctttttattttattccttcaactttcttttggtttaatttgctgtttttctagcttcttgagatcagtacttagataattgattttcagcctctgttctttcctggtatgtgcatttaaaatctggcagtttctctataagcctgttagctacagcagtgttttttttattgtggttaaaaaaaatatgtaacgttaaatttattattttaaccatttttcaatatatagctcagtggcattaaatacatttacattgtgcagccatcaccactgtccatcaccagaactttgtcatcatcccattctaaaactctatacacattaaacaataactctccattctcctctcctcccagccctagtaacctccattctactttctgtctctgaatttgactgttctagatatcctatgtaagtggaatcatgcagtatttgtccttttgcctctgcttatttaacttagcataatgtccatgttggagcatatatcagaatttcattcctttttaaggctgagtaatactttgttgtatgtaattctcttattctattaatattttacatttagtgagttactctgtcatttgtttacatggtgaactttgctaagttagatgacctctaggggcctcagttttatcacctttaaagtggggttgtagtgagggttacgtgaacattcatataaaacaactacaacagtgttcagtaaatgttcttactatagctcacctgtttcctagtaatctgagtaaaactgcttgagctaaaaatgtgattactaactgaatatatcatgaatatacatgcgaatatgaaaactccacattttaactatgttgtaatgtttttaaaaaattcgctttagattttgaaactgttttacttctggaacctggaaataagcaagcagtaactgaactctccaaaattaaaaaggtaatgtattcttttcacccaaacatggtcatattttctgaaacataaatatatttatttgttgtataataaatattttgaaagttagggttataaatttattttcaaggaattaattgagaaaggacactgggatgatgtctttcttgattccacacaaagacaaaatgtggtaaaa

SEQ ID NO: 10787 - DNA, 390 bp, Homo sapiens
agttgggagagagcaacaacagcagatgcaaagaccctgaagtgggaaagatcttgaacgtatgaagtgggatgacaatggtttgatgtgagattggagaggtactaagagccaagctgtgtaggaccttagggaccaggataaggagttgatcgttgttctaagagcagtggaatgccactgagtagctgtaagtgtgatatttacgtggtctaatggattgattgattgattgattgattgtagagatgggatctggctgtgttgcccaggctgatctcaagctcctggcttcaatcaatcctcccactttggcctcatctcccaaagagctgagattataggcataagctaccacactcagcatgatttatgtattttgaagctcat

SEQ ID NO: 10788 - DNA, 308 bp, Homo sapiens
tcctgcctcagcctcctgagcaactgggattacaggcatgcaccaccacacccgactaatttttgtatttttagtagagacagggtttcaccatgttggccaggctggtctcgaacttctgacgtcatgatccgctctcttgacctcccaaagttttgggactacaggcgtgagcgaccactcccagacttagtgagtcttacgatttacacccagagtcataaactattatgtcagcattactgtatcagcctgtaagcgagtcattaagttcaggccacactcacaggaagggaatgaagctgcac

SEQ ID NO: 10789 - DNA, 578 bp, Homo sapiens
tttttttttttttttttttaaagcaaagtctcactctgtcacccaggctggagtgcagaggcacaatctcggctcactgcaatctccacccaccgggttcaagtgattctcatgcctcagcctcccgagttgctgggattacaggcgcgtaccacagtgcccagctaatttttgtatttttagtggagacagggtttcaccatgtcggtcaggctagtcttggactcctgacctcaagggatctgcctgcctcagcctccgaaagtgctgggattacaggtatgagccaccactcccagactcccatttgcttttaaactattagtaactctccatgacactgagtttgctgctgagtttcctgacatagcatcatcagagataatatttggttttaaacactgaacaaaattagaaagctgctcaagaggtcaacactagggtgtcaacacattgccttggagaaagaaaacaatgaactctggaagctttttaaaaagaagagttgtaaaacaatgccagtcccttgggatgattacgagcttgggaagaaaaatgtggttagagctaaatgttga

SEQ ID NO: 10790 - DNA, 148 bp, Homo sapiens
cccagctactcaggaggctgaggcaggaaaattgcttgaactcgggaggtggaggttgcagtgagccgagatcacgccactgtactccagtctgggcgacagagcaagactccatctcaaaaaaaaaaaaaaaaaaaaaaaatatata

SEQ ID NO: 10791 - DNA, 415 bp, Homo sapiens
tttgccttttttttagtggaattatttgtttctagcttgcttaattgttttaattccatgtaggttctagatgttagacttttgtgggatgcatagtttgtgagtactttctcccattctgtaggctgtctgttacctctattgatagtttcctttgctgtgcagaagctttttagtttaattaggccccacttgtaaatttttgtttttgttgcaattgcttttgaggacttggtcataaattctttcccaaggccaatgtccataatagtgtttcctagattttcccctaggattcttaaagattggagtcttacatttaaatctttaatccatcttgaattaatttctgtatatggtgaaagataggggttcagtttcattcttcagcatatggctcaccagctatcccagc

SEQ ID NO: 10792 - DNA, 279 bp, Homo sapiens
cacgcctgtaatcccagaactttgggaggccgaggcaggcggatcccgaggtcaggagatggagaccatcctggctaacacggtgaaacctcgtctctactaaaaatacaaaaaaattaaccgggcgtggtggcgggcgcctgtagtcccagctactcgggaggctgaggagggagaatggcgtgaacctgggaaggtggagcatgcagtgagctgagatcgcgccactgcactccagcctgggtgacagagcgagattctgtgtttaaaaaaaaaaaa

SEQ ID NO: 10793 - DNA, 738 bp, Homo sapiens
aaatttgggacatgtttggagccactggaacttggttagtgatggattagatcagagaaaggtgagagacagagaaaacttaaaggtgactcaggttttgggcctgagcaagtaggttgatgacagtgccatttgctgacatgaggaaaactagaggacagtcaggattggagtggagcaaaatcaagagttctgattaggacatataaagtttcagatgttcagtagacttctgagtagcaatgtcaagtagctagttgattacatgatcctgtggctcagaggagagatacagatagaaatttggaaatcatcaagcagaggagaacagaaagaaggccagtgcagttgaagggttttgtgaccctttatcttgggtcacaaaagagtgacccaagataaagttgaaaaggtgggagggtcaggcatggtggtgcatgcctgtggtcccagctactaggaaggctgaggaaggaggatcacttgagcccaagagttctggactgtagagcactaagctaatcagatgtccacattaagttcagcatcactatggtgacctctcgggagcgggggaccaccaggttgccaaaggaggggtgaaccggcccaggttggaaacagcagatcaaaactcctgtgctgatcagtagtgggattccacctgtgaatagcctgtgttgcccactccagcttgggcaacatagtgacaccacatctctgttaaaaaaaaaaaaa

SEQ ID NO: 10794 - DNA, 105 bp, Homo sapiens
tcacgcctgtaatcccagcactttgggaggccgaggcgggcggatcacgaggtcaggagatcgagaccatcctggctaacacggtgaaactctgtctctcctaaa

SEQ ID NO: 10795 - DNA, 123 bp, Homo sapiens
cagagtcttgccctgtcacccaggctggagtgcaatggtgtgatctcagctcactgcaacctctgcctcccgggttcaagcaattctcctgcctcagcctcccgagtagctgggattacaggc

SEQ ID NO: 10796 - DNA, 343 bp, Homo sapiens
gctttgattcctcatcagtggttcttaaacctcatgttctctttaggtaactctgggagcttaaataagcatcaaaagttgttctgatgacacgtccagctattcaaataaatgttcaaattgtagattttattgtttccatttgtgcaatgtattttttccttccaacttctattttaggtgcagaagtacatttgcaggtttgttatataggtaaattgcatgtcatggggtttggtgtacagattattttgtcacccaggtaataagcatagtacctgataggtattttctcagtcctcactctcctcccaccctccaccctcaagtaggccctggtgcc

SEQ ID NO: 10797 - DNA, 138 bp, Homo sapiens
caaaaaattagctgggcatggtggtgggtgcctgtagtcccagctactcgggaggctgaggcaggagaatggtgtgaacccgggaggcagagcttgcagtgagcggagattgcaccactgcactccagcctgggtgac

SEQ ID NO: 10798 - DNA, 701 bp, Homo sapiens
ggatactctgcttttgaggggaaatggaatatgggattcacaggagggtgaggatgactgtatctcttatacaccataatgacaactcatccttctgaaattttcccaattctgtatattaatgcatttagtctctcgaatgttagaacgattctctactaatcccacttgtgaaaacagaattgttagtatatttatggttgaaatgtataggttaccgtgataaactttgtatcttttttttaatgttcttggctgaatcaatctcttcgttttatgaagtctgcttatatatctagcaagatttttagttttcatcaataatatatctatatcccacatattgagtctcatgataacattaattctaggtagctatttagtattatctaatctatttttgacttatcctacaaatagagattaaaggaggaaaaatttcccataaagtaaccagaccataccttcatgaatgaatactctttagtctgtttatgaaaatcatgatttataattcgtttaatttatttatcaaacaattaggtttcaatatacataagccctgtagcttgttagaatctcctacagagtgagtaaaatgcagtttctgtgtttgagaagtgtaagatctgtccttatctataaactcagcataaaactgataatgacaacaacaatatattgatgatgatgatgataat

SEQ ID NO: 10799 - DNA, 512 bp, Homo sapiens
cctgtgtccatgtgttctcgttgttcaactcctacttatgagtgagaacatgcagtgtttggttttctgttcctgtgttactttgctgagaatgacggtttccagcttcatccatttccctgaaaaggacatgaactcatcctttttgtggctgcacagtattccatggtgtatatgtaccacattttctttatccagtctatcattggtggacatatgggttggttccaagtctttgctattgtgaacagtgctgcaataaacatacatgttcatatgtctttatagtagaatgatttataatcctttgggtatataccagtaatgggattgctggatcaaatggtatttctggttctagatccttgaggaatcgccacactgtcttccacaatggttgaactaatttacactcccaccaacagtgtaaaagcattcctatttctccacatcctctctagcatctgttgtttcctgactttttagtgatcgccattctaactggcatgaga

SEQ ID NO: 10800 - DNA, 238 bp, Homo sapiens
tccccatctttgtggttttatctacctttggcctttgatgatggtgacgtacagatggggttttggtgtggatgtcctttctgtttgttagttttccttctaacagtgaggaccctcagctgcaggtctgttggattttgttggaggtccactccagaccctgtttgcctgggtatcaccagcggaggctgcagaacagcaaatattgcagaacggcaaatgttgctgcctgatcctt

SEQ ID NO: 10801 - DNA, 421 bp, Homo sapiens
cttctccctattgaacttgttctcacctgtgatccatgtttgggatatattctctaatccaggtcacagcaacttggctgagtcccttactgaaagtcacagggcctgtcaaacagccctcatcaggtctcagaaactcccaatttcccttgctacttcaggcttaagagggtggaaacagcttagagttggtgctggtgctggaaatggaaataccaaatattgtttcctaaacattcatgcaattctattaataatcgctttattaaatttcccatttgatcatgtcaattaattctttccaggatcctgactgatacagtgcctatatttatgaattctttcagaatttaaatatctcatctttgattttcagaaaccacccacagtctaaagattatgtctatgactttgcttatgc

SEQ ID NO: 10802 - DNA, 215 bp, Homo sapiens
gttagatttaagtctttgatccatcttgagttgatttttgtataaggtgagagatgaggatgcagtttcattcttctacatatggcttgccaattatcccagcaccatttgttgaatatggtgtcctttcccaactttatgtttttgtttcctttgttaaagatcagttggcttaagtatttggctttatttctcagttctctattcgattccat

SEQ ID NO: 10803 - DNA, 390 bp, Homo sapiens; identical to SEQ ID NO: 10787

SEQ ID NO: 10804 - DNA, 390 bp, Homo sapiens; identical to SEQ ID NO: 10787

SEQ ID NO: 10805 - DNA, 281 bp, Homo sapiens
gcctgtaatcccagcactttgggaggccaaggcgggcagatcatgaggtcaggagatcgagaccatcctggctaacacagtgaaaccctgtctctactaaaaatacaaaaaaattagccgggcatggtggcaggcgcctgtagtcccagctactcgggaggctgatgcaggaaaatggcgtgaacccgggaggcagagcttgcagtgagccaagactgcaccactgcactccagcctgggcgacacagcgagactccgtctcaaaaaaaaaaaaaaaaaaa

SEQ ID NO: 10806 - DNA, 7286 bp, Homo sapiens
ctgcaatgcccagggcaagtgggtacccccagaaggtcaagacatgccccgttgtatagctcatttctgtgaaaaacctccatcggtttcctatagcatcttggaatctgtgagcaaagcaaaatttgcagctggctcagttgtgagctttaaatgcatggaaggctttgtactgaacacctcagcaaagattgaatgtatgagaggtgggcagtggaacccttcccccatgtccatccagtgcatccctgtgcggtgtggagagccaccaagcatcatgaatggctatgcaagtggatcaaactacagttttggagccatggtggcttacagctgcaacaaggggttctacatcaaaggggaaaagaagagcacctgcgaagccacagggcagtggagtagtcctataccgacgtgccacccggtatcttgtggtgaaccacctaaggttgagaatggctttctggaggtaagagaccaattagcaaatggtctgtggcttttgtcacagggcccataataaataaataaacaaaacaaataattgagtccaaacactgccaagttcactaaggcatggaaactggaatttactattatcactaacaaagaatcatgataatctttttaacattttcataattaattcatctcttgatgaattaattcatctgcctaaggttgtgaatcactttctggaggtaagagactaattagcaaatgctctgtggctttcatcacttacagggccagcccactgtgatgaacccactattcagaagcggggcaatgaacaaattaattattgaaaaacagaaatggctaaaatctacaggtagtgaagactggaaaaaaaattaatgaagatgattatgaatctttagtatataactttctgcattttactagtgtataggcatttcaagtgctttgtggcaacagcttagccctaaataggaagttagaataaaccaattttaatataatattttgttttacagaggtttttcaggatggatatatgctttattttatagaaggcaaggtctaaatggaacctagagaaatatattataattttaaatgcttagacaaaagatagggtaaaccaaataatgtagtttttacaattctgttttggtaaacctaaaggtaatttcactgtgatggacaaaagagttcagtccaacccaaatatgtcctgctttcacgctaatgtgtgtcttctcaataagcctaccaagaaaataggaatgagaatctattcccccaaatcaagggccatttgaaattgaccatattctaattaaacacttttttaaaacccacatatatacacagtacaaccttttctcctttacattcaaaataacaaaacagtaaaagccttttatttaaggcttttgcttagatttagtagcttttcattggaagagggtacagagtataagtagagaggtgttcatttattaattggaagagggtatagagtataagtagagaggtgttcatttataaatttaataaatatttctagagctcctgcttggcaccaggtacagttctgagaatcagcgacctagcatttaacaacacagattagatgtgtaatggcatggtgcttacatgcatgggagacacacaagcaatgcataaacaaaatgagtaattttgtttatttgtttatgacctgttatattacatgtgtttgaattttgagatcacgaatattaattttttgttttaaaagataggatattattttctattgttacagcagtaatttttaagaaatatgttaatataaacaaaattttgatagtattcttaagacatacccataaaaacattttatttgactatttatgatctaacaacattaacaaatacatgttaattgtttatgtgcttctttactagcatttctttgggcagaaagtttttttgaactgagtaatttatcatttttagcgttgcctcatcagttcaccaatcaatatatagattactgatcttttacttgttatgggctcaaaactgtagtaaggatttctgcagtggggattacttaatttgattttctttttttctttcttttctttcttccctttagacagagtcttgctctgtctcccaggctggagtgcagtggcacaatctcagctcactgcaacctctgcctcctgggttcaagtgattctcctgcctcagcttcccaaatggctgagattacaggcacataccaccatgcctagctaatttttgtacaggtttcaccatgttggccaggctggtctcgaactcctaacctcaagtgttcctcctgcctcggcctcccaaagtgctgggattgtaggcatgaatcgtcatgccgagcctaagttgactttctactatcattttcacttatttaaaaaaatagaatggatctattggaaaaaccataaatcattatttgcttacttcctaattgattcattttaacatagaccttttagtttttttcactatccaaggatttagttaatgctatcatctgttatacaaatcgcactcacttgctttcttcctgttgcacagcatacaactggcaggatctttgagagtgaagtgaggtatcagtgtaacccgggctataagtcagtcggaagtcctgtatttgtctgccaagccaatcgccactggcacagtgaatcccctctgatgtgtgttcctctcgactgtggaaaacctcccccgatccagaatggcttcatgaaaggagaaaactttgaagtagggtccaaggttcagtttttctgtaatgagggttatgagcttgttggtgacagttcttggacatgtcagaaatctggcaaatggaataagaagtcaaatccaaagtgcatgcctgccaagtgcccagagccgcccctcttggaaaaccagctagtattaaaggagttgaccaccgaggtaggagttgtgacattttcctgtaaagaagggcatgtcctgcaaggcccctctgtcctgaaatgcttgccatcccagcaatggaatgactctttccctgtttgtaagattgttctttgtaccccacctcccctaatttcctttggtgtccccattccttcttctgctcttcattttggaagtactgtcaagtattcttgtgtaggtgggtttttcctaagaggaaattctaccaccctctgccaacctgatggcacctggagctctccactgccagaatgtgttccagtagaatgtccccaacctgaggaaatccccaatggaatcattgatgtgcaaggccttgcctatctcagcacagctctctatacctgcaagccaggctttgaattggtgggaaatactaccaccctttgtggagaaaatggtcactggcttggaggaaaaccaacatgtaaagccattgagtgcctgaaacccaaggagattttgaatggcaaattctcttacacggacctacactatggacagaccgttacctactcttgcaaccgaggctttcggctcgaaggtcccagtgccttgacctgtttagagacaggtgattgggatgtagatgccccatcttgcaatgccatccactgtgattccccacaacccattgaaaatggttttgtagaaggtgcagattacagctatggtgccataatcatctacagttgcttccctgggtttcaggtggctggtcatgccatgcagacctgtgaagagtcaggatggtcaagttccatcccaacatgtatgccaatagactgtggcctccctcctcatatagattttggagactgtactaaactcaaagatgaccagggatattttgagcaagaagacgacatgatggaagttccatatgtgactcctcaccctccttatcatttgggagcagtggctaaaacctgggaaaatacaaaggagtctcctgctacacattcatcaaactttctgtatggtaccatggtttcatacacctgtaatccaggatatgaacttctggggaaccctgtgctgatctgccaggaagatggaacttggaatggcagtgcaccatcctgcatttcaattgaatgtgacttgcctactgctcctgaaaatggctttttgcgttttacagagactagcatgggaagtgctgtgcagtatagctgtaaacctggacacattctagcaggctctgacttaaggctttgtctagagaatagaaagtggagtggtgcctccccacgctgtgaagccatttcatgcaaaaagccaaatccagtcatgaatggatccatcaaaggaagcaactacacatacctgagcacgttgtactatgagtgtgaccccggatatgtgctgaatggcactgagaggagaacatgccaggatgacaaaaactgggatgaggatgagcccatttgcattcctgtggactgcagttcacccccagtctcagccaatggccaggtgagaggagacgagtacacattccaaaaagagattgaatacacttgcaatgaagggttcttgcttgagggagccaggagtcgggtttgtcttgccaatggaagttggagtggagccactcccgactgtgtgcctgtcagatgtgccaccccgccacaactggccaatggggtgacggaaggcctggactatggcttcatgaaggaagtaacattccactgtcacgagggctacatcttgcacggtgctccaaaactcacctgtcagtcagatggcaactgggatgcagagattcctctctgtaaaccagtcaactgtggacctcctgaagatcttgcccatggtttccctaatggtttttcctttattcatgggggccatatacagtatcagtgctttcctggttataagctccatggaaattcatcaagaaggtgcctctccaatggctcctggagtggcagctcaccttcctgcctgccttgcagatgttccacaccagtaattgaatatggaactgtcaatgggacagattttgactgtggaaaggcagcccggattcagtgcttcaaaggcttcaagctcctaggactttctgaaatcacctgtgaagccgatggccagtggagctctgggttcccccactgtgaacacacttcttgtggttctcttccaatgataccaaatgcgttcatcagtgagaccagctcttggaaggaaaatgtgataacttacagctgcaggtctggatatgtcatacaaggcagttcagatctgatttgtacagagaaaggggtatggagccagccttatccagtctgtgagcccttgtcctgtgggtccccaccgtctgtcgccaatgcagtggcaactggagaggcacacacctatgaaagtgaagtgaaactcaggtaagatcatggctctagggtctccaaggggtgcgggcaggattatgaaatgaaatgtgatcgatcaaaaattttgctgattgggaagaaaacatcatctctgaactgctctccaaacactggtgcttttaacacttggctttattctacctacaattatgtagaaatccactgagtataaaaataaatcgatacttttttcagacatgtttctaatataattatcatgactatcatattctgttgagcttcgtgaaacaaacagcaagatcctctagctagcttgaaaagctccggaatcgtgaagctgttttttaaacatcaggatagtaaatttctttatgattataactttgtgattatattgacacatgcaaatattggggacataaggcaaaaaactgaagaattcaggccatgatcatgccaaataatcaggattaaaagaaatatcttatgtaaaggacctagagcagcacttggcacaaagtaggtattcataatacatatgaattatgctgtattcctactagtatctgagtccatgtaggtattcataatacatatgaattatgctgtattcctactagtatctgagtccacgtaggtattcataatacatattaattatgctgtattcctactagtatctgagtccacgtaggtattcataatacatatgaattatgctgtattcctactagtatctgagtccacgtaggtattcataatacaaatgaattatgctgtattcctactagtatctgagtccatgtaggtattcataatacatatgaattatgctgtattcctactagtatctgagtccatgtaggtattcataatacatatgaattatgctgtattcctactagtatctgagtccatgtaggtattcataatacatattaattatgctgtattcctactagtatctgagtccattttggactgtctagaatttcctgaactgttagctgtttatagaataaaaatgaattcaataataataatatccacaataaggtaaataacatcaaaaacacttaaagtaattttagtcttgattaacttttcatgtggataactgagaactgatctggttattaccggttttttgttttttggttttttgagacaacgtcttgctctgtcacccaggctggagtgcagtggcatgttcttggctcactgcagcctcaacctccttagttcaagcagtcctcccacctctgcctcccaagtagctgagactacaggcatgtgccaccgtgcccagctaattttgtttattttttatagagatgaagtctcactatgtttcccagcctagtctcaagctcctggactcaagtggtcctcctgcctcagccttccaaagtgcagggattacaggcatgagccaccgcacccagctcaactggttgttattgttatgttggtgtttttgcatggcaatgccatccgcctgacatattgattgtgcaacaatcaatatgttgcacaaaatatctactgagccttgtaacagcttcctaaatccaaggatagatcagaaactatattgtacttcatttaaggcactcatttttgcatttccattgcagatgtctggaaggttatacgatggatacagatacagatacattcacctgtcagaaagatggtcgctggttccctgagagaatctcctgcagtcctaaaaaatgtcctctcccggaaaacataacacatatacttgtacatggggacgatttcagtgtgaataggcaagtttctgtgtcatgtgcagaagggtatacctttgagggagttaacatatcagtatgtcaggtaagattctgtcttaattagaatgtgtaatgcctacatatacatatattgccaagcaagcagtatctataatagtaatcc

SEQ ID NO: 10807 - DNA, 409 bp, Homo sapiens
taagattcaggttaaaatttgcatagatacaagagatgtgggaattagtcaatatcagagaaagatgctgaggtaatttccatttcagaaaatttatctagctttgcctaaatggataaatggagacatttgaagcataagagtttggcatttcatgtcccagcttagaggacttccacttgaaacagaacaattggtttgaagcacagtatctagatcctttctccaaagagaaagaaaattgcccattcaaccagcaattatctctaattaaggaatggaagcacaagttttcggtagtatcactacctggcagtctgcatgcaatcaagcaaggcaaggttcctatatccacaggagttttttcttgactagaaaaaaaaattaggataattaagcaagttgtagc

SEQ ID NO: 10808 - DNA, 2362 bp, Homo sapiens
tagaaataattttattatttattttaaagcagttcaatgtaactggtagcaaaatggtacagacaataaacagaatcaattcccattgggctacaaggactattattgactttatattttattttcatgtgcaagtataattattttaaaaaggcaacatttcattaaaagtcttttataagcatgtttttattctttaaataacagaaagactaataaattatcattattgtagcaagctggtatgaactgtgtcaaatattaaatttggactaatgttcatagtcaaaaataattattttaaaatttatgaaacaaaatttttagttatataggaaatataatcatatcctagcttaaaatcctagtctcaacaactgtcataatgcaaaaataccaaacttcagatcttgtggggaaataaaagatttgtaaaatcttacatttattcctaaaaataatgaagtaaaaaaagtcaacttaaagaaacatcatacttgactcttgatatgcaaatataaaacaagttcataaaatttattgtttttctctgttacatatattagttccattctgccttcagtttttaacaatttatatgtgaatgtgtgtgtcaaatatatttcacgtttataacatatacacatatatgcatacaatctttaagttttaaggcatgctcccaattttagctaacctgttataaattctacttctctgatcaaagtagattaaatacagggtctctgttttaggggtaattcttggtgttcttgttattctaaaatgtgaataatgtaaaatacctaaaagaaaaaaagacatttcatagcctccaagccaaattatacaatgactataatctttgatttcacattgcactttacagttttatttctgtagaattattgagagtacattagaatatcttttctttaaaaattttattatcctttaagttgatctgcttcattatgaaaagaaaggaaaaaaagtccctttctagttttatatgtattttttgttgttgctgaattaaactcaatgtcaaattcaaaaattaaaaaatacaaaattagaacagtatgtatttaaatttaccaatgtttcttttacaggaacattttaacacacttctactacctggtaaactatgtacgcatactcttgtgctcttttgatctatttctctagggggaaaatgcatatacaggtttattaattgaatcactggaatatcatccaaggtccgatttatatttaaagttataactcaaatttggcatgattcgcattaatgttaaaagccaagaactacctattttgttttatgcttttctctcataatgttaaagtatagctcatatatacgatttcaaaattaagtcaaaaattttaatacatccttcattgagtgttattgtttcattaccaaagacataaggacttttaatgttttgaagtgtcttcagagtccataaaaggtataaattatcttctgtcaattttaaaagaatttttctagtgaaatttactatatagatatatgaataggaaagatggtaaagttcaagagtctaaggacaatcattactgtatatttcaagatatccagttaatttttcaatccttgaattaaatttaagtcaacaaatgtgtattaagtattttctctatgctaggcattcgtttaggagaataatagatatttgctttatagtatgcttttcttggcataaaatatttgctagacataaagttaccaaaaagtgcaggaacctagtgtttcttttcatttatgttttagtttcttcaatgtaataaaacatgctatgaacatctcaaattctaagataaatatttttatatcgtaaggcagaaaaaaaagttaaaatgacttaaagatttgtattctaaagcaaactatgattcttacacaaaagtcagccacacaagtttgttggttaatctctatgtgagaagactagacatttacgatgagctcaattttgtaaaacagtaagtttaaagaatataatatgacacatttaatttttaagaggagcagcagcattctgtgtccattgtgatgcaccaaatatagttagattttgtcaacttcataaaaccttaataatttttaaaattgctttcatagagtttggattattataaaacaattaaatgtcagatttaaatttttgtattttaatttagcttttcaaatttattccattgaggtccttcaaatattaatagggagagtaccagtaagtagtacattaagtttcaaaatgatctatacttctaagagaagagattacgtttttaaatatgagagaattacatatatttccatcta

SEQ ID NO: 10809 - DNA, 209 bp, Homo sapiens
tggctaacacattgaaaccttgtctctactaaaaatacaaaaaattagccgggtgtggtggcaggcgcctgtagtcccagctactggggaggctgaggcaggagaatgggatgaacccaggaggtggagcttgcagtgagccgagatcccgccactgcactccagcctgggcagcagagtgagactccgtctcaaaaaaaaaaaaaaaa

SEQ ID NO: 10810 - DNA, 1046 bp, Homo sapiens
  SITE (791): n equals a,t,g, or c
cagatctttgagaaacagcgggagaccaagaaacatctgtttggagggcagtctcagaaggccgtgcagcctccacaccttttcctttggctgatgaaactcaaaaacatgcttcttgccaagtttagcttttactttcatgaggctctgagccgacaaacgactgcttcagaaatgaaaacgttgacagcaaaagctaacccagacttttttggaaagatttccagcttcatcagaaaatatgatgctgccaatgtgtccttaatttttgacaacagaggttctgagagttttcagggtcatggttatcaccacccccattcctacagagaggcccccaagggtgtggaccagtatccagctgtagtgtctctgcccagcgacaggccagtcatgcactggcccaatgtcatcatgatcatgacggaccgcacatctgatctgaacagcttggagaaagtggtccacttctatgatgacaaagttcagagtacctacttcctaacccgcccggaacctcactttaccattgtcatcatttttgagtcaaagaaatctgagagagactcccactttatttccttcctcaatgaggtctcacttgcccttaagaaccccaaagtgtttgcaagtctgaaacctggatccaaaggttagcaggtgatttgcgtggaggggtttcaagactagaaactgttcttaattgccctaatgatctacggtggtctgtgaatagagtttacatccattcatgcctctttcagaactaaattaaagacaaatcctccctngtgttgcacactttataagcaattaaggccaattgaattaagtttccaaagagtaatctaggaagtggtcatgggctacatgtgtctccatggtacagcaaagtagtttcagtattttcccctattttgctatatttcttgtagattgaagtattattgggcttttttttttcccatatgtttttctgttgttctaaacattgtgttctactgcaattccaaacagctctctgtttccctcttcttggaagagta

SEQ ID NO: 10811 - DNA, 282 bp, Homo sapiens
tttttttttttgagatggagtctcgctctgtcgtccaggctggagtacagtggcgcaatcttggctcactgcaagctccacctcccaggttcacgccattctcctgcctcagcctcccaagtagctgggattacaggcacccgccaccacgcccagctaatttttttttttttgtatttttagtggagatggggtttcactgtgttagccagaatggtctcgatctcctgacctcgtaatctgcctgcctcagcctcccaaagtgctgggattacaggcgtg

SEQ ID NO: 10812 - DNA, 970 bp, Homo sapiens
ataggctcaaaataaagggatggaggaagatttaccaagcaaatggagagaaaaaaaaaaaaaagcaggggttgcaatcctagtctccaaaaaaacagacttcaaaccaacaaagatcaaaagagacaaagaaagccattacataatggtaaagggatcagttcaacaagaagagctaactatactaaatatgtatacacccaatacaggaggacccagattcataaagcaagtccttagagacctaaaaagagacttagactcccacacaataatcatgggagattttaacaacccactgtcaatattagacagatcaatgagacagaaagttaacaaggatttccaggacttgaactcagctctgcaccaagcaggcctaatagacatctacagaactctccaccccaaatcaacagaatatatattcttctcagcaccacatcacacttattccaaaattgaccacatagttgaaagtaaagcactcctcagcaaatgtaaaagaacagaagtcacaacaaactgtctctcagaccacagcacaatcaaattagaactcaggattaagaaactcaatagaaaccgcacaacaacatggaaactgaagaacctgctcctgaatgactactgggtgcataacgaaatgaaggcagaaataaagatgttctttgaaaccaatgagaacaaagacacatgtacaagaatctctgggacacatttaaagcagtgtgtagaggaaaatttatagcactaaatgcccacaagaaaaagtgggaaagatctaaaattgacaccctaacatcacaattaaaagaactagagaagcaagagcaaacacattcaaaagctagcagaagggaagaaataactaagatcagagcagaactgaaggagatagagacacaaaaaacccttcaaaaaaatcaaagaatccaggaggctggttttttgaaatgatcaacataat

SEQ ID NO: 10813 - DNA, 359 bp, Homo sapiens
tgcccccagaggtggagcctacagaggcaggcaggcctccttgagctgtggtgggctccacccagtttgagcttcccagccactttgtttactactcaagcctcagcaatggtgggcgcccctcccctagcctcactgctgccttgcagtttgatttcagactgctgtgctagcaatgagtgaggctctgtgggtgtagggtcctccgagccatgtgcgggatataatctcctggtgtgccttttgttaagcccattggaaaagcgcagtattagtgtgggagtgacccaattttccaggtgctgtctgtcacccctttctttgactaggaaagggaattccctgaccccttgcacttc

SEQ ID NO: 10814 - DNA, 239 bp, Homo sapiens
ttattatttgagatggagtctcactctattgcccaggctggagtgcaatggcgcgatcttggctcactgcaacctccacctcccgggttcaagcgattctcttgcctcagcctcccgagtagctgggattacaggcatgtgccaccatgcctggctaatttttgtatttttagtagagatggggtttcaccatgttggccaggctggtcttgaactcctgacctcaggtgatccacccg

SEQ ID NO: 10815 - DNA, 237 bp, Homo sapiens
aaacattcttatacttccaagtattggtaagaaaagagtaatatggcatttttattaagcatctactagcttcaaggcataatgctactcctgtaaaaaaataaaaaattttatgaaacagacactaaggaagtgatatataaataaatcaaactaaagcaattgttagaaggtgactttaccacgaccccacaggtgaagcaccaagagaatgaagaaaaggaaaagagaaaatgg

SEQ ID NO: 10816 - DNA, 620 bp, Homo sapiens
tgtttgcctgggtatcagcagtggtggatgcagaacagcggtggctgtaggacagtggatcttggtgaaccgcaaatgctgctgcctgatcattcttctggaagttttgtctcagaggagtacccgaccgtgtgaggtgtcagtctgcccctactgggggatgcctcccagttagtctgctcgggggtcaaggacccacttgaggaggcagtctgcctgttctcagatctccagctttgtgctgggagaaccactactctcttcaaagctgtcagacagggacatttaagtctgtagaggttactgctgtctttttgtttgtctgtgccctgcccccagaggtggagcctacagaggcaggcaggcctccttgcgctgttgtgggctccacccagttcgagcttcccagctgctttgtttacctaatcaagcctgggcaatggccggcgcccctcccccagcctcgctgccaccttgctgtttcatctcagactgctgtgctagcaatcagcgagactccgtgggcgtaggatcctccgagccatgtgcgggatataatctcctggtgtgctgttttttaagcccgttggaaaagcacagtattagggttggagtgaccc

SEQ ID NO: 10817 - DNA, 516 bp, Homo sapiens
ttaaattctgtgcattttattatatacaaattattttgcaataagaattaatttttaaaaagcaataaaaattgctgctcggcgaaaacaaattatgaatatactatctaacacactttctggtgtgaaggaaatattctagatcttgttttgtgtggcagttacaaggatatctacaagtcaaaactcattaaactcaacttttaaattctgtgcattttattacatataaattattttgcaaaaataattaattaaaaaacaataaaaattactgttctgagaaaacaaattatgaatataccatctaactctacagagtacagaaataaaaaatatagtaatatctttgacctatttgaaagtcaacaaaagaaaagcaagaaagtgcctacaatatgattaagtgaatggcatttatatatatgtataatcatttaaatgtttacagtttaaaggaaaaaatagtgaggaaaagaatgctatggttttcaaatcctacggtttgtactaaag

SEQ ID NO: 10818 - DNA, 434 bp, Homo sapiens
cccctttcaggcaacatcacgtgcatggataatcaaagatcagatcctggtcaacatatgtaagcaagcctgtttaaaataaattcccccacattcccttgtacctactccttgccctctgcttcagggttatagaacagctgcctccagctattttcccctgaagccatgcagaaccatccaacctttcagaaggtttgcatcctttccctatagtttttccaccactctgactgatctcctacattacccttttgctggcatgccagttttctgggttctttctccctgagtggtcctggcgaccctgtctgactgtatgcaaacaaatacattgccatgaattaagaatattcatagatagtttacaaattttggagaaactaggcagagagagaaatatgactcaaattctatttgtaagggtatactca

SEQ ID NO: 10819 - DNA, 443 bp, Homo sapiens
aattgcctaataattggtctgttcaaatgtgtctgctatttgctctcagccaagccttaaagtacttacagaaccaagaaggaaccatctataccaatcctaagttaatttggactaaacaaggttttattaatagcaaataattgaaatccccaacttacaaggttttcaacaaaagtaaagtttgctaaaagttaacagtgtaacctgtattatcctaacttctaatcttgtggccttaggtagtctagtccacggacatgaaggaagttcgttttggagaagaatggttatcatctttagaaaaaaaaaaggtggggggaagaatgtatataaaaaatgttatatggtaaattcttgtcctaaaataaattaactggttgtttaaagaaagggatgtttgcaacaagtcagaaggttgaggcatgttgaagattgtgaaa

SEQ ID NO: 10820 - DNA, 1148 bp, Homo sapiens
aaccaatctgaggctaaagtggagttacaaagctgcccttctgtgcaaatgaagacttggcccacagtcagtgtgattggttggggacagcaaccaatcagaggctgatgtgaagttacaaagttacactcctatgcaaacgtctgattggttgcaaaaaccaaccagtcagaggtactttcaatttctcatctgccagcagaaaaggtaggggtttgcaaagggagtagcctctggtcattttgttacttaggcgtagaaagttagggttttcctttcaattttgttccaggaagtcagtgcaaaacggccttagattccccgcctccagaccctattctcctgcctcattcttagtcttaaactctgtattactgttatcttcttatatcttgtctttttaaataaatcatattttgggaatttaattgtaaaaatgtatactagtaaatgatcaactagagttcttgttctaaaaggagagtaaattatttgttccctttataaaaggtagtttagctgtacccagagttaaactacagagtttacaggtatacgtactcttcaagactgccctcatttctgacatcaactgcaagttgaagagcttcccgaaaccaacttcaggcttgataatttgctaagactcaaaaaactcactgaaagctattgtactcacagttacagtgtattatgggctaaagatacacattaaaatctcacaaaagaagagatgcatagggaagagtctagaagagtcccaaatgtgaagtgtccattttcctataaaatcaggacatgttacccttccagtatggatatgaaatatcaacatgtgtcccactgttcagagttttattggggctccattacctagtcatgattgattgattgattgattgcccaggtggttgaactcagtctccaggttgaccgatactgtatgacgcagatgccctaccccagatcacatggttagtctttctggcatggccagcgttcacccggtgactctcagttatggtcgctaagctactagataaaaggattaggcccttattcaaactggttgaatgcttgtcaactgtcaccagagtccatccacagaataaatagaaatataagaggcaaacagacaaaaaggaaaa

SEQ ID NO: 10821 - DNA, 278 bp, Homo sapiens
gcctgtaatcccagcactttgggaggccaaggcgggcagatcatgaggtcaggagatcgagaccatcctggctaacacagtgaaaccctgtctctactaaaaatacaaaaaaattagccgggcatggtggcaggcgcctgtagtcccagctactcgggaggctgatgcaggaaaatggcgtgaacccgggaggcagagcttgcagtgagccaagactgcaccactgcactccagcctgggcgacacagcgagactccgtctcaaaaaaaaaaaaaaaa

SEQ ID NO: 10822 - DNA, 459 bp, Homo sapiens
ctagaatttctgtatatttatagataatctcacctgagttcctgtaatgcagatcattattttcaactaataaaattcaccttatataaatacacagttggtgctcttctctagaaactctgctaacttttccagaaatgccttagagagaagaaatttcctgattttgtgagcttcttacttgaatatattctctttctttctcagcctataaacaaggcaagtttcctattgttacctgagattctaaggtagcaggaagaagtgtatttgtgtaaagaggtggttaatgccctgccactaataaaatgctctagatgtaattacagaggaggatgcactattttaaagaaaaattaaaacatacttttttttttctttttgagacagcatctcactctgttgaccaagctggagtgcagtggtggtcatagctccctgcagacttgaactcccagt

SEQ ID NO: 10823 - DNA, 259 bp, Homo sapiens
tttgcacaaccaaatttattgcaatattattaacacaagccaaaaggcagaaacaatccagatgtcccttgaccaatgaacagattaataacaagtggcacatacacaaagtcgaatattattcagtctttaaaaagacacattatatgataattctggagaagatcatgttaattgaaataagccaggaacaaagtgacagtctatgattccattcataatcaggtatcttaagtagataaactcataggaaaaaaaa

SEQ ID NO: 10824 - DNA, 459 bp, Homo sapiens
tccagttctccctcttggcaattgaatggtcggggggaactgaccttagtgaaaattgggtatctaaattagtggaatttgaacctttgactgtgcatgaagtgctgcaggggatttcagtcagcaaaggagatgccagggggatctcttagcatagatggtgcttgcttactgcttataagttaatgtgttgagatagaaatcaattgctacaagataaatgtaagctggaaaaagaaaacactactctgacttccagactggccctggctcaatttcaggcctatgtcttgactgatcaggctcaaagctaacagattattgatgagaaaaacagctgtgcaagtggtgtggtcagggtaaaactgaagaacgagtcagctggggcttggtgtgggtaaaaacccagttcctatctgaagaatgggaaattagcctttacaaatttcaagaacctgc

SEQ ID NO: 10825 - DNA, 182 bp, Homo sapiens
agttcggaggcagcggcgaggcgggccgcggcaagaagcagcgccacacccgggaacagcgctaggcggcggaggcgcatggcggcgaggtggggtggggacggccggaagggtcgcggctcggctgggactgcggaggtcgggcgcgcgaccacaaaccggctgcctgcgctggcgcgtct

SEQ ID NO: 10826 - DNA, 104 bp, Homo sapiens
atcccagcactttgggaggccgaggtgggtggatcacgaggtcaggagtttgagaccagcctgactaatatggtgaatccccgtctctactaaaaatacaaaaa

SEQ ID NO: 10827 - DNA, 94 bp, Homo sapiens
agagatggggtttcaccgtgttggtcaggctggtctcgaactcctgacctcaaatgatccacctgcctcggcctcccaaagtgctgggattaca

SEQ ID NO: 10828 - DNA, 251 bp, Homo sapiens
tttttaaaatacctcctcaaatgttgctcacatttgtatttgtttcttagttgttggtgtattctaattaatttataggggctcattacatagtctgtattattcctttctcattgtatgtgttgaaaatttctttccccactccatgtctttccttttcactctcttatagtgcttttagatgaaaagagtgtgtaattttaacatactagagttatcaatcttttttttttttttttgagatgaagtct

SEQ ID NO: 10829 - DNA, 313 bp, Homo sapiens
gtagtataatttgaagttgagtaatctgatgcctccagatttgttcctgttgcttagtattgctttggttgtgtgggttcttttttggttccatatgaactttagaattttttttttctagttctgtgaagaatgatgatggtatttcaatgggtattacattgaatctgcagtttgcttttggcagtatggtcattttcacaatattaattctacctatccacctgcatgggatgtgtttccatttgtttgcatcatcccatctatgattttttttcagcagtgttttgtagttttccttgtacagatcttt

SEQ ID NO: 10830 - DNA, 251 bp, Homo sapiens; identical to SEQ ID NO: 10828

SEQ ID NO: 10831 - DNA, 284 bp, Homo sapiens
atcattttagattgatcatcttggctacattaggtatctgtatttagataataactttatatttaggtagacaattttaagacaaaaagtagaaattaacaaagagaatttttattaaattgttggaatttaccatttggaaatccatacacaggttcaattcccaaacacctatatattgcctatattttcatcattttgatgtcatataacagactgttgattagtattattcacttgcaactactttaaccactgaaagtattcattttcattattaatac

SEQ ID NO: 10832 - DNA, 186 bp, Homo sapiens
gctttaccagcagtagtaaatttatagaagagaaacagaaatgctttgctgttaattatgcttaaataagaatagaagtaaaggagagtattacctgcaaatcaccagagcagctttcccccgtataagcagttcctaaagtgaatgaaagcagctctccttatgtgtctgcctactttattcttc

SEQ ID NO: 10833 - DNA, 722 bp, Homo sapiens
aaaaaatatggggtcagaatggttgggttttaattgtgactctgatagttactgattacggaaccttgggcacagtatttaactagtctatatatctgcttcctcatctgtaaattggaagttattataaagccttccatatagacttcttatggaaataaaatgaaataattcatacgaataccctggcacatattaggtactcagtgaatgttagctagtattacaaatgtctatgacaatttaattagcatgatgtctagaaccgccattatttgattagaattagtttagcaggaggatgaaaaaactgagaaggaccctaaaatgagtagccatgctgttttatttactcctttctttatttaagacatgaacaacactctaggtacagttttatattttaatggctatgttgtcttctcttcgtccttacatgaaataccctcaccctctcccccagaaaaaaagaaaagaatcattccattgttagaatgcagtttagagattataaactccaaactctgtacgtcattaaaatttatattcactgggaccttgaacttagtcttcaacttttacatgcaataccattagtttatttaagttcagttgattcactgtttgtctccctccacaaaccaacctcttgcatcagatgttctccttaacttgcttagaggcctgccatttctttggatttttttttccattttatcacc

SEQ ID NO: 10834 - DNA, 295 bp, Homo sapiens
gttttctttttttttaaaaaatttattattattatactttaagttttagggtacattgcacaatgtgcaggtttgttacatatgtatacatgtgccatgttggtgtgctgcacccattaactcgtcatttagcattaggtatatctcctaatgctatccctctgccccccgtcccaccccacaacagtccctggagtgtgatgttccccttcctgtgtccatgtgttctcattgttcaattcccacctatgagtgagaacatgcggtgtttggttttttgtcctggcgatagttt

SEQ ID NO: 10835 - DNA, 237 bp, Homo sapiens
tggatcacctgaggtcaggagttcaagaccaacctggccaacatggtgaaacgctgtctctgctaaaaatacaaaaattagctgggcatggtggtgggcacctgtaatcccagctactcgggaggctgaggcaggagaatcgcttgaatccaggaggcagaggttgcagtgagccaagactgcactgttgcactccaacctgggcaacaagagcaaaactccgtctcaaaaaaaaaa

SEQ ID NO: 10836 - DNA, 116 bp, Homo sapiens
attctcctacctcagcctcccaagtagctaggactacaggcgcccgccaccacgtccggttaattttttgtagttttagtagagacggggtttcaccgtgttagccaggatggtct

SEQ ID NO: 10837 - DNA, 1469 bp, Homo sapiens
tattagtgatgatagaaccagatataaaattgttcagtgatggagaaaagaaacgataaatactttccaaggttatattgttaaattatcttaaattatcaaggtgtaagatgtaatgatcccaagagtttttatagaatcctaaaaaataacgcctgatgtatagattagttagcaaattctcagaaatcccccacataaaagccttactttgttcaaaatttattatagtggtttaatcattttagatttgaatgttttaagataggagagacttagcagaaaatacttggcttgccagggccacgttctacttcattgctttcttttataagtgcaaggagttatttccatcagttgacatagatattattcactaaaattttcagcagactcaaaatagagaggagactttaaacttacatgttagcataaaacagacttctctctcattgcatgcactagatcaatattatcatctgtattaagctatctgaatttattcgagacattaagaaaaagacagtacatggtgggaaagctgcacatttctcacaaggaaaaaaacattctatatttgtagcagaaatcagtggtttgaaaagtcatactttgcagatatgaacctgaaaatcaaagtgccattgttaaatcatcctaaagtgtactgtgggtattctccagcatacttgaaaatgaataaagttagattgctcacattgaagctaatggttgagacaagacacctgccagagtgaagtttgattcctatgggtgagaagatgtagatgactattgttctcactaaagttctaaaataatagcaagtgtagagaagagccgttgctttgaaaatacataccacatttgttataaagcatttgtttgttagtatcaatcacataggtagaaagagtttgagttttactgtggattaaaaagccttccctaaaaagagagcatgccagtcatagagacactaatttggcacttttcctccttcttaggtttaaatgttataccaatgcatgtgtttgaaatatccattaagatgatttaaaatttgtcttgtattttgagtttcttaaatgcgtggattcttgttcatttatctctgaatatgtctcttttatattttggcacaattatacacattggaaagggccaacctattagggctcaagtatgtatatgcaaaaaaaaaaagttatatcaaacaggcacagttattacaactagagagaaattccagaaatatttgtttttttaagagaaagtaaattttcacattagatttctattcaaagtactaatatctacatggtccacacttttctattttaaaaaattgtgttctcttgttaaatagattaacatttccacttctgtttatcacaaaagactgtatttgaaatatgcatacggaaaattgaaattatattagtaataaatgtaacttgaaaaatcaa

SEQ ID NO: 10838 - DNA, 225 bp, Homo sapiens
gggtggatcacttgaggtcaggaattcaagaccagcctggccaacatggtgaaaccccctctctattaaaaacataaaaattagccaggcatggtggtgtgcacctgtaatcccagctattcaggaggctgaggcacaaaaatcacttgaacccaggaggtagagattgcagtgaaccaaggtcgcaccactgccctccagactgcggtagagtgagattctgtt

SEQ ID NO: 10839 - DNA, 487 bp, Homo sapiens
gggtatagtctgcaggcccaggtggggcttcatgttcagctcactgttggacttcattgacatcaccctgaaaaaggtggatttttgaggagcgtgagaagaagagcatgagaagtgctgaattacactgtgttgttgcagatgagcgtccctaaccacagcagtccttgaagaagaaagatggtctgataggaactgcttattcaggaacacattgcaaaatctgtgggtgtccttcgggatctgagggcctcactcctacaactgcaaggaattgaattcttctaacagtgtgatgaggttggaagaagactccaagatccagaaaggaacacagtcccaccaacacctgtgttgtaacctggtgacaccctgaaacagagaatccagctaagcgatgcccaaaatattcatccacaacgtgttgttttaagcttccaagtttctagtaatttgttataaagcaatagaaaagtaatatatcctt

SEQ ID NO: 10840 - DNA, 407 bp, Homo sapiens
tggaatgtggttactccaatagaaatgagaggaatcttttatacttacttccatgttttaccatttctgatgctcttcatttctttgtgtaaaccaagcttgtccaaccatggcccatgggccacatgagggccaggatggctttgaatgtggcccaacacaaattcataaactttcctaaaacattatgggattttttgcgattttttgaagctcattagctatccttagggttagcatattttatgtgtggcccaagacaattctatctccaatgtggcccagggaagccaaaagattggacacccctggtgtagacccgaatttttgtctgctctcacattccatgtaatagagagtaagattccattttttatgtttgacctttgatagctttcaaacctcat

SEQ ID NO: 10841 - DNA, 282 bp, Homo sapiens
cacgcttgtaatcccagcactttgggaggccgaggagggcagatcatgaggtcagtagatcgggaccatcctggctaacacagtgaaaccccatttctactaaaaatacaaaaaattagtcgggcgtggtggcgggcacctgcagtcccagctactcgggaggctgaggcaggagaatggcgtgaacctgggaggtggagcttgcagtgagccgagatcgtgccactcactccagcctgggcgacagagcgagactccatctcaaaataaataaataaataa

SEQ ID NO: 10842 - DNA, 303 bp, Homo sapiens
gaggcagtctgcctgttctcagatctccagctgcgtgctgggagaaccactactctcttcaaagctgtcagacagggacattttcgtctgcagaggttactgctgccttttgtttgtctgtgccctgcccccagaggtggagtctacagaggcaggcaggcctccttgagctgtggtgggctccacccagttcgagcttcctggctgctttgtttacctactcaagcctgggcaatagcaggtgcccctcccccagcattgctcccaccttgcagtttgatctcagactgctgtgctagcaat

SEQ ID NO: 10843 - DNA, 280 bp, Homo sapiens
gcttaacttcagatcctcaagaaagttagtgatctggagaaagggtcttgttctgggtaggctgggccctcttgtctccagtatatgatgttctgtagggatggacaggaggttatattctgcacctggcatctgccatcccatgcgttgggtctttaaagaatgacagaacaattggcttcaggttctttggatatgctggtttggggccctgaagcccagaattgcaatgtcatacagcagccagattaggaagctcacaagcaaggcatcactagcc

SEQ ID NO: 10844 - DNA, 2312 bp, Homo sapiens
ttttttttttaattcctatctagtttctttcaggaaatttctccatgtggaaatttctcctgtttaatgatgtccacagaccagccttctaaagagaattcttattttgcagtaggctcactacagatttgatgatggaattatctgccagatgcccagttctccctttgaggatacacagatagactccagtgtcattagactatcttcccctgaaatgcttttactatggctcctgcacaacttcagggtgtgccacctaccagccatccagacaaaaagtcatgctgaccacccaggctgcagcagaaggaggagatgagctctgggcaagtatgaaaagatattgatggcaagaaaactccttttttccccaaaaatatgaaggttaatgataattattcttctcatcaaaatgtttttgtctccctccttccaggtaaaagtgctaatgcttttagaacttacaaaatgaaactggccataacctgagccttcttttgcactcatctggacttatggtcttcatctccaaatgagacaaacaggagagaatggaacttctgagccctaggggcagcattcacttgaaagtcaattacgtccaaagtaagacactcatgataaggacacttctgaaaaacagagtgaggtgtctgctttcatgggagtaaacctattacttccacttacaataataattctcttaacatctccttaatgctccctgataaatctcagctcctcctcaaccagctctaaatgagaatgacaaggaaagttgtatgaggccaagcagaatgagatctgtagctgcttaagagtggctgataattaacccttctctctcttccccaatcccagtgggtccatgacttttggacaataaagcacccaacctgtgacagcactaagtgattcctgtgccacaggcgggaagcctctcagtgaggctgtgcacttaacagtcatcccaatgacagggaggacagtcttatacacaggaagtttataatgaactgaatttgacaatggcagcctgttcatgtgcagaaactaagatcagtgcctggggacaggcagtcaacttttaaatattaaacagcatataaatatgtatagccttgacctgaacacttgagttatacgttctgaataattatcatttctgaaagactaagggatagatttaccaaattaaaatacagaatctataggatcatgatgttctgcatttatagcattacacgatcaaagccccatctggataaaaggcaaaggcaactttaaaaaagtccttagagattagatccttgaatctcatctgaagtccactggtttcattttcactatatgttacttcatataaatcgggtaaaaaattatagtcatgatcataagtagggtcttgagatgtggcaatcaaagcctaaagattaatacttaacttcagttttcaaactaagtcccacattatccaaactgaagcaatgagtcagagaaatttcaaaggttaaatgctactgactttaaaaaacataaaaccatttgtaccacatcattctaatctcataaatttaatgctctataaaagtaacagagatacgtttagcaatttgggaaaaccaacgagagatgtcatttgcattgcttttgagatgaaacgtgatgtgataatttaccaagactgatcattataaaataagtgagcaacaagatgagttgagctggaaaggaaagggaggagtgggtttttagatcactaactctgtgactttatggtccagagccacatcaaccatgtgagtcaaaaaactttcaccatttcaaaatgcctggcctgggaattgggggcaatttatttctattggtgtaattacctggatgtgattttaccagcaccagcaagagaataagatccagttttaggaaataatatggatttgttcatccactcccaacacagcttgcttgctcatcctaaaatgatactattgctaagtaatgtctaccactatcgacctattctttagctaaattactaattagtttagcatgtctggttattaaactgcaatggtgagttaaactgtaatgctttcaaaactaaagactggctagtggtcaggtaagctatacctcttgcttctctggtcgagtccacgaagcctggagaaaacaagatataaaacacaacaagaaagcagtaaaattttacaacatgttgctttagagaatgtatcacactgcattccgtgcacatgcagcttttctttaattcagaactttttccaaggcccactttcaatggt

SEQ ID NO: 10845 - DNA, 187 bp, Homo sapiens
ccaaaaattgtatttagatattaattttataagtactttttctacatctattgaatggtgtgtagtttttcccctttaaccttttgatgtggtcaattactttaatagatgttcaacttataattttaggggtaaacccagcttgtttatggtatattatttgttttatatgatgtgagattttgtt

SEQ ID NO: 10846 - DNA, 558 bp, Homo sapiens
ggcgccggattctagtgtcttaactgtgaccaccctaaacattttacaaacaattgtcttgtttgaatcctcttcaaaaaatgatttataatcaactataagactttaataaatactatcaaatacaggtttctaataacagaaaaacatacggaactcataaaaaacttaaaatatttacaaatatcaaacagaaccaaagttaacaaaataaactgaactaataaaaaactgaaagaatgtttttaacttttacttagaaagttaaaacttttaacaactaagcaaaacatactcctataaacaaaatttagaacatatttatttctctttgcctggttcctctagaattcagaaactgattatgaatatttttaacttacaacaatatacttatttacatcaatacaacaaaatccattttattttacaacaggacacaattttaaaaactggttattttacaagacttttacttgaaagatgtatttccctttaaaaaatcaaactggattcacaaaaccaataaaagccctttaaaacactggcctcatacct

SEQ ID NO: 10847 - DNA, 317 bp, Homo sapiens
gaattttcagcctttctgctctggtttctccccatctttgtggttttatctacctttggtctttgatgttggtgacctatggatggggttttggtgtggatgtcctttttgttgatgctgatgcttcttctgtttgttagttttccttctaacagtcaggcccctcagctgcaggtctgttggagtttgctggaggtccactccagaccctgtttgcctgggtatcaccagcggaggctgcagaacagcaaatattgcagaatggcaaatgtttctgcctgatccttcctctggaagcttcatctcagaggggcacc

SEQ ID NO: 10848 - DNA, 103 bp, Homo sapiens
tttttgtatttttagtagagacggggtttcaccatgttggtcaggctggtcttgaactcctgaccttgtgatccacctgcctcggcctcccaaagtgctggga

SEQ ID NO: 10849 - DNA, 443 bp, Homo sapiens
ctccacccctgagcattttgcattctaaggacctttgcacaggcttctattcattctttagtggaagtttgtgtgtttgtttcaagaagctactttttagagcagttttaggtttacagaaaaattgagcagaaagtacagagagttcccatatactaccccaccccaccctaccccaccactagtttcctttattattagtatcttgcattgggatggcacattagttgcaattgatgagccaatgtggatgcattcttattaactaaagtccatagtttacatgagggttctctctttgtgttgtacattctgtgggttttgcctaatatgtcatgtcatgtatccaccattatagtgtcatacagaatagtttcactgctctaaaagtgccctctatcccacctattcatccctcccttcccctccaaatccctagaaac

SEQ ID NO: 10850 - DNA, 474 bp, Homo sapiens
tttgatgatggtgatgtacagatggggttttggtgtggacgtcctttctgtttgttagttttccttctaacagtgaggaccctcagctgcaggtctgttggagtttgctggaggtccactccagaccctgtttgcctgggtatcaccagcagaggctgcagagcagcaaatattgcaaaacggcaaatgttgctgcctgatccttcctctggaagctttgtctcagaggggcatctggctgtatgaggtgtcagtcggcccctactgggaggtgtctcccagttaggctactcaggggtcagggacccacttcaggaggcagtctgtccattctcagatctcaaactctgtgctgggagaagcactgctctcttcaaatctgtcagacagggacgtttaagtgtacacaagtttctgctgccttttattcagctatgccctacccccagaggtggagtctacataggcaggcag

SEQ ID NO: 10851 - DNA, 396 bp, Homo sapiens
gtaagatgatctacattgttgctgtatccaggcctttactgttgtaagaaatgttggagtgttagttgagggaaaaagtatgtattggtaaatataaactctactcatactaatgagagtttttgatatggtctactttatgatggcttcaagaaaaggatgtaatctagcatataacccattatttttaagagccctgggtaaattttagcctttgtcatatataaacttgttatatattagtgtatgtaacttcggaggtactaattctaacatagaattctagtattttagagtgtacaatttctcccttagatactttatataaacagtttttcaaaatcctaatttttaatccatctatgctgcaacaataaaaaaactttgtaaatatta

SEQ ID NO: 10852 - DNA, 434 bp, Homo sapiens; identical to SEQ ID NO: 10818

SEQ ID NO: 10853 - DNA, 443 bp, Homo sapiens; identical to SEQ ID NO: 10819

SEQ ID NO: 10854 - DNA, 1106 bp, Homo sapiens; identical to SEQ ID NO: 5812

SEQ ID NO: 10855 - DNA, 1519 bp, Homo sapiens
tcttgggttgttttttttttttttttttaattgatcattcttgggtgtttctcgcagagggggatttggcagggtcacaggacaatagtggagggaaggtcagcagataaacaagtgaacaaaggtctctggttttcctaggcagaggaccctgcggccttccgcagtgtttgtgtccctgggtacttgagattagggagtggtgatgactcttaacgagcctgctgccttcaagcatctgtttagcaaagcacatcttgcaccgcccttaatccatttaaccctgagtggacacagcacatgtttcagagagcacagggttgggggtaaggtcatagatcaacaggatcccaaggcagaagaatttttcttagtacagaacaaaatgaaaagtctcccatgtctacctctttctacacagacacagcaaccatccgatttctcaatcttttccccacctctcccctttttctattccacaaaaccgccattgtcatcatggcccgttctcaatgagctgttgggtacacctcccagatggggtggtggccgggcagaggggctcctcacttccctgtaggggcggccgggcagaggcacccctcacctcccggatggggtggctggccgggcggggggctgacccctccacctccctcccggacagggtggctgccgggcggagacgctcctcacttcccagacggggcggctgccgggcggagggtctcctcacttctcagacggggcggccgagcagaggcgctcctcacatcccagacggggcggcggggcagaggcgctccccacatctcagacgatgggcggccgggcagagacgctcctcacttcctagatgggatggcggccgggaagaggcgctcctcactttccagactgggcagccaggcagaggggctcctcacatcccagacgatgggcggccgggcagagacgctcacttcctagacaggatggcggccgggcagagacactcctcactttccagactgggcagccaggcagaggggctcctcatatcccagacgatgggcggccaggcagagacgctcctcacttcccagacggggtggcggctgggcagaggctgcaatcttggcactttgggaggccaaggcaggcggctgggaggtggaggttgtagcgagccgagatcatgccactgcaccccagcctgggcaccattgagcactgagtgaacgagactccgtctgcaatcccagcacctcgggaggccgaggctggtggatcactcgcggtcaggagctggagaccagcccggccaacatagcgaaaccccgtctccaccaaaaaaatacgaaaaacagtcaggcgtggcggtgcgcgcctgcaatcgcaggcactcggcaggctgaggcaggagaatcaggcagggaggttgcagtgagccgagatggcagcagtacagtccagctttggctcggcatcagagggagaccgtggaaagagagggagagggagaccgtggggaggggga

SEQ ID NO: 10856 - DNA, 374 bp, Homo sapiens
ttgtgttttctagtgtcactttttattttgacttgcatatgggaaattacacttaaactttcatttgtcccagcacagaggtatatctgcatgagagtcctagtcactacttacatttataatataactctgggttgcaatatttataggtttatttatgtcactattttctattttaatgtaattgttgtttgaccccaccacccaactccccacacataagcatcctccacaaggcaaggattttttttaatttcattcaaagttataaccaaggtttctaaaacagtgcctgccactgagtatttattgaataaataaatgaattacaaactctgtagcttaaaaccacagaacatttagggtattgacaa

SEQ ID NO: 10857 - DNA, 381 bp, Homo sapiens
ccagagagtgttggggaaacgaaggtaaaaaataaaaacatcctgttgtgaaactcatagaaaggtgaggtggttggttaagtacttatggaatttctatagctcttttccagtcctgaactatatgttactaggaacagagaatacaggtttacaagtgtaccgttcaggtcacagaactcctgtaatcagaaaatgtcataataaagcaaactgaatcatgtcaaagccagtagaggaggttgataactaagagtgagtcttgggtaagcttttttctaagttaagaatatttaatcactctccaatttgtggtatataaatctggattactataagtgtacttgtgcatatattaatatattcaatcttaagaataac

SEQ ID NO: 10858 - DNA, 553 bp, Homo sapiens
tcatgcatagatactcttaacaaatgaatacttagcattgcttttttcaagcaacaaatatattactttagctttctcagagtaagattacaaaattgtggaacttactgggttttgtaggaaaagctagtttctaattaaactcttaatctatttttagtgctgagtacatattgagaaggtagaatatttccagtggcctggttagaaatacttttcattgcacaaccaacatgaaaggatgacttatttccatgccagctgtcctcagttttcctgaccttaatggaacatattagatccagctgctggaatatttactctaatggaataaagcagttggattctttccttgcctattttccaaagaggacagtgttgaccaaaatatgtacttgttggtagcactagaagatcttcatgatagatacagttgacaacttttaaaataattgtctgtcccaatggggaaaaatgtatataatacacagaacactaggttaatatccagaatgcagacatattttcatatattcttacatctttcttatcc

SEQ ID NO: 10859 - DNA, 360 bp, Homo sapiens
tagctggtattacaggcacctgccaccatgcccagctaatttttgtatttttagtagagatggggtttcaccatgttggtcaggctggtctcgaactcctgacctcgtgatctgcccgcctcagcctcccaaagtgctgggattacaggtgtgagccactgtgcccggcctgcgctgtgattcttctatgcagctccaaacatacttctctcagtggttctcaggaaatactttttgcagacaatgactgtgagtccacagtaacagattcatagaaatggcttatgtaggccaggcgcggtggctcacgcctataatcccagcactttgagaagccgaggcgggggctgatcacctgag

SEQ ID NO: 10860 - DNA, 1785 bp, Homo sapiens
tttatttttgcttttattgagacagggtctcaatctgtcactcaggccagagtgcagtggtgtgatcacagctccctgcagcctcaacctcccaagctcaaacaatcctcccacctcagtctccagagtagctgggactacaggtgcacaacaccatacccaggtaatttttttggagataatgtctcactgttattcccaggctggtgtaaaaactcctgagctcaggcgatcctcccgtctcggcctcccaaagtgctggggatacaggtgtgagccaccatgcctggcttatgtttttttcaaaactagaaaatctccagatgttaaaaactaggcacatatttttatataacaatgaattgaaagatatttttaactgaaggataataaagagaggcatatcaaaacataagagctgcagctaaagcagaactcaagggaaaatatatcgtcctaaaatctatgtatacaaaaaagaaaacaagctgaaggatcagtgatctaaacttccatctcaagaagctgaatacgtaaatctacccaaagaaatcagaaagcatttctatgtttccaatgctaaagagaagagcaaaacccaattaaatagaaaaaaatcaatgaagctaaagcttagttctttgaaaaagtaatacaattgttaaagccctcaagcaaggttaatccatgaaaaaagagagaaaatataagctgccagtaccagcaacaagtatattttaactgtatactacatatataaaacactgagcatgaagaggaggaggaagacgggggaagaaaaacatgtgttttggagccatccagaagaactatattccagattccattctagtcaatttaatccaatatgcatttgttggaagagaatataaactactattagtttggtatgaaaggcctagaaggaaaaagcacatgaattttggagttggacagagttgagttcaaattcagtctctagcttgatactaaatgtaggacttacggtaaattattaggttggttcaaaaataattgtggttttgccattcctttcggtggcaaaacttgcaattacttttgcaccaacttaaatatataacctctctgagctcccattttctcatctaaaaaatgaaataataccaacctcacagcactgttggaagggttggggtaaagcaccaagtacgtgggtagcttatatcctacagaataattttcaccaacatgacccatgaccatgaagtttatggtttgactatctgtaggaagggtacaaaaatacatcatgcaacaaggtcattcatttggaaatgtaatgctttctgaaaaacttgagcattcacttttcttcacttgcctgttctaataagagaggtttggtgtggtgatttttcaatagaaaggatgttaccaatatataaataacataaaaggatcacatgagaattaaagtgaagtaacttaacatacaattttcattctaatcttatacaataatttttcttgactattgatagatcacaataaaggtatgctgatgatataagttattttaagactttggggaaaaaggcttccgtctctggcattgaccttattgtggaggaccctccaaaatcttcagctctgcaccagcaggtatgctgagtcatgtatgatgacataaaccacaaggagtcaaggagctaaaacaaccacagcgactggctcagatctcagatgtgcaagatgaatcctcaggatttttcacacactgaagaaacttgtcaggtctatgac

SEQ ID NO: 10861 - DNA, 120 bp, Homo sapiens
gtcttgctctcttgcccaggctggagtgcagtggcaccatctcagctcactgcaagctccgcctcctgggttcaagcaattctctgcctcagcctccccagtagctgggactacaggcac

SEQ ID NO: 10862 - DNA, 426 bp, Homo sapiens
acctgtgaatgactaactaatctaatacagatgaaagcccaatcctgatgaactgtttccagaaaagtttctcatgggagaaatgttatcaaaccatttgcaatctcttggagttgctgggaaaaataacaacagcaacaggtaagtcaggtaaactgatcacaattctctatctttttctagtctgtaaaaaaattagtcttacaataagaacaaacatgattgagaaaaataatcaaattattcagtatattagtgtgtttaagtggtgtatatttaaaaagaaaatagatgtttaaacttaagctatagactcatcagaatttcaagtaaatcatatgtttttgaccttgccctttccattaaccacagaagaatgttccgtgcataattcagtggtggcttcttctcatccttcagatcctg

SEQ ID NO: 10863 - DNA, 349 bp, Homo sapiens
aaatgacagcttactcataggatctttattattattccaaattagcaagcattaatatattttcagtgcaggtaaatcaagaacaatgttctctttgatgctttttatgaatggcacaagattagcatgttacctaagagagcttttctcaatgctagatggctgcaaattgtttatagataaagtagcaggagaaaaattcaacaaaatcctgtttctcagtgggtcattatttttttagttatgcttttaggcatgagctaatctctgattacctcaacactgacaataaaactgatttataaataatcacaatggaaccattcagtattggagcttgacaagcctt

SEQ ID NO: 10864 - DNA, 783 bp, Homo sapiens
tcacacctgtatttccagcactttgggaggccgaggtgggtagatcacttgaggtcaggagttcgagaccaacctggccaacatggtgaaaccccatctctactaaaactacaaaaaaaaattagccagacattgtggcaagcacctgtaatcccagctactcgggaggctgaggcatgagaatcacttgaacccaggaggtggaagttgcagtgaacggagattgcgtcactgcactccagcctgcacaacagaacgagacttcacctcaaaaaaaaaaagaaaaagtgtgtttagaagatagcacacggtgtggccaggccaccatttgataagattagtatggatatgagaaagctatgtgctatttatcaagacaatgggagaatgaccccaaagatattatggacatcttggtacaaggggagggggcaaccatgcccatcaaaaggccagagtgctagggtcttggggacagatgaattttgaggaggggcccagggtgcccatgggacctgtttgctcactgctgagggccaccttgggtctctgcaccctgcactctggcacagtgctccttggctaccccagctctgattcaagcaggcccaggtccaggtagggccactactctggagggtgcaagcagtgagccttggcacatccatgtggtgcttaattctgcaggtgtgcagagtacaagagcagtggaggctggcttccttcacctagatttcaaagaatgcctcagtgggcccaggcagagaactgctgcaaggacaa

SEQ ID NO: 10865 - DNA, 300 bp, Homo sapiens
gaggcagtctgcctgttctcagatctcaagctgcgtgctgggagaaccactactctcttcaaagctgtcagacagggacatttaagtctgcagaggttattgctgtcttttgtttgtctgtgccctgcccgcagaggtggagcctacagagacaggcaggcctccttgagctgtggtgggctccacccagttcgaggttccaggctgctttgtttacctactcaagcctgagcaatggcgggtgcccctcccccagcctcgctgcgccttgcagtttgatctcagactgttgtgctagca

SEQ ID NO: 10866 - DNA, 370 bp, Homo sapiens
ggatctgcgttcctttggagggggagaggcactctgatttttacaattttccacttttctgctctgttttttcaccatctttgtggttttatctaccgttggtctttgatgatggtgacatacagatggggttttggtgtggatgtcctttctgtttgtttgttttccttctagcagtcaggaccctcagctgcagttctgttggagtttgctggaggtccactccagaccctgtttgcctgggtatcagctgtggaggctgcagaacagcggatattgctgaacagcaaatgttgctgcctgatcattcctctggaagcttcatctcagaggggtacctggccatgtgaggtgtcagtctgcccatact

SEQ ID NO: 10867 - DNA, 494 bp, Homo sapiens
tatatgcacatatttatacatatgtatacatacacatacatagctaatgttaggtgtaccatgttaacatacataaacataaatacatttacatcaaataagtattcatacatctctgttttctaaagagatgttttaagaatggatcttgttttacccaagttttttttcagtatgtgtgcagaacatcatatgttttttcaatttatttatttgtgtatttgaaacagtgtcttgctgtctcacccagagtggagtgcaggcgcaatcacagctcactgtagcctccaccccctgagctccagtgatcatcccacctcagcctcctgagcagctgagactaccggtgccctccaccacacctggctaattgtattttttttatagagaagggggtttcgctatgttgcccaagttggtctcaaatcctgggctcaagccatccatccgcttcggattacaggcattagccaccatgcccagccttatttttt

SEQ ID NO: 10868 - DNA, 92 bp, Homo sapiens
gggaggccgaggcaggcagatcacgaggtcaggagattgagaccatcctggctaacacagtgaaaccccgtctctactaaaaaatacaaaaa

SEQ ID NO: 10869 - DNA, 693 bp, Homo sapiens
cttacccaatcattctgactccaaaacttatactcttagctaccatacagttagaactaaacaaaacactcaatgaaaaaaattttttcaaggtaaaacttaaaaaaattttactttgcaaggtaaaacttaacaaaacttaaaaaagattttaaaaacttaaacttaaaaaatttaaaattaaagaaactttaaaaacttaaaaaaatttacttttcaaggtaaaactttaaaaatttttatttctgtagtgccagaggtagaatattttttcaaagtactactgatgctggggaaataattaaaactaaaatctcctgtcaatccagtgaattctctttacaaacgtaggaaaaaaaagaaacagttttattactgaattcaatcagattcaatcagattgtgatgcacattacaggcaatctgttagagatattgcaaagacagaaagaaatgtcacccttttgtatagcaaggcagatacaatccattatatacatgttaattatctgtattaaaggaaaaataaaaacttctaatgtctttttgataagtaagaggttacaacttggggccaggagccttgacgaaattccaacagagacagggaaacaaggtaccatcttccgagatgttcacatttcaaagaaatgattccaaagcccccaagaaagacattgctgagattcaaaa

SEQ ID NO: 10870 - DNA, 8472 bp, Homo sapiens
cctggatggaatttttaatttatttatcatgtttgtaagttacagacatttatgttttcagcaacagtttataatagttacatctcatacttcaactattagaacagagagaacattaaagtacaaagaaagacttcaaaaatgaggttactgtgatgtatcataaaaggagttaaaattcaaaatatcaaagacctcacctatcggactaaacataaatcttaaaacctcctatggtcctctgagcctaaaattacaaaacttagcaactgcttaaaccaaggaattaacggttctgtgttttcaaggtaagaaaacaaaaaatgctttggtaaactacctttaatactagtttaaatgtttctgccttgtttgtatctctcttgaaagactgtatataagtacaggcacagcatatatttgagaaaacatctcacaaatttcatttactataggtttctcaataatctttacatttaatcaatgagaaaagtgattcagtctcttgaattttaagttaaaaaaattaaaaagtatttccagggactcttaaagctctctcccaaagtataaaatattatgtactttcaaaatcttaagcattcacgttctttctgagaccaacgcaggatacaaacttactctcaacatagatgcttatgtgcttttgggcacacatagtcttagaacagtggtcaaacagctcacaggaccctgtactcctcttcatcctggactgtgacggtggccacagccagaccagccccctcccatctgccttccaggtcagattccctggcatttattaagctgtcactcttcaatgggttcttccttgggggactcaagctcattcaataagtctttgccagctgctccggcttttgaagcaaagagaactgctccctgcttaaaaccgaggttcttcaaactccgggcataatctgcatatatagcagtgatgagtttctgtaaaccatagttaaggaaaagaagagtaaaaagggctgtgatgagactcttcacaggctcccagaagcaggaagggtgagtcgcgtctgctctgctggctgctcggaagggacctggtgtccacagcgggcagcacaggatgaacacaggagacttttcgcgggcagagggtgattcccggccatagtaggccatgtctcagtctgtaccatcattacctttcgtaccagctgagtccaaagcttctccttccagaagacccaaccaacatcctcccataacctacactcaactgaagattggaagatgaatgataagagaggagaaacttaacctgcatatcctcattccatttgaaagtctgagaggctggcagtttgggggcagatatttatttctgaatgttccctatatctggttgttgggtttttagaaagccctgtcctattggtttttttttatttatttttatttttttaaacagcctattgggtactctgtgctgatgctttgatcctcaaaatgcatacactgaaccagtcaccttcccagtgactaggtacatgatcttgagtaggctcagccttcagtttaattttaaaaaactttcagtgcagggctgggtggctcatgcctgtaatctcagcactttgggaggccaaggtgagaggactgcttgaactaggagttcaagaccagcctgggcaacatagtgagacccgggttactaccaaaaaaaaaaaaaagccaggcacaatggtgtggacctatggtcccagctactggggaggatgaggtgggaggactgcttgagcccaggaagtcaaggctgtagtgagccatgatcgtgccactcactccagtctgggcagaagagtgagaccttacctcaaaaaaaggaaaaaaaaaatttttagtttagttttaattctctgttaaaaaaaaaaaaaaattataaacacacacagagaaagagggagaaagagagagagaaccaagtacctgccatgtagaaatgagagcaaatgtaagaatttgaagcaaagtgcagtgagcagcagcaggaccatgcaagcactggcccagtttcattcttttctggtcctgggagttgcattctcaagttcattcttttcaaagaaaccaatgttgctcaagtgccatttagaagaaataaaatgttctggctgatgggtggattatagtggctggcctgagcaacacctctctttaagtgctgtattttgtcccatatcatattgtcactagaggtgatcgtgagacttttttagttattccagtatattttttctagataaatatataaaatttattccatggaatgtctggtcttgaaaaagtactatttcaaagtaccaggtccttctacctgtttcccaaatcattccttcatcttctttttaagttcagacaagacttgggggccctgtcctctatagtccttcctgcctccctccatcctagtcaaagctgacacccatggtgcagccaccttcttatctgattctttgtcctctaatttctccctctttcctggctttggtgaatcagaaaatcagaacatggatctttcacaatataatatagttcctgtccaggcagcacaactaagggaaattccaaaacccatgcatgtcactttcttcctcgtcactacaaacaaccttgcaaaggatatctgtgtcctcagtgacttcaaatgctccatacttgaggcaagcttccacaaataaggctgctctatcaaagtatctcatgctgctcaacagaacaaaacaagagttatgctttgtgatttacatcactggtgggcagcagcatcgaagggtataaagacatttacacattttccctggaaacctgcatactgcattaagatacaagcacttttctaagccctagtttgttgaaaaaaggagggaagaatactcacatctccaaacacaagctttttaaaattaatactttaaaaaattgtgaaatagtttaaatacacaaaaatctacagagatatgacaagtgcccatgtacccctgtccagagttgacaagtaatcttttgtcatatttccgtaatctacctcccttagttttgaataaatgaaatgctccacaattagtgatggttgttcctcttccagattttcagacgggatgtctccacctcaccatgccttctgtcgcctctccccctgctctctgggcctcctctcagttgctctagtcaaagctgaatggaccccaattctctgaagacttttaaattcccttttactaggtgcctgttaagtctgatcagcatattagtaggaaactagcatagctcctagaccgaatgaagatgtaatgaatacggacagttccattctcctttgggttttttgacaaacctgaaatgtatacttctcctttcactttacacatcgagtaccatgacctgctagaaccgcgagagaacatgaagtgactgctcacgggcaggcctgagcagcccatgtgaactctcggtttacctgtgaagcgtctctgccacgctaaaaaagcagcccagagagaggagaaccaggagagcctttgatttctgattgacttgtggagaacaaaggtggtcaacccaccgccttaaaacatcggcacactcctcaggattcaaacggacctgagaaagacgcctgtgttaacaacaaaaacatcctgcactctataaagaaaaaataataattcagttaaagtgagatctgtttctatgaaatacaggctaggctctgcttgactagcacactgccctgaagctgctgcatactctgaataatgataacggtctgtgcctacgggacccagggcctggctatacctctggactgtagtttcggctcagactctgggagaaagaggaggcagctgcttttacttaattgctaccaatgcaagatccatttttaaataagtaatgcaatttacactcataaagaataggaaaaggataaaggttccaagacagtatttgcaaagcagctttgcaggccaaaaaatgtttctaagtcataagtccaaagttcaggactgagctttctatcccgaatgttgagggcacctattgaaacttggaaccacctacttttgccagccatgcagcccgattccactcgccgtatgtctgcaggtagcggcaggcgtctgcagccttatctatcaggcagagcaactgaacgccctctgaaagacaaaagcgcatccccttaagtgacactgcagctccttctttgagaagtcattaaaaagttaaatccccatttgaccttatctagtcgtgcccattttatacctactgaagacattcttgatttaaattctgaaacataatattaagagttttactgttattactcaagtaaccagggtaggaagcacaatacagtctggagaataagtagggagagcatagttctctcacaggttttattgttctgatttgcctaggattgttggatttatgcctattatctcagcaattattaacagtgccccctttcactctgaaaagtgtaaacaattaattctggtttagacaattatattcatctgatttataggtagcaataatttttctatttttcttcagcatatgtaaaagagaaagaaatgtccctactaatcagatactttgctgggaacaaggtctcatttttcagagagatgacaaacatatcaagtgtgccttacctgccaatttgccattggcaatcatattcgttgccaccaacttaatggtgctctgagaggggcctgacgaggtgacagtagtgactaaacaggctttcagtgaatcacagtaataatgctggttatctgcacttgtttccaacagcaactgcacagctctgtctgtctagtaagagaaacggtttttctaattatgagaacattttcctccaacataactttttaaaattcataaggtagaaaactaaaggaaaacactcattttcaaaaaatgcaattgaatattttgtttacaaatacaaacattaaacagaggtgctacactacttttttgagacaaacataaagccagaggctggtgtatctaggtgctcgagtaattgcctattttagctttgtaccagtcaattcagacacaaaaacaaaacaaaacaaatagctgggctccactgggcattatggaagtctaaattacaagctggttaaccatatgttttttctcatgaggtttattggtattattttgaaagaaagcctaaactgtctacagggaaggaggtacatacaaggggaaaatattatgaaatatatacatacagatatattgctctgaaatacgaattaactagcaatttaatgaagcatgtagagttataaaaactgacatacttgacccaagagcagtagctggtctgtacatttccttgtatgatcataagttgaccgtttcacttcctgtagattaaccctttctagctgaaatttctagaattggaaaaaaaagaaaaattaagcctggattataagagtttggaattatttaaattttactgtacttaataagatcattttaataaactactttgacttttcaggttactagataatcaactttacagcaccccaaacatttaataagaatttgaacagcaaaaatgttgatagatattatcacttggatgcatacctgcctgcctacagaaactgacacttaagtagagccggatgaaaaacctatgtgcactgaaggattctgcaggaggttaaagaaattatcatgtgaacagcaaattcaaaccaagtgtataaagtatttgttatttataggaaattaatgacagaattaaaatgaagccaagttaaaaatgtaagacaaattaaacaagcctgtttaataataaaattttaatgtttagtaaacaacgcagtaactgtctatgagcttttcaaatcttgatcaggctttttttttaatgcaaatgtaccgagggcttctttcttttctttctttttttttttttggagacagagtcttgctctgttgcccaggctggaatgcagtggcgtgatctcagctcactgcaacctccgcctcctgggttcaagtgattctcctccctcagcctcctgagtagctgggactacaggcacgtgccaccacacccagctaattttcaagggcttatttctattactgaacagtaacttagtttgaaagtttcccaagtttaagatattgacaaagatataagtaatcaagatgacagctctaaaggttttgctgtgtgaagcagactacctgaaagtaggcattttcacagagcacgtcatagcatatatccagtgggttgctcagtttgtctcgaggagcagcttctttaggagctgttgtgctggctgacttttcctgggataagctgtgcaggtagtgggcagcgacagtccagaagtgcagctccgattcatcaccatagagcctggcaaggatgaagcaaagttttgactgcactcagcacacctggcctggatggcttcctagagtagactgagggactggaagggagtgttgtcacatatccactgggatactggcatggggcctgacagggtgaaagggggaggcagcaagttctcctgccctgctactgggccttcaacaatacgggggcctgactgcacaggaccccttcagactccagcatctttctgttctgtgttaagaacaattatttacctggtttgccattagcacacctttcaatgtgggccattgattcacattaggaagaagttcctctgggataactggctagataaggtatgaaagtaatgtgctatttattctgtggggagaggagtcttttttataagtgacaaactctactgtaagtcaggatatagaggttatcgcttctaaatataatttattggtatatttaaatatacctgtatctgatattttaaaacacatattttaaaaagctgtaggaggaagtgctttccagagagaaggcctagatctcacatttaaaatgcaatttgatttttccctatttgttattactactgtcaaaattattttaagttaaatctaaaggatgaactgatacatttttctaaaatctaagtgtttctaactaaaaacccttaaaagaaatgagttaacttgaaatcctgtctcttatacagaatacatcaaacaatattaccttgaaacaagcaggcacctctgcaagagagtgaattctggatcaagcaacagtttctttatgtcactgtggaagaaatccggacaaaagtgagacaaaagttttcaatcaaacaataaagcatgggggttgatcaatatactcttgaaatgaaaaattccagtcaaataacatgtttagaatttacacaagacaaggtactttaccatgaccctgaaattataaaagttgaagggggctgagagtgttctcaaggcttggagaagcagcagctttcagccaccacagggagctgcagcgctctcatttctggtttataggcttacaacagtttttgaaagtattagctgcctaactactggaacaagaatgccattgttgaaaaaatcatcaagaacagtaaatactttaaagaagatgacattcgtaatttattctgaaactattccaaaaataaagtatctaaggaagaatggcttgtgcttttataagttcgtatttctaaaatagtaaaatactgaatattcacaaatcagaaaggaagacattctttaaatctatagtttcccatttaaacataaatgttaatctttgcatagaaaaaactaattattttgaattttccgtcaataaaatatcatgcttaatttgttaaatactataattatatgtaacagattctagattgcaaaaatgtgttacgctttccccaagaactccttgtagacccatattttttcctttcttattcccagtacattctgttaaatgcccttggctctagggagcacattaatttcttagccagacctgtgcacaccagcacctgacacagagaactcattttagaagcgggaagcagacccagaatcaccctgcgattcgtctcccgctgtgaggcttcatggaggtttgtagtagaggcaagctgagctacaaggatgctcccactatgcatctagtcctgccttgatgtgagatcagagcagctggtgctcatgaacttggtgaagacagatgctctgtcactgtaactactgaataagtactttttctgcaaaacacagactctaacgggaagcaaacctctaaacagaatggtctcttcttgggccactaatattttctaaaacgtaacttattttaattttgaattgcatttaaagttgaattgcatttttctttctcatattcctatcttctaatgaaacatggagtgcttacttagacaatgaattcaactgttcttggaggagattctttatttc

SEQ ID NO: 10871 - DNA, 218 bp, Homo sapiens
ttattattttttgagacagagttttgctcttgttgcccaggctggagtgcaatggtgcgatctcggctcaccacaacctctacctcctgggttcaagtgattctcctgcctcagcctcccaagtagctgggattacaggcatgtgccaccacgctgggctaattttgtacttttagtagagacagggtttctccatgttggtcagtctggtcttgaac

SEQ ID NO: 10872 - DNA, 4045 bp, Homo sapiens
aggaagctctatgcagaactgtgccaaggcatcgtggacatagccatttccagtgtcttcccacccccagatgtggagcaacctcagacccagccagctgccttcatcaagctgtgacagagggcactccctgctgccttggaaaaagcacggggtcctgctccagggaatggtgaaatgactggattgctctttatccagcccacagcaggggaaagaaaggcaactcgcaaagatgagatggaagaaggcacgtgagcagaggaggcagctcccaaagagagggctgctcagggggcttcccagatgtagctctcagcagtgctgttgagacttttgaaaacaactttggtacacaaaggcagctttgtgagcagagctccttcccctctccccgggaacggcagggcactgggacctctggtcggtgcctcccacccactgcagccctagtgccttagctccatgcccggctgcagccccactgctctggactatggattggacgtcagagcatattggaggttgcctgtgtgttccccacccatcccttcggtaacactctgccacactaagctctgtacaagcatgcaccaacagtccttagttttgtgctgtgcactggcctctcggcaaaggtggtttccctcatcaccttcctgatggtgtttggtcagtcacctgtcagggtttgtgcgggttgggccccaaaacagcatatgctgctctaagtctgctctctgcatgttttagaaacaaagtggcaagtctgccctgaacctgtaagcatcaaataagcatgagagagaaaaaaacatgatatattgctttacttaataggttgaatatggtaggtctttgaaaatatgatgattcaattttctcaattttctttgctttaaccaaaattctaaatgcagttttgcctagttccctttttttttctttttttacttttttttaaacgtttgtaaaaacctctttgaggatgaggagtcagtaaaattccactccccaagtggccctgccccagacaaaggttgctttccccctttttgttctttttatgcccccaagcactttctgcagtagctagagggacaggtttccttccaggaaggattcgagttcctgtgcctgtgggtattaggagagtatatatcctgcctgaatggggaagtcttctaaaatgggaaagaagtggtttcatctccacacagtgtcttgtaaatctcaacaaatgtgtactgttagaagtggcttccgcttactggattaactaatactttataggcttttcaggaggccacatcactagcagtagggagaacaagatgtcatttgtgttcagtgtaagctgagtaaacaggcccttcctagagtgtcctggaaatcacagcaacccattgaaaactgccctccccaccagaacgtgctacgttctttcttcatgcctatgtgtgctccattcctcatttctacttggctcaagaaaacatttctgcagtcaggtgagacttttacaaaagaggagaaaatcaatgcctccttgaacatgatgagatgtgagaacttacaatgaaaaaggcaataatgatagaaattatttcttaggtacagcaatagttgataggatgtgagggtgttaccttggggtgaagtggagaaggtcccaggtgaattggctctcatggaaatttggaattacaaaataaacgtcctgggggttacccagaatacagatttaaaagtttgcctgtagagcaaaataaaacagtcagttgtagtcattaatccttgaggcccaacgcagccgatgggttggtgtttgggaaattctgagatgggagtgagatctgatcggatcctgggaagatgtatacccagttagaacgtgtagggttctgggtccctggcaagtctaggtgggcgggtgacagggaaagcatgggcatttttgtattgctgtcacatgctaacagaggtttgtaattatcttttggacccaaattatagagacattcacgagttttctagccctcacagtaacagagctaagaattcagatgtcaggaagtctgtgaatcttgatggattttctgagaaacctgactcaatggcatatataagagggaagtaagacttttaagaaaagaaaaagttatgcctcattcctcatgtggcttccaataagtatcttaggaacttatttcctttttaaaaaatattttttaaatttttaaaatttgattttaaatttcaaataaatttaaataaattttaaataaattttaaataaaattttacagagacgtggtctcactgtgttgcccaggctggattgcagtggctattcgcagttgtaatcatagcacactgcagcctcgaatttctgggcttgagcagtcctcccgtctcagcctcctgagtagctgagactacaggtgcacaccaccaagcctggctttatgtatttatttctgttcatgcggaatgattggttcagaactgttcctttcccttccatgatgtccttgacacagaaggttatgcctggctcccagtcaggcttcatacttttggtccatgtaagtgctacccgttgctgggggaggagtcatggtttatttggaaatgtcagttgcaatcatggttctgtcatttgactgcacagtatcagaggagcctgttaacctctctgtgccttagtttcttagcccatgaaagagatcattgcctgacccagggactacctcaagggcttttgatgaggacaagtgacagtaggaagatgcaagagcctttagtaccaaggttctcaacactgactacatgctggaatgactgtgaagcttttaaaaaatgttagtgcccactcttcccctgtacccccggacagttaaatcagaacctcagacagcaatatgccttgagatgccttgaaccatgcttgagaaggaaggacaaacacattattatcttggaagaattgcataaggcttatgacttaaaaaaaaaaattctttttggaaacacaagcatttctttaaggatgaccggatgttgccgtatgtatttatggcacaagcaggtgttgtctaagcagtttctctgtttgcttgtcatagcagcatttggaaactcaaacatgctttcatttacataaatagtttatgaagctttgacaacaaatgtaaacagacacgaaattataaatctgctaaatatgtattaagggtattaattattgaaagtccctttccccaaaactcaactcctatggcaattatgaactccattttaccaagaacatttaagtgcctcagcatctgtatgatatagtggagcaggtgctgacataggtaccagctgacatgatgtgtcactagctctgtgggatgattgccacatacatggaacacctgggagtgctggaaatgtactgtgatcgaagtgacaaagtgtgttttcattcacagtggaggctacatcaagcaaggggaggtccagccctcttgcaagtgtggtgagaggctctactagcaaagacatgggcaccggagtaggtcccgtgtagcatgcgggtgctgtagagaaaattcagtgacgtacatggctctggttctggacacaaaatctgtactggagaggaaatgactgctgaaataaggcgattgtatgaatatttaaaatgcctggaacactaaagtaaagtaatgatatttcaagtgtttttgtgctctttggttcttgttgtaggtattgactgtcctgggatatcactggtcatttaaattcaccatataattagccgggcatggtggcatgtggtggtggctgaggtgggaggatcgcttgaggctgaggtgtgaggctgcagtgaaccatgttcacaccactgtactctagcttgagcaacagagcaagaccctgtctcaaaagtaaataaataataaagtaaatataaatccatgatgccgttactcaggggtagacagactttctgtaaaaggccagataataaatctgctaggctttgcaaacc

SEQ ID NO: 10873 - DNA, 809 bp, Homo sapiens
cctttagcttggagtagtttgatcgtctgaagccttctcttaactcgtcaaagtcattctccatccagctttgttccgttgctggcgaggagctgcgttcctttggagggggacaggcactctgatatttagaattttcaggttttctgctctgttttttccccatcgttgtggttttatctacttttggtctttggtgatggtgacatacaggtggggttttggtgtgcatgtcctttctgtttgttagtattccttctaacagtcaggaccctcagctgcaggtctgttggagtttgctggaggtccactccagaccctgtttgcctggatatcagcagcagaggctgcagaacagcgaatattgctgaacagcaaatgttgctgcctgatcgttcctctggaagctttgtctcagaggggtacctggccgtgtgaggcgtcagtctgcccctactggagggtgcctgccagttaggctactcgggggtcagggacccacttgagggggcagtctgtccattctcagatctcaaactccatgctgggaaaaccactactcacttcaaagctgtcagacagggacatttaagtctgcagaggtttctgctgccttttgttcagttatgtcctgcccctagaggtggagtctacagaggcaggcaggcctccttgagctgtggtgggctccacccagttcgagcttcctggctcttttgtttacctcctcaagcctcagcaatggtgggcgccctcccccagcctcgctgccaccttgcggatggatctcagactgctgtgctagcaat

SEQ ID NO: 10874 - DNA, 381 bp, Homo sapiens; identical to SEQ ID NO: 10857

SEQ ID NO: 10875 - DNA, 552 bp, Homo sapiens
tcatgcatatatactcttaacaaatgaatacttatcattgcttttttcaagcaacaaatatattactttagctctctcagagtaagattacaacaattgtggaacttactgggttttgtaggaaaagctagtttctaattaaactcttaatctatttttagtgctgagtacatattgagaaagtggaatatttccagtgggctgggtagaaatacttttcattgcgcaaccaacatgaaaggatgacttatttccatgccagctgtgctcagttttcctgaccttaatggaacatattatatccacctgctggaatatttactctaatggaataaagcacttggattctttccttgcctatattccaaagaggacagagtggaccaaaatatgtactcgttggtagcactataaaatcttcatgatagatacacttgacaactcttaaaataattgtctgtgccaatggggaaaaatgtgtataatacacacaacactatgtgaatatccacaatgcgcacatattttcatatattcttacatctttcttat

SEQ ID NO: 10876 - DNA, 1019 bp, Homo sapiens
aagagtgacagaatctgtttaatgttttaacaagatcatcctggttgctggatgaacaatacacgaaaggacaataaagggagaaggatgaaggccagatggagattgcatcagttagattttgctatacgagagataaccagaaaactccagtggtatacagtgataagtttttatttttgtgcttagagtttcagctgatctagggtggctctgctgatctcaggtggatttgttcgtgagtctaagggttggatgggggttggctgacctaggctgggcccacatttgaggtcatgaaaagtgtgtctttgatctcatgtggcttggccacaacatttttaaggcacccttctctgacttgcacaaatttttattcccatattataaatgagtaaacaagttctgaaaaatgaagtggcttgcctacattaagcttctagcaaattgaaaagctacttcttggatgaagatctcaacttcaaatcctccacaaaatgcttctcctaatgtctaatgccattgagatacatagaggaatgttatttaatatgtgcaataattttttgagataggtattactaccccattttatcagtaaggaaattaagaccaagaaagggtaagaaaactgtactgattcacacagcatattagaaacaaagtgaaaactcaaattcagtggcttgctaaattttcattgcctttttttttttaaaagcatgccactgctatctaataaagatcacatttatctaagcttgcaaggatccaggaactctcccaatgatgaacttaaaccaaatcccacatattccctatctactccccactcccaccccaggccattgggctccttttagaacctgcacagaagtgtctcctaatcttgggggaaattaaactgtctactaaagaaatcactagatgtctacatttcctgatcttaaaagtttgcagttattctgtcatgaaataggaagtgaagcaactacagttctctcttctcaaaacagaag

SEQ ID NO: 10877 - DNA, 122 bp, Homo sapiens
agtgctgcaataaacatacatgtacatgtgtctttatagtagaatgatttataatcctttgggcatatacccagtaatgggatagctgggtcaaatggtatttctggttctagatccttgag

SEQ ID NO: 10878 - DNA, 280 bp, Homo sapiens; identical to SEQ ID NO: 10843

SEQ ID NO: 10879 - DNA, 2312 bp, Homo sapiens
ttttttttttaattcctatctagtttctttcaggaaatttctccatgtggaaatttctcctgtttaatgatgtccacagaccagccttctaaagagaattcttattttgcagtaggctcactacagatttgatgatggaattatctgccagatgcccagttctccctttgaggatacacagatagactccagtgtcattagactatcttcccctgaaatgcttttactatggctcctgcacaacttcagggtgtgccacctaccagccatccagacaaaaagtcatgctgaccacccaggctgcagcagaaggaggagatgagctctgggcaagtatgaaaagatattgatggcaagaaaactccttttttccccaaaaatatgaaggttaatgataattattcttctcatcaaaatgtttttgtctccctccttccaggtaaaagtgctaatgcttttagaacttacaaaatgaaattggccataacctgagccttcttttgcactcatctggacttatggtcttcatctccaaatgagacaaacaggagagaatggaacttctgagccctaggggcagcattcacttgaaagtcaattacgtccaaagtaagacactcatgataaggacacttctgaaaaacagagtgaggtgtctgctttcatgggagtaaacctattacttccacttacaataataattctcttaacatctccttaatgctccctgataaatctcagctcctcctcaaccagctctaaatgagaatgacaaggaaagttgtatgaggccaagcagaatgagatctgtagctgcttaagagtggctgataattaacccttctctctcttccccaatcccagtgggtccatgacttttggacaataaagcacccaacctgtgacagcactaagtgattcctgtgccacaggcgggaagcctctcagtgaggctgtgcacttaacagtcatcccaatgacagggaggacagtcttatacacaggaagtttataatgaactgaatttgacaatggcagcctgttcatgtgcagaaactaagatcagtgcctggggacaggcagtcaacttttaaatattaaacagcatataaatatgtatagccttgacctgaacacttgagttatacgttctgaataattatcatttctgaaagactaagggatagatttaccaaattaaaatacagaatctataggatcatgatgttctgcatttatagcattacacgatcaaagccccatctggataaaaggcaaaggcaactttaaaaaagtccttagagattagatccttgaatctcatctgaagtccactggtttcattttcactatatgttacttcatataaatcgggtaaaaaattatagtcatgatcataagtagggtcttgagatgtggcaatcaaagcctaaagattaatacttaacttcagttttcaaactaagtcccacattatccaaactgaagcaatgagtcagagaaatttcaaaggttaaatgctactgactttaaaaaacataaaaccatttgtaccacatcattctaatctcataaatttaatgctctataaaagtaacagagatacgtttagcaatttgggaaaaccaacgagagatgtcatttgcattgcttttgagatgaaacgtgatgtgataatttaccaagactgatcattataaaataagtgagcaacaagatgagttgagctggaaaggaaagggaggagtgggtttttagatcactaactctgtgactttatggtccagagccacatcaaccatgtgagtcaaaaaactttcaccatttcaaaatgcctggcctgggaattgggggcaatttatttctattggtgtaattacctggatgtgattttaccagcaccagcaagagaataagatccagttttaggaaataatatggatttgttcatccactcccaacacagcttgcttgctcatcctaaaatgatactattgctaagtaatgtctaccactatcgacctattctttagctaaattactaattagtttagcatgtctggttattaaactgcaatggtgagttaaactgtaatgctttcaaaactaaagactggctagtggtcaggtaagctatacctcttgcttctctggtcgagtccacgaagcctggagaaaacaagatataaaacacaacaagaaagcagtaaaattttacaacatgttgctttagagaatgtatcacactgcattccgtgcacatgcagcttttctttaattcagaactttttccaaggcccactttcaatggt

SEQ ID NO: 10880 - DNA, 1859 bp, Homo sapiens
ctgaattccatgtttcattactgggtagaagttacagaacaaatggatttagcttattataaggagaagttttctaattgttagaatttacatatctgtggaatgaggctatttgtcaaactagagagttctttttcccttaaagatgtatagtaagagcagtgcgaacatctcacaagggatgttagatattcttctgtggatagatcttgcacatgatgacctcctgggctctcccagccctgtgattctgagatcacagtgcccatttcaggaatcctcactgtctagacccatccactaaaatgaatcatcatcttattcacatctaagccccattacaagtttattagtatcatccctttcagtggaaatgcgaaatattttattcagttatgctaatgtaattagctcataatgtcaaatgcttgagaagttgaggttgtagttctgctgggtatttgtttctcatgtcaaatatcataccatcagtgaaattgttcataaccaccaaaattaacaattagccccttcagcccctcttccacctttatcatatttatttgcttaacaaatttatctttttttttttttttactcattgattctgaatctccctctatttaaatgtatattctgtgacagcagtcctcaacctttgttgcaccaaggaccagttttgtggaagtcagtttttccacggacaggggcagaacaggggatggttttgggatgaaaccgttccacttcagatcagatcatcaggcattagattctcatgaggagcatacaacctcaattcctcgcatgtgcagttcataatagggttcgtcttcctatgagaatctaatgccaccactgatctgacaggaggcggagctcaggtggtaatgcaagcagtggggagtggctctgaatacagatgaagctttgctcattcaactgccactcacctactgctatgtagcccagttcctaacaggcttcagaatgggggatgggaaccctggttctatgagagcagaatccatgtatctttttgtaccactgaatcccaagcatttcgtgttggtacatttttctgtaagggaatccgtgtcttttgttggcttttaaaatggccacctaaaaaaatttaggaactactataagagtaatgttgtcaaaatcaaataccactgttgagattttgaatctgtgaaggataattgcattcttaatattttgtcttcccttccaaaatcatgctagttagtatttcttcatttattcaagatttcttttatgccaaatagtaaattttggtaattttctttatataggccataaacatgtattattaatttaatttcttggtattttttaatctactaatgggtctactaatgagctttctcaaaggaaggagaggagggaagaagaagggacattggaaaaggatatacagaatatttttatcagtctaggtaaaggttaacttgcctctggtaatctcatttttttaagttctttaagcatatagataattaagaaaataaattggctaggcactgtggctcgtgcctgtaatcccatcactttgggaggctgaagtgggtggattgcctgaggtcaggatttcaagaccagcttgaccaatatggggaaaccccatctctactaaaaatacaaaagttagctgggcatggtggcatgcgcctgtagtcccagctattcaggaggctgagacaggagaattgcttgaacccggtagaattgcttgaacccgggaggcggaggttgcagtgagccgagatcatgccattgcactccagtctaggcaacagggcaaaactccatctccaaaaaaaaaaaaaaaa

SEQ ID NO: 10881 - DNA, 125 bp, Homo sapiens
ctcccaagtagctgggattataggcatgcgccaccatgcccggctaattttgtatttttagtagagatggggtttctccatgttggtcaggctggtcttgaactcccgacctcaggtgatctgcc

SEQ ID NO: 10882 - DNA, 546 bp, Homo sapiens
gagtgcaatggtgtgatctcagctcactgtaacctccacctcctgggttcaagtgattcttctgcctcagcctcccgagtagctgggattacaggcacctgacaccatgcctggctaatttttatatttttagtagagacatggtttcaccatgttggccaggctggtctcttaactcctgacctcaagttatccgcctgccttggcctcccaaagttctgggatcacaggcttgagccaccatgcccagcctaattttctgtatggttatcataattactgctatcattggaagcttcttttttgggggggtggtagtcgggggattccccactatattatatttgaccataggccaaactagttgtaacaattaagaacaaagtcccttattatgatttaggtgtctcttattctcagctccattttgtgactatgattccaaattttaatcctatttgactgtgtggagtaaaccagtggtagagatggaattgatggagctcagaaacatgtaacggaaaagagaatcggccattttctcct

SEQ ID NO: 10883 - DNA, 105 bp, Homo sapiens
tgagacagagtcttgccctgttgcccaggctggagtgcagtggcgcgatcttggctcactgcaacctccgcctcctgggttcaagtgattctcctgcctcagtct

SEQ ID NO: 10884 - DNA, 368 bp, Homo sapiens
ggaaaaggaattcgctgaccccttgcactttgtgggtgaggctatgccccaccctgctttggctcacactccttgggctgcacccactttccaacaagtcccagtgagatgaacctggtacctcagttggaaatgcataaatcacccatcttctgtattgctcacactgggagctgtagactggagctgttcctattcggccatcttggatcagcctccttaagtagaaagtttaatccatttatcttaaagttactattgacacgtgagagtgtattcctgtcattttattaattgatatctggttgtttttatgttctttgtttcattctttcttattatgattgtggtttggtggttttctgtaa

SEQ ID NO: 10885 - DNA, 223 bp, Homo sapiens
ccacctatgagtgagaacatgcggtgtttggttttctgtccttgcgatagtttgctcagaatgatggtttccagcctcatccatgtgcctacaaaggatatgaactcatccttttttatggctgcatagtattccatggtgaatatgtgccacattttcttaatccagtctatcattggtagacatttgggttgattccaagtccttgctattgtgaatagtg

SEQ ID NO: 10886 - DNA, 650 bp, Homo sapiens
taaatctcaatataattctgatagctggaggatagtgtattttcaggtttgctggaggaaaaaaactggactttaaataattaagccaaaataattgtattaattaacttctatccttaatcactaatttcattttttatatttcccttgacttttgggggagaaatagtctttgtctcaaaagtgggctttagtgacctatgggtttgataaagcaaccagagataacgagacacaaggatatttaaatggcaacatgccagcaattattattagttaattggaagcttttatgattttggcctggggccaatgcttttcccctctgctgggctataaagtgggtaagggagaggaaaagctttgtttcactttttaaataaaagtattaagtaactttgaaatttttataaaattaaaagatagtaaaaacaactattctaactgaattcaaaacctgttatgcttcagtggagagattattcaagacaagtccatttgaaattgggagtaaatttctactggtgaagtttgtcagtgatagctatgcacttctgacaaaatacgaaatggggggtatgggcatgtcatatcatcatggtgcagatacgtggatgtgtgcttccaaacaatggcaacctaactcactg

SEQ ID NO: 10887 - DNA, 980 bp, Homo sapiens
aacctacagaatgggagaaaatttttgcaatctacccatctgaaaaagggctaatatccagaatctacaaagaactcaaacaaatttataagaaaaaaacaaacaaccccatcaaaaagtgggcaaaggatatgaacagacacttctccaaagaagacaattatgtagccaacagacatatgaaaaaatgctcatcatcactggtcatcagggaaatgcaaatcaaaaccacaatgagataccatctcataccagttagaatggcgatcattaaaaagtcaggaaacaacagatgctggagaggatgtggagaaacaggaacacttttacgctgttggtgggagtgtaaattggttcaaccattgtggaagatagtgtggtgattcctcaaggatctagaactagaattaccattggatccagcaatcaaatggtaatttgacccattactgggatatatccattaggtagaacccaaaggattataaattatgctactctaaagacacatgcacacgtatgtttattgcggcactattcaccatagcaaagacttggaaccaacccaaatgtccatcagtgatagactggattaagaaaatgtggcacatatacaccatgaaatactatgcagtcataaaaaaggatgaattcatgtcctttgcaggacatggatgaagctggaaaccatcattctcagcaaactatcacaaggacagaaaaccaaacactgcatgttctcactcataggtgggaattgaacaataagaccacttggacacagggcagggaacatcacacaccagggcctgtcaggggttgggggctgggggagggatagcattaggataaatacctaaggcaaatgatgagttgatgggtgcagcaaaccaacatggcacatgtatacctatgtatcaaacctgcttgttgtgcacatgtaccctagaacttaaagtataataataataatttaaaaa

SEQ ID NO: 10888 - DNA, 386 bp, Homo sapiens
ctgcatctgtatttatagatcatcttaagaactattcattttatgccacggagttatagttaatgatacacaactattctttggtagaactgtacctctaagccaatgtttccagttcctgcacttttcaaatgtaccaccatcttcttttgtttcttacatttaattataagccacaaaaaatcatgatcttcgtgtgtacctctggtcatctaccacatagtaagattgggatattggataaataaaagatatctccagaaaaaatgttcctatctaagatggagatactgttggtatgtttaacagtgctgtcttgaaggccattggttttcggagcatgacctgaggttagtcccctgacagagtttttttttttttttttc

SEQ ID NO: 10889 - DNA, 1728 bp, Homo sapiens
ttcaaggagaactacaaaccactgctcaatgaaataaaagaggatacaaacaaatggaagaacattccatgctcatggataagaagaatcaatattgtgaaaatggccatactgcccaaggtaatttatagattcaatgtcatccccatcaagctaccaacgactttcttcacagaattggaaagaactactttaaagttcatatggaaccaaaaaagaccccgcatcgccaagtcgatcctaagccgaaagaacaaagctggaggcatcacactacctgacttcaaactatactacaaggctacagtaaccaaaacagcatggtactgttaccgaaacagagatacagaccaatggaacagaacggagccctcagatgtaataccacacatctacaactatctgatctttgacaaacctgacaaaaacaagaaatggggaaagaattccctatttaacatatggtgctgggaaaactggctagccatatgtagaaagctgacactggatcccttccttacaccttatacaaaaatcaattcaagatggattaaagacttaaatgttagacctaaaaccataaaaaccctagaagaaaacctaggcaataccattcaggacataggcatgggcaaggacttcgtgtctaaaacaccaaaagcaatggcaacaaaagccaaaatggacaaatgggatctaatgaaactaaagagcttctgcacaacaaaagaaactaccatcagagtgaacaggcaacctacagaatgggagaaaagttttgcaatctactcatctgacaaagggctaatatccagaatctacaaagaactcaaacaaatttacaagaaaaaaaccaaacaaccccatcaacaaatgggcaaagaatatgaacagacacttctcaaaagaagacatttatgcagccaaaaaacacatgaaaaaatgctcatcctcactgaccatcagagaaatgcaaatccaaaccacaatgagataccatctcacaccagttagaatggcgatcatttaaaaagtcaggaaacaacaggtgctggagaggatatggagaaagaggaacacttttacactgttggtgggactgtaaactagttcaaccattgtggaagacagtgtggcgattcctcagggatctagaactagaaataccatttgacccagccatcccattactgggtatatacccaaaggactataaatcatgctgctataaagacacatgcacatgtatgtttatagccgcactattcacaatagcaaagacttggaaccaacccaaatgtccaacaatgatagactggattaagaaaatgtggcacatatacaccatggaatactatgcagccataaaaaatgatgagttcatgtcctttgtagggacatggatgaagctggaaaccatcattctcagcaaactattgcaaggacaaaaaaccaaacactgcatgttctcactcataggtgggaactgaacaatgagaacacctggacacaggaaggggaacatcacacagcggggcctgttgtggaggtgggggttggggggagggatagcatttggagatatacctaatgttaaatgacgagttactgggtgcagcacaccaacatgacacatgtatacatatgtaactaacctgcacgttgtgcacatgtacgctagaacttaaagtataataaaaatatatataaataaaataaaataaaacc

SEQ ID NO: 10890 - DNA, 331 bp, Homo sapiens
catgtcctttgcagggacatggctggagctggaggccgttatccttagcaacctaatgtaggagcagaaaaccacatgctgcctgttctcccttataagtgggagctaaatgatgagaacacatggacacatagaagggaacaacacacactgccgcttgtggaagggtggaggatgggaagagggagaagatcaggaagaataatggatacttattcttcctgaatcacccagggtgatgaaataatatatacaacaaacccgcatgacacatgtttacctatgtaataaacctgcacaccctgcagttgtactcctgaacttacaagtt

SEQ ID NO: 10891 - DNA, 96 bp, Homo sapiens
ccaccacgcctggctaacttttgtatttttagtagagatggggtttcaccatgttggccaggctggtctcaaactcctgacctcaagtgatccacc

SEQ ID NO: 10892 - DNA, 769 bp, Homo sapiens
gtatcccacaaatcatttctatcttgaacttattaatacttcctataaatcagtaagaaaaacacagatgaaccaacagaaaaatgtacaaaagattagaagagatactttacaaaagaagataacaaaatatcccacatatatttgaaaaaatgatccatagcatcaatcataagtgaaattccaataaaaccatgattagatactgtatatactcacttgaattgccaaaatgaaaaagacattatcaagttttggtcagggtatgaaatgattagaaccctcataccagtttgtagaagtgtaaattagtataaccacttcagtaattgtctcgcagtattcattaatcttatactttatgacccagtatttccacacttactcacacgccaatagatgtacacacaagcttaacaaaagatatgtactagattgtttatagcagcaatatttttaatatcctaagacacaaaactacaaaatggtcatcaaaaattagataaataagtcatactcacacaatataatactgtatatcattgagaataaacaattgacaaataaacacaaccatatggatgtgtctcagaaacataatattaaaagaaagaaacccagaaaaatagtgtatgtactgtatgattccataataaagtgaacctatgtgcaaactattctacttggtagaaatcagggtaatgattgcttggacattgggagatggtatcatgagtggaaagggggctttctggagtgttggtacaaa

SEQ ID NO: 10893 - DNA, 479 bp, Homo sapiens
gagaagtttggtcgtctgaagccttcttctctcaactcgtcaaagtcattctccatccagctttgttccattgctggcgaggagctgtgttcctttggagggggataggcactctgatttttagaattttgtttttctgctctgttttccccccatctttgtggttttatctacctttggtctttgatgatggtaatgtgcagatggggttttggtgtggatgtcctttctttttggtagttttccttctaacagtcaggaccctcagctgcaggtctgttggagtttgctggaggtccactccagaccctgtttgcctgggtatcagcagtggaggctgcagaacagcaaatattgctgaacagcaaatgttgctgcctgatcgttcctctggaagcttcatctcagaggggtactcagccgtgtgaggtgtcagtctgcccctactggggggtgcctcccagttaggctacttgggg

SEQ ID NO: 10894 - DNA, 393 bp, Homo sapiens
actgctgtgctagcaatcagcaagactccatgggtaggaccctctgagccaggtgcgggatataatctcctggtgtgctgtttttttaagcccgttgtaaaagcactctattagggtgggagtgacccaattttccaggtgctgtctgtcacccctttctttgactaggaaagtgaactccctgaccccttgtgcttcccgagtaaggcaatgcctcgccctgcttcggctcatgcatggtgcgctgcacccactgtcctgcacccactgtctggcactccctagtgagatgaacccggtacctcagatggaaatgcagaaatcacctgtcttctgtgtcgctcacgctgggagctgtagaccggagctgttcctattctgccatcttggctc

SEQ ID NO: 10895 - DNA, 440 bp, Homo sapiens
accgctcagctcaggacctgacagcgtcactcccaccctcaccaccacacacacaggatgggggactgctgctgctttccagcctgtgagcctggataggtattttgtgacccagctcctgctcagtcccatcgctgtccccggtctctccagggagtaagggattctccgtctgtggtaagttacctgtgactcttcagcagtttcctctgagcataattatatctgagagcacagggagctcctcattccatgtatttttcaaatattcaagatgtacaacgtgatgatttgctataggtattcattgtgaaatgtttgccacagtcaagcttgttgacatacccaccagctcacatttactgttttcgtgtgtgtggtgagaatactcacaatctactctctgagcaaactgcaaatatatgttattagtaactgta

SEQ ID NO: 10896 - DNA, 265 bp, Homo sapiens
tttgagacggagtctcactctgtcacccaggctggagtgcagtgactgatctcggctcactgcaagctctgcctcccaggttcacaccattctcctgcctcagcctcccaagtagctgggactacaggtgcctgccaccacgcccggctaattttttttatttttagtagaggcggggtttcactgtgttagccaggatggtctcaatctcctgacctcatgatccgcctgccttggcctcccaaagtgctgggattacaggtgt

SEQ ID NO: 10897 - DNA, 394 bp, Homo sapiens
agacagggtcttgctctgtcacccaggctggagtgcagtggtgtgatcacagctcactgcatccactagcttctgggccccagtgatcctcccacctcagcttcctgagtagccgggactacaggtgcatgctaccatgaccagctaattttttaattttttgtaggtgtagggtcttgccatgtttctcagaccagcttcaacctcctcagctcaagcaatcccctagctttggcttcccaaagtgctggtattaaaggcgtgagccactctggccagcaaaggaaagttttgttgttgttgttgtttgagatggagttttgctcttgttgcccaggctggagtgcaatggcgtgatcttggctcactacaacctctgcctcccaggttcaag

SEQ ID NO: 10898 - DNA, 440 bp, Homo sapiens; identical to SEQ ID NO: 10895

SEQ ID NO: 10899 - DNA, 265 bp, Homo sapiens; identical to SEQ ID NO: 10896

SEQ ID NO: 10900 - DNA, 722 bp, Homo sapiens
cagcatggtgaccttggcttccaggttgcccccttccagggtcgtgagggtcatgggtgtcaccgattccagattcatctcagggaactccctgtccaccgtcatggccttcagataccacgtccctgacacctggagaaggcccctctctatcaggctcaggccgaccgctccagagcctcccccttccctggcctgcagcccccagactctaccgcaccccaaaggctggagacggggaacattccccaatctaatccacccagaaaacacccagcaccctcgccaggtccacccgaaggtggctccagcccccacaagttggccaggaccacaggagccctcacccccaggagagaagtgaagtcagccagacccccaccttcccagctctgcccttctgcaccccggccccctcccagcccagactcctgctgtcccatctcaccatctttcagggcagggcttttacgcccaacccgaaaatgagggtctccttggatgggggaggcatggggtcttcatccagcagtctcagcctcgccccgtggcccctccagcccagccttcccatccaagcctcacatcctgaatctcctcgtctgaggccaggaggtggtgggcctgcagggcagcaatgaggccgaggctgacggccaggagcaggggcttcatctccgggatctgagtccacggccgcctgacggtttgcttgctggggc

SEQ ID NO: 10901 - DNA, 400 bp, Homo sapiens
gtcttttgggacatgcatggattctctaacatggaagtttgcatcaaaagcaatggcctgggtgtaatgcttagcacatgttttccacgctcattatgtcagtgaattcatttttctccccaagacgttcagccagatgcttccacctcaggtttttgggttgcagctgttattgctggtgtttaaactaggatgccctacctccctcattccccagaaatagatgtggttaaaggaggagtgggtagggtagtctatttgtgacttttgctgaaagttttgcccaggtatgggagacgttggtgggaaagaagtaggtctggagtcaaaggtgaggtagatgccaacaggagttggcacagagccaggtttgagagtgggagccacactgggcaagggg

SEQ ID NO: 10902 - DNA, 391 bp, Homo sapiens
aggacttctccacattggttattctagttatccattcgtctaattttttttttcaaagtttttaacttctttgccattggttcgaacttcctcctttagctcggagtactttgatcttctgaagtcttcctctctcaactcttcaaagtcattctccgtccagctttgttccattgctggtgaggagttgcattcctttggaggaggataggcactctgatttttagagtttccagtttttctgctctttttttccccatctttgtggttttatctacctttggtccttgatgatggtgacatacagatggggttttggtgtggatgtcctttctgtttgttagttttccttctaacagtcagggccctcagctgcaggtctgttggagtt

SEQ ID NO: 10903 - DNA, 722 bp, Homo sapiens; identical to SEQ ID NO: 10833

SEQ ID NO: 10904 - DNA, 560 bp, Homo sapiens
agtgaaggacaagtgttggttcttggggccacaaatcgccctcatgccttggatgctgctctccgaagacctgggcgatttgataaagagattgagattggagttcccaatgctcaggaccggctagatattctccagaaactgcttcgaagggtaccccatttgctcactgaggctgagctgctgcagctggcaaatagtgctcatggatacgttggagcagacttgaaagtcttgtgtaatgaagcaggtgagtgtggtttgctatggtgagtctctattgatgcacttatctccagtttacttacatacaaataatttatattttacagatttcttaatggaagtagctttgtttctaattataaaatgtgtaatttttatttgaaaaaatttttattggaaaaacctagatgattcagaagactataaaaaaaaataaaaatcactcaatcctacctctaaaggataaccaccattatagtgtatacagtcagccctccatatccttgggctcagcatctgaggagtcaaccaactgtggtctgaaaatattcagg

SEQ ID NO: 10905 - DNA, 313 bp, Homo sapiens
tcagccgggcgcagtggctcatgcctgtaatcctagcactttgggaggccgaggcaggtggatcacaaggtgaggagatcgagaccatcctggctaacacggtgaaatcctgtgtctactaaaaatataaaaaattagccgggcgtggtggtgggcacctgtagtcccagctactcgggaggctgaggcaggagaatggcgtgaacctgggaggcggagcttgcagtgagccgagatcacgccactgcactccagcctgggtgacagagtgagactccatctcaaaaaaaaaaaaaatgaaatatcacacagg

SEQ ID NO: 10906 - DNA, 150 bp, Homo sapiens; identical to SEQ ID NO: 10717

SEQ ID NO: 10907 - DNA, 297 bp, Homo sapiens
ctcgagtgcctctggagtgtataagaaatacgccaaaagcatccctaaatttagagctctgcaacatatttcaactggagagaaagggggtgggggagagaatatgtatataaaaacagtttttttttctgactctcactgtttctaggattttcaaacttatttttaaaccaatgggaccagttcttcttgtatagaagcctaatgtgtacaatagtaacaaaccaaaacccagagctgctctgacagaagcagaggtaaggaaccaggagttccagataggtctctgtggaagtc

SEQ ID NO: 10908 - DNA, 771 bp, Homo sapiens
gattattccttctcatctgctgcaatggctcaatgtgttaaggagaggagcgagacagcaagaactgcattcattcagtcatacagaccaaaaggaggaatgtcgcccagccccctaaactgacccagaacccagctcatgtctcaactgctacctctactacttagaaagaagtaactccaccaaagcagggttctggacaaatatatttttattgatcttatacaaatagatgaagatggacttggatgttaagaaaaataatactattcaaaatcaagagaagacagtcgcccctagacttaaattaagggtgtgtacattagataatttaatccaatgtatcaggtaaaaacttgaacaaatcttttggcctcttccgtaaaattcagggaagtatgtcctccacaaaacagaatcaaaatataaatgaaagactggcttaagatgaaaggaaaccttataaatgaaaagaagccagatgagagggacttaactgagaatgaaaaaaaactgagtggacaaaataattatgagaagatgaatcttcaaatcagaaagagggaaaaaagctcatttgatactatgggaactcaaaagagagtgaacacaaatgtgaaaattccaagagtacagaaaagtagcataactaaattaagagcatgagaaaatgtacacaattttgagtaataagaacagaaatcaaaagttagtattgtatgttatattttagtagagcaacactgaagacgaatgaaaacaagaaataat

SEQ ID NO: 10909 - DNA, 500 bp, Homo sapiens
aattatcctaacatgttttcttttttcaagactattttggctattttaagtcccttacaattccacgtgtattttagaatcagcttgtaagtttctagacagaaatctgttgggatacttgcagggattacgtcaaatctgtagttcaacttgtaaagtactacaatattaaatcttccaattcatggctgtaagatatttgctaattatttagatcttctttaaacaataatttttaattttcagagtaaaatcttatatcacattttccaaattaattattatttctttttttgatgctattgtaaattgaagtgttttcttaatctcattttagggttttcattgtagatgtgtgcaattgatttttgtatatttatcttgtatgctgtaatattgctgaagtaattaactagttctatcgttcagtggattccttaaaattttctatatacaagaatgttatttgcaaataaagttttatttcctcctgttcaata

SEQ ID NO: 10910 - DNA, 455 bp, Homo sapiens
tgccaccctcccccccatcaccaaagcatcctcctgcctggtcttgctgcttccagcccttcctcctccatgccagtgcccacccagccagagtgaccttcctcatacctcgcttcaaaccttttgttccctttagcagcaaggtcagcttccctgaccttcctcacagggcccatcctaaactggccctggctcatagtcaggcctctgaccccacagcccctgcccctaaccactgtgtttgttgaatacaactggatagacttctcccctacaggtctgtggtctctgctgaaatgcattcacatgcatggagacagggaaacagcctctgttccagggaagcaggggtaggggagcggccgagacgccagacctggctacctttgataagttgtttattttctgaagcagacagttctgataaagccgtcgtaatgatgctccttgatcca

SEQ ID NO: 10911 - DNA, 617 bp, Homo sapiens
aaggactccaggcatgtgccggtaaatgttagtaagttacattttcctagcaattttccatttcacttgtttttaaaattaatacatattttatacaatttattttttaacttcattgcagcaaagtcattaatgttatttattttttattgacaaaaattatttatatttatgtcgtacaacatgatgtttttgatatatatatatatacactttagtttttaaatgtgtgaataaggttcttcataactccatcataacaatgtttgtatttcttacaattataatgtttaaattcatattcctacgggattataaacttctttaggccaggcactagataaattctgtatatgccttagaacttagcacatggtagtcactcatgtacaaattattgagtgtgcaaatgtatgaatgaatgaatgaatgtccacttaaagaaaacaatatgaagctctttttttaatcttcagctcataagttgttttggtacacttttgtccttctcttatttactacttcttattacaatgcagaagttaaagcatgtaatttaggagaactttgctgcatttaaaggataattcaaactcattttagaaaatcattttatt

SEQ ID NO: 10912 - DNA, 417 bp, Homo sapiens
ttttttttttttttttttttgcattttttttttgttttaattttttttttttttattatactctaagttttagggtacatgtgcacattgtgcaggttagttacatatgtatacatgtgccatgctggtgcgctgcacccactaacgtgtcatctagcattaggtatatctcccaatgctatccctcccccctcccccgaccccaccacagtccccagagtgtgatattccccttcctgtgtccatgtgatctcattgttcaattcccacctatgagtgagaatatgcggtgtttggttttttgatcttgcgatagtttactgagaatgatggtttccaatttcatccatgtccctacaaaggacatgaactcatcattttttatggctgcatagtattccatggtgtatatgtgcc

SEQ ID NO: 10913 - DNA, 400 bp, Homo sapiens
aagctgtcagacagggacgtttaagtctgcagaagtttctgctgccttttgttcagctatgccctgcccccagaggtggagtctacagaggctggcaggcctccttgagctgtggtcggctccacccagttcgagcttccaggctgctttgtttacctactcaagcttcagcaatggcgggcgcccctcccccagccttgctgctgccttgcagttcgatctcagactgctgtgctagcagtgagcaaggctccgtgggcgtgggaccctctgagccaggcacaggatataatctcctggtgtgccgtttgctaagaccattggaaaagtgcagtgttagggtcagggtgacccaattttccaggtgccatctgtcacggcttcccttggctaggaaagg

SEQ ID NO: 10914 - DNA, 293 bp, Homo sapiens
gtattatattttcttttttttttttttgagacagagtctcgctctgtcgcccaggctggagtgcagtggtgctatctcggctcactgcaagctccgcctctcgggttcacgccattctcctgcctcagcctcccaaggagctgggactacaggcgcccgccaccacacctggctaatttttttgtatttttaatagagacggggtttcaccgtgttagccaggatgatttcgatctcctgacctcgtgttctgcctgcctcggcctcccaaagtgctgagattacaggcatga

SEQ ID NO: 10915 - DNA, 296 bp, Homo sapiens
aaagtattatattttcttttttttttttttgagacagagtctcgctctgtcgcccaggctggagtgcagtggtgctatctcggctcactgcaagctccgcctctcgggttcacgccattctcctgcctcagcctcccaaggagctgggactacaggcgcccgccaccacacctggctaatttttttgtatttttaatagagacggggtttcaccgtgttagccaggatgatttcgatctcctgacctcgtgttctgcctgcctcggcctcccaaagtgctgagattacaggcatga

SEQ ID NO: 10916 - DNA, 400 bp, Homo sapiens; identical to SEQ ID NO: 10913

SEQ ID NO: 10917 - DNA, 136 bp, Homo sapiens
ttttttttttgagatggagttttgctcttgtcacccaggctggagtgcaatggcatgatctcggctcactgcaacctctgcctcccaggttcaagtgatgattctcctgcctcagcctcccaagtagctgggatta

SEQ ID NO: 10918 - DNA, 6198 bp, Homo sapiens
gccaactcaggatgagaaactaaaaagcaaaaggggaaatccagggctgagaaattcctagaaaagaatttataactttggctgggagaaggttctctgagttgacaggacgaggcaggaacagccctcagccacacagcttgcagccccgagtactgtggagccatgacatctgtttgcccatttgccctgctcaccgttgtacatcctctgcaggtactgtgcatctgcaaggagagaatggcaggcccctgacagcctgggcagcccaggtaggcaatgggggactcaggacccaaagagcaataccaacggaatctgtagcccggatttgatctgtgagaaaggggcaggacagggaaaaagttaaccttgtaaataagtctgttctggcaatatgtcattagttggggagattgtatggtgtgagggtagggggtttgtgggaacactctgtacttcctgttcaatgttgttgtgcacctaaaactgctaaaacaaaaacaaagtctaattaaaaattggctgagaaaactacaacataaagctgttctgtggccacagagccctgcctagcatcagaagtggtttgttctaggtcaagaggaagactagatacgcaggacccaccaaccaaggcattgtgattgtaggagtcccaagagatgaaagctctcctcttctctcagaccttcagcacaacttttggtgttaaaattccttaaccgtgtacaaattgctttgcattctactgctaaagaacaagtgccatgcaaatacttagggaagagatagactctaacatatgaatagctgaaaacagatcttttcctaagaaaaagatttcatattctaagcttcagtttcctaatctgtgaaatgataacaatataatctgtctgatgcaatgtcctctggatcagtttgtgtttgttgttttaaatacagataggctctcgctatgtctcaaattcctgaacccaagcgatcctctagcctacacctctcaaagtgctgggattataggcatgagccgctgcacctggccccagatcagtttgaagtgagatctttaccaggtcaccacatttaaaagagctaccttcccctcctcaactctcaccagcatttcctagcacccttctttgttttatttttctatatgacatttatcatcatttccatatcatatattttactttttaaattctcttacctttctccctttggaatgtaaattccatgagggcagggatttttgtctgttttcttctatatcctcagcacctggaatattttctggcatatagtaggtcatcaataaacacttattgaatgaataattcatataacatcctcagcacaataccaagtatgtgatcctgttaacaattatttattttcttttcaaagccctgacaaaggtggcattgtcctgatgctttgggaggaccagtgtaaaactagttgtttggtttttcatctctgctccgactttcctcacatggaggtcctctcaggcttaagccaggtagaccagcagctgagctagcctgaaggcagtctctgaagtctgggcaaactgtcctggcttggctttctcaaatgaaaaacaaacaaacaacaacaacaaacccttttctctattcacacttctgatgccaaatgtgtgggtcatactgagcaattctccaattctctggggacaccaactgggtgctggatgtccactttacttcaattatgacactggttagcttgtgctgacagttaacacaagccccacagattaaggactcagtcccacaagactgcccccacttcatttgccaattgcaagtagtgggtctccaggtgacccataacttccggcttgcctacagatcaggggctctcacaatcccctaagctttcataattttctgcagtggctcacagaactcagaaacattctaccattactagtttattacaaaggagagtataaggaatacaaatgagcacacagacaatgcagtacctggagggaggtccaaaagggtaccaagtacaggagcttctgtccccatggagttggggtgcaccaccctcccaacacgtgaatgtgtccaccaacccaggagctctctgaaccccgttgtttagggtttttatggggggttcattgtgtagatatggttggttcaatcactggctgttagtgattgactcactctccagcccctctcccctcccaggaagttgaggtggggaatggggaagggagatatggctgaaagttctaaccctgtcatcaaggcttggtctttcaggtgaccagccctcatcctgaagctggctagggaccccaggtactagtcatctcattagcataaaaaagacagtcatcactctggagattccaaggttcttaaaagctcttgtgccagggaacagagaataagaccaaatataacaaatggtgctcctcttactcctatcattcaggaaatgatgagggttttaagacccatgtgtcaggaactggggtaaaagaccaaatatatattttttattatgtcagacagctataggcagatgattcaaggggcacagttatacctctaatgcctttgtgcaaattataaaaaggtggctccttcaggcccatggattgggaaaaaagcttttattcctctgggctgaaacatctctgagactggggagaaaggcagggctataattcagcccactgtcttccctccccctcggctggacactttagtgcagtacagagacggcacagctgtacctggggctatgggagaaagtggtactgggggccagggatatgtggaagaccaagtgcctcacccttactatgctcaccccaaggatgagactctttttctttccaactgcagtttaattgttgtagggtctcctcaggatgatgctcacctcttgatccttctccaccgtgccttgccctgttccaggcctgtggtatcaatacttaaactgagctgacctaggaagaatgcctttcttgggtgtaaagattgagcaagcaatggacagagccatttgaggaggggcaatgtgttgtcatggaaaggccacacatcctggaatcaactgacctggtatggtggcttgatgggtgtcaacttgatgaggctgaactgcatttcccagaattccctttgctgcgtgtttcccattagtgtggaccacaggagatattgtgtgaaagttggagggaagtagtgaagccacaaccattaagtagctcacacatgtctatgttggcatgaatctgctggctcatttgctgggtcctccaaacacatggatgtttttgccttcccagagctctccactgtgagagcacttgctgttgtgcaccggccccacctcctaatactccaccttgggattaggatttcaatacatgaatttgggagagacataaacattcagtccatcgcaaatctcttgcactcttagcagacagctaaataaaccaaccctgtccctgtccattgatcttcttctcccagttaaaataccagcattttctcaggatatttgaaagctagtgcttttactcaaagaaagagtatgggtagaacctgtaggcaccttactaggctagttggggaggtattttggggtggttctctcccaatcctaccatgagcagcatcatatactttatttggattgataataaaggtgattatttgtgaccttattaacagggaatataaatgcctcagagaaggcttccactgtttaaaactattttccaattttatgagttttctggaatatgaggttattcagagaaggagccctcttgcaactccctggcatcttaccctcagttccatctgcattttccactctcaacatccacgcataaacagccagcatccagccactctctccccttttatcctgctgtgttgtcaccctgtcctccctctgtcttgtcaaaaatgagcaaaggcatattagccaccctgggacggcttgacacggaaaaggtgtcctttcaaaatctcagaatgtcacgatgaactagttgagaaaacagtatgatggactgtactggcttctccaaagtcagcccctgtggaaaaatattgaacatttgactcattcactgacatttgggacagttaaatgggagaggaaaaaaaagaaaggaatgaataaattgcttctttttcctccataggtatctgattcaggcgccaaagcttatgaatcttggaatatagtcagctacaatcatgggttattctccaaatgaagagtccaaacactggcaaaataaaaagcacatttggtccatcacattcctaactataatggatgctgagaaatggatgcactgtaacaacccgcaagtttcctggtactgctgctgtcattgcaaaaccattgcaaagtatccatctcttgcctctgccagaaaaagccagccgttaacagaaactaaacccaaggtcacttactttcacataaagagaatattttggcagctgccaaaattcatttttctaatgtgcacttacccaataacttaagcttggcatcctgggcggaatccaacttgggtaattccattttcacaaccgaattcccccaaggagtttgagctgaacatcacattattcttcacttctccagctatcctctcagtaatcaaacgagtgcttttcatccctgaagcgtcatggaaatataggggtgggggttcaaaaaagggtttcttcttaagaatatagtgatgagaggttccgttatacgaacttagtaaagtcctttggaagtcaagactggtttcatttttttaattattatttatttatttattttttgagatacagtctcactctgtcacccaggctagagttcagcggcgcaatcttggctcactgcaacctctgcttcctgggttaaagtgattctcctgcctcagcctcctgagtagctgagattacaggtgtgtgccaccacacctggctaattttttgtattttagtagagatggggtttcaccacgatggccaggctggtctcaaactcctggcctcaagtgatccacctgcctcagccttccaaaatgctgggattacaggcatgagtcactgcgcccagcctggtttcatttatttaaccaacaggtattgaggtttgtgccaagtgctggtctcaatattgcaggtgcagcaggacataagaaaaggtttctgccctcaagaagtaaatattagaataagtatatgaaatagggctggagagagacacaggaatcagaccattaaggccatgatatggagtttggatattattataagtacagttggagagtattagtggagtgatgatcagattcagggtttttaataagatcactgtgaagaggaagagccattgtacaggatacctgtggaaccagggtcttaaccttctgttgttttccattggaatctaaccattctaggagtcaacacagctatggccagattttcctccttgccattcttcaaacagccttggattctcggtaactcaagaaccaaagagtccaaagccatggtttgaccacatggatcatcagcaccgctccacgactgatgctgctttcccttcttctctagccagctgtacttcgtgagcttcctttggtcattcaggacaccagaaacaaataaactaagaagcattagttcatctccatgagctgctccaagagctttaaaagtaggtcagttgcaaagtccaggagcagaagtatgtgtacatatatgagacttattaaatggtggcattctgggaagagcatcaccactgataaagaatcattgaaactttctatttctgtgaacagtggtaaatataaatcttaaaatcatagaatctgagagtggtagaggacttcagtgatcatcaagtccaacctcccacccaaggtaggattattctatgtggccctgacagggagtctaatgtcctatatccctcccatatcacataaaaacatcagaggagtcagtttaaatgcacactgttctgttggctagggaaggccatcgactgtgacatctattgcccaaagttgcagtctgaagggccaaatagcagatagaaaaagttatgtcttaaagaggggtaaaggtcacaacctagaaggagaacaccaaa

SEQ ID NO: 10919 - DNA, 965 bp, Homo sapiens
ggcactacaggtgcgtgccaccacacccagctaatttttgtatttttggtagagacagggtttcaccacgttgtccatggccaggatggtcttgatcttgaccttgtgatccgcccgcctcggcctcccaaagtgctgggattgcaggcgtgagccaccgtgcccggcctgtcctctgtggttttctgggcttatgttaaaattataactcaatcaccagtctttataaatttgcttttttatatttaaaccaaacctaatgctaattgtgatatgttatttattctcacctgatttgaatcattggattcaattaaatgagtttaattatcattaaataattctaagagaaataatgtctattcggatggtgggaattttctttctacatgcagccccattctgaatgaatgaaatcaaatcacgtgaagatcagggtcctagagtaacttaatattttgtacattggttatttgactcctcatttttatattacatgttatatcaagggagggggcataaaagaaatacaaaaattgcagaggtatctggaatgtacctatttgttaattctatttgtcctttcttttgtttcatcttttgagtaataagctgcttggaaaagtttctgttctttagctgattttttagctataaaaatgtatttgaaaagctcataaatttcaggattgaaaagataattgaaagttttaaaaaaacctaattcattgaagtaataaccaaataattttcaatcttgattcaactgtgattcaaatcttacaccatttgcccacttctatgaattttatgtataaaattttttaagagtcagagttttttttcttgattaattggatgtatttcacagaatttccaactgctcacgttagttttcttccttttagagttgatctctctaatgtattagatcttcatgcctttgatagtctctctggaataag

SEQ ID NO: 10920 - DNA, 1173 bp, Homo sapiens
gacatttaacttgttctcacagcttggctattgcaaataatgctgcaatgaatatctcataagtctcgtatatgtccatagaagatcatgaaaatggacatgtctctgggtattttgaattggtgggacaattttgcttaagggtaggcatagtgggtggctctacatttgagagttctaattcccattcctatatatatttcttttctttttatttatttatttttttgagatggggctctctgtcactcaggctggagtgcagtggcacaaacatggcttactgcagcctcaacctcctgggctcaagtgatcctcccatctcagcctcccaagaagctgggaccacaggcatgtgtcaccatgcctgactaatttttttttttaattttctgtaagcatggggtcttgctatgttgcctaggctggtctcaaactcctgggctcaagtgatcctcatgcctcagcctcccaaagtgctgggattacatgtgtaggccaccacacccagccttatatatatatttctaattttgccttagccatgcccttaaaaactaattctactttcaactagttttttttttttccaccttcagtctgtagtattgttcacattttgaaaacaatacctacagtaacctgtgaggtaggacatgatagtgttttattggaccccttttactttatgaattggaaaaattaaatttgcatgtagtttgtaaaaaaaaaataaagaaagaaagaaaaaagaaattgattgagattatttcagcagccagaagtgtgggacaggcagggcagttattcctccttctcagtttggaaactgaagctcagagagtaaacttgtcagtgacacagttattcaagaagttgtcttcagttgagagatacgtttttcacctgtagcttctggtattggaacagtacctttttagactaaacaaattacggttaaaattataaaggtattttcggagtacctggaaaaaatcagcattttgcttttctagttccatttagtaggaagacaggaaagtttggtatacctgaattacatgtgagttatttctatttttctaaaaattcttataaattgtgtaaggtaaaaatgactacttcttgttttatggtaaatatagttatatcctttcaagccactgctgtaca

SEQ ID NO: 10921 - DNA, 149 bp, Homo sapiens
ctgcacccactgtcctgcgcccactgtctggcactccctagtgagatgaacccagtacctcagatggaaatgcagaaatcacccatcttctgcatggctcatgctgggagctgtagaccagaactgttcctattcggccatcttggctc

SEQ ID NO: 10922 - DNA, 449 bp, Homo sapiens
tttaaggctgaataatattgtgtgtatcaatcatatttgcttatccattcatctgtagatggagatttgggctttttctaccctttggctcttgtgaatgctgctataaacatgggtgtacaaattcccactttcagttttttggggtatatacccagatgtgggattactggatcatatggtgattactgttttccacagtggctgtgccatcttactttcccaccagcagtgtgcaggagtcctgacttctccacatccagcatttgctgttctctggggctttgttgttttgctttgctggtggggtttttttgatggcagctatgcttacatgtgtcagttggtattgcattgtggtttggatttacttttttctcatgattagtgatgctgagcaccttatcctgtgcttactggtcatttgcatatcttctttagagaaatgt

SEQ ID NO: 10923 - DNA, 84 bp, Homo sapiens
taatcccagcactttgggaggccgaggcaggcagatcacttgaggtcaggagtttgaggccagcctggccaacatggtgaaacc

SEQ ID NO: 10924 - DNA, 87 bp, Homo sapiens
cttgctgccgccttgcagtttgatctcagattgctgtgctagcaatgagcaaggctccgtgggcgtaggaccctctgagccaggtgc

SEQ ID NO: 10925 - DNA, 620 bp, Homo sapiens; identical to SEQ ID NO: 10816

SEQ ID NO: 10926 - DNA, 491 bp, Homo sapiens
ttttcttataaatctgtttaagttctttgtatagtctggatattagccctttgttgaatggatagattgcaaaaattttctcccattctgtaggttgcctgttcactctgatgatagtttcttttgctgtgcagaagctcgttagtttaattagatcccatttgtcaattttggcttttgttgcaattgcttttggtgttttagtcatgaagtctttgcctatgtctatgtcctgaatggtattgcctaggttttcttctagggtttttatggttttaggtcttacatttaggtccttattcatcttgagttaatctttgtataaggtgtaaggaagaggtccagtttcagttttctgcatatggctagccagttttcccaacaccatttattaaatagggaatcctttccccattgcttgtttttgtcaggtttgtcaaagatcagatggttgtagatatgtagttttatttctgagacctctgttctgt

SEQ ID NO: 10927 - DNA, 140 bp, Homo sapiens
ctgctttgtttacctaatcaagcctgggcaatggcaggcacccctcccccagcctcgctgctgccttgcagtttgatctcagactgctgtgctagcaattagcgagactccatgggcataggaccctccgagccaggtgt

SEQ ID NO: 10928 - DNA, 259 bp, Homo sapiens
cactgaggctggagggcagtggtgccatcttggctcactgcaagctccacctcccgggttcacgccattctcctgcctcagcctcccgagtggctgggactacaggcgcccgccaccatgcccagctaatgttttgtatttttagtagagacggggtttcaccgtgttagccaggatggtctcgatctcctgacgttgtgatccgcccgcctcggcctcccaaaatgctgggattacaggcgtgagccaccgcgcccgg

SEQ ID NO: 10929 - DNA, 143 bp, Homo sapiens
attacaggcatgtgccaccatgcctggctaatttttgtatttttagtagagacggggcttcaccatgttggccaggctggtctcaaactcctgacctcaggtgatctgcccgccttggcctcccaaagtgctgggattacagg

SEQ ID NO: 10930 - DNA, 391 bp, Homo sapiens
ttctttgtgatgggttcgaacatcttcttttagctcagagaggtttgttattaccgatcatctgaagccttcttctctcaactcgtcaaagtcattctccatccagctttgttccattgctggtgaggagctgtgttcctttggaggagaagaggcactctgattttcggaattttcagcttttctgctctggtttctccccatctttgtggttttatctacctttggtctttgatgatggtgacatacagatggggttttggtgtggatgttctttctgtttgttagttttccttctaacagtcaggaccctcacctgcaggtctgttggagtttgctggaggtccactccagaccctgtttgcctgggtatcaccagcggaggctgcag

SEQ ID NO: 10931 - DNA, 479 bp, Homo sapiens
ctttgcagcaacatgggtgcaactggaggccactatcctagagtgaattaacatgggaatggaaaaataagtaccacatgttctcatttataagtgggagttaaacacaagctcactctatataataagctcctaaaatgtgcaaataatcaaatagaaacagggacaaaggagattatgtaaatgttgttttagagaagtgaaaatccaaatggtcataaatacatgacaggatattcaacctcactaataatcatagaaatgcaaactaaaatagcaatcagattttaatcctcattcatcatattcacaaaaatgaaaaagcaatactttagaattagcacttatgctaggataggtactctgacattcttggttgaaatagataacatactaggtttttgaaagcctctggcaatatttattaaaatgaaaatgcatataccttccaatccaggagtctcactcctagttttttt

SEQ ID NO: 10932 - DNA, 714 bp, Homo sapiens
aacttctttgccatgggttcgaactttctcctttggctcagagtagtttgatcgtctgaagccttcttctctcaactcgtcaaagtcattctccatccagctttgttccattgctggtgaggaggtgcgttcctttggaggaggagaggtgctctgatttttagaattttcagtttttctgctctgttttttccccatctttgtggttttacctacctttggtctttgatgatggtgacatacagatggggttttggtgtggatgtcctttctgtttgttagttttccttctaacagtcaggaccttcagctgcaggtctgttggagtttgccggaggtccactccagatgctgtttgcctgggtatcagcaggggaggctgcagaacagtggatattggtgaacatcaaatgttgctgcctgatcgttcctctggaagttttgtctcagaggagtacccggccatgtgaggtgtcagtctgcccctacggggggtgcctcccagttaggctactcgggggtcagggacccacttgaggaggcagtctgtccattctcggatctccggctgcgtgctgggagaaccactactctcttctaagctgtcagacagggacatttaagtctgcacaggtttctgctgccttttgtttggctatgccctgcccctagaggtggagtctacagaggcaggcaggcctccttgagctgcgg

SEQ ID NO: 10933 - DNA, 714 bp, Homo sapiens
ccgcagctcaaggaggcctgcctgcctctgtagactccatgtctgggggcagggcacagccaaaccaaaggcagcagaatcctctgcagacttaaatgttcctgtctgacagcttggaagagagtagtggttctcccagcatgcagctggagatctgagaatggacagagtgactcctcaagtgggtcactgatgcccaagtagcctaactgggaggcacctcccagtaggggcagactgacacctcacacggcagggtactcctctgagacaaaacttccagaggaataatcggcagcaacatttgctgttcaccaatatctgctgttctgcagcctctgctgctgatacccaggaaaacagggtctggagtagacctccagcaaactccaacagacctgctgctgagggtcctgactgttagaaggaaaactaacaaacagtaaggacatccacaccaaaaccccatctgtatgtcaccatcatcaaagaccaaaggtagataaaaccacaaagatggggaaaaaacagagcagaaaaactggaaactctaaaaatcagagtgcctctcctcctccaagggaacgcagctcctcaccagcagtggaacaaagcaggatggagaatgaccttgacgagttgagagaagaaggcatcagacgatcaaactactccgagctaaaagaggaagttcgaactcatcgcaaagaagtt

SEQ ID NO: 10934 - DNA, 3456 bp, Homo sapiens
aagattgaagacattccagccaacaaaatgtccattgcgtggcagctaccacaatatgccctggttacagctggggaggtcatgttctctgtcacaggtcttgagttttcttattctcaggtaagtttttgcaaatagaaggtagaaattgagacattgcttgaaggacaatgaattttaattctagcactgacttaaataggtatgttatctcttttggccttgggtaccttatttatgaccctgaacatatatgacctgaacatcttaactccccaggtcatgacagtacagcatgggagtctatgattttggggttctaggaaagagattaaagattaaaatgaagagctgcagagtcagacttcccgtgttcaaattttggctgcatgacctattgtgtaaccttgagcaagtaaattactatctctgtaatgctgtcgcccaggctggagtgcagtggcgcgatctcagctcactgcattccagcctgagcgacagagcgagactccatctgcctccccggttcaagcgattctcctgcctcagcctcttgagtagctgggattataggcgcacaccaccattcctggctaatttttgtatttttagtagagacagggtttcaccatgttggccaggctgatctctaactcctgaccttggatgatctgcccaccttggcctcccaaagtgctaggattacaggcttgagctactgcgcccagtctgtaatactattttttaaatgtataagaatacgaatagaacttatctcttaggattgtaatgaagattatatgacataatgagtttaaatatattcagttaggagcttcatcttattcttactgtttacattattaacaccctctgaatcaatgtgatagctgaacttaataagagaagttctaacttggaagcttttgtgggagaagtttcctggatgcatggggcatgagggcagtgaagggagtttgtttactttcaaacttgtgtcatccccaggctccctctagcatgaaatctgtgctccaggcagcttggctattgacaattgcagttgggaatatcatcgtgcttgttgtggcacagttcagtggcctggtacaggtatggatctgagggaagcaggattcatttctactcaagtttttcctccagctttctcttctccctttcccccatctctctgcttcccacattccccattcagtgctgtgacatgaaatgggttagatatacagactttaccaggaaaatagacatatgtaagtggcaataatgactacaatatacctatgtgaggagaggccagtgaacccagtctttgtccagcaaaagtctggttaaactggtgatcccaggtcagtctgctccccactcctcatcctgtaaagatctctttagtttcaggtttctccatattcttctcatatttatttccccctgcagtgggccgaattcattttgttttcctgcctcctgctggtgatctgcctgatcttctccatcatgggctactactatgttcctgtaaagacagaggatatgcggggtccagcagataagcacattcctcacatccaggggaacatgatcaaactagagaccaagaagacaaaactctgatgacttcctagattctgtcctgaccccaattcctggccctgtcttgaagcattttttttcttctactggattagacaagagagatagcagcatatcagagctgatctcctccacctttctccaatgacagaagttccaggactggttttccagtacatctttaaacaaggccccagagactctatgtctgcccgtccatcagtgaactcattaaaacttgtgcagtgttgctggagctggcctggtgtctccaaatgaccatgaaaatacacacgtataatggagatcattctctgtgggtatgcaaagttatgggaattcctttataggtaactgccatttaggactgatggccctaatttttgaggtgctgatttagaggcaaaattgcagaataacaaagaaatggtatttcaagtttttttttttataagcaatgtaattatgctattcacaggggcctcaagaattggtatgtatgatgtgatctggtccagccagggcctggcttgtcagctctctaggtttgatatgactttagtaaatttgtcaatatagatggtaggaagcagaatgccattttattaaaacacaggagaagttatatctctctgattatgatagtattttatttacttatccaaaccctcctttctcagtatggatagatcatggaaaccagattagagatagtaagcattagtaaacattgttctggagaacaggaacaggtgtaagttgtagaaatcctgaagagccagtcattcttttacagagtacattcttcttagcctctatggcgctggtctatgcccttcagtgaacagttgtataaacaataattataatttgcaaccttgtcttgtcaaccttgctgatccagctttttcttattattacaccttgtcttgcttattgcagcaaatattcaataacaacaatgtttctataagtccaacttcctttattaatgtttccatttagcctcaaaaatatcaaagtagttcctttttgatgttgttttcctgatttacttttcccataagttttaaataccatttctgccttgaagcctagaaattttctttttattcaaaaaaagttacattaatgctctaggtttgaggttctaaaatggaaatgtcaatagaggagcatggtcctatgtgaggttcctatcaaaatttgtgggagtagggatggtagagcatgagggttttgtttgtgtatgtgtatggtcatgaaaaaaaattgagaaacattacctcatacacaatgaatgaatcagaggacagacacgggaatggcacgactgtgcagtgtgttactaggaaaaaagttcagaatcactgttctagagagcttcatttccattggttttaaaacattattctcatgtagaacagtgttgggtctcatactgttaatgttaatacgtaacaatgttcatgttaacaggcacctgttaatattaacagataatgttactgttaacaggtaagagaaattgctctaagtgcccaaactttatatacttcagttttaatgacaagcatttcagaagtataagagcggcagccagaccaaccagtttttccagatatcttgatgtgaacctgaccctactcctttagaagacagcctgttcatttttaaatagctttaacccaaactgttctatgaccattgtttcaagagacattaacacagttctgtaaatagaagtgtctatggacaaataagtttgggaaatgtggcatactgtatccttttcttaacatttgcatattaaagactctgagatatcctgcagtaaagacacaa

SEQ ID NO: 10935 - DNA, 434 bp, Homo sapiens
cagtggggccaagttagactttcctagcatttctcagatcacacctcacatatgtaagtaagcctgcttctttcttgaaggccaagcccctcccatcgccagcacccctctaaccaacaccacctctgggattccctgggactcactccaccatctccccaagaggtgcttcctcctctgccccacagcttcccagggtgggcagtcctgcagtccagcactctcccctacccagcctcttccaagtccactggacccatgacccctactgatattttcctgcacaaactgagtgctacctctgctgctgtgtgagatgtctcaaaccccgagtttccacctagagacactttcctctctggttacattgctttggagactcagtgattcttccctggttgcttggacaaaaccacccaatgtgccctgcccag

SEQ ID NO: 10936 - DNA, 112 bp, Homo sapiens
aggctgaggcaggagaatcacttgaacccgggaggtggaggttgcagtgagccgagatctcaccattgcactccagcctgggcaataagagtgaaactccatctcaaaacaa

SEQ ID NO: 10937 - DNA, 1860 bp, Homo sapiens
cagatctttgagaaacagcgggagaccaagaaacatctgtttggagggcagtctcagaaggccgtgcagcctccacaccttttcctttggctgatgaaactcaaaaacatgcttcttgccaagtttagcttttactttcatgaggctctgagccgacaaacgactgcttcagaaatgaaaacgttgacagcaaaagctaacccagacttttttggaaagatttccagcttcatcagaaaatatgatgctgccaatgtgtccttaatttttgacaacagaggttctgagagttttcagggtcatggttatcaccacccccattcctacagagaggcccccaagggtgtggaccagtatccagctgtagtgtctctgcccagcgacaggccagtcatgcactggcccaatgtcatcatgatcatgacggaccgcacatctgatctgaacagcttggagaaagtggtccacttctatgatgacaaagttcagagtacctacttcctaacccgcccggaacctcactttaccattgtcatcatttttgagtcaaagaaatctgagagagactcccactttatttccttcctcaatgaggtctcacttgcccttaagaaccccaaagtgtttgcaagtctgaaacctggagccaaaggttagcaggtgatttgcgtggaggggtttcaagactagaaactgttcttaattgccctaatgatctacggtggtctgtgaatagagtttacatccattcatgcctctttcagaactaaattaaagacaaatcctccctgtgttgcacactttataagcaattaaggccaattgaattaagtttccaaagagtaatctaggaagtggtcatgggctaccatgtgtctccatggtacagcaaagtagtttcagtattttcccctattttgctatatttcttgtagattgaatatttattgggcttttttttttcccatatgtttttctgttgttctaaacattgtgttctactgcaattccaaacagcctctctgtttccctccttcttggaagagtaatagggatgagatattaaatggcctttttagaattaagaactatatgttttctgtctcataaattagcaaatgaatatggagttagtagatttatgattctgatctacaaattaacatttttgatgccaaaattagggtcttggtaagaaatttctatcagttattgaaactgaaagtgagtcagattggtagcatgacgtaaggttttaacagttcagaagatcctcatggcagctttaatagccatgggttcttttggggtaatgtacacacctaactgcatttgttttgacttctttaatgtttgaatgtttcactctgttgtaaagtcagcataagccatcatgtgggctttcttcattcttcagcatattatccgcttcgctttctgtttatcacttttctgctgaaatgtacatgtttggctctactccttggttatttttaggcttaaaagcatgcagtcggtttttcagccacttttagatactcatgcaacatagcctacttttataaaatcaaaatgaaggtcttcatacgctgtacttgctaaaaatcaactgtgcgcttgaaagacctcttcatagttgagtaatcacctcagtacttaagcacttctgaacttgggtttcatgcctgccccccacaaattatgtttagaagcagcactgcatcttagcacatgctgccttatttctttccttcggcaggtgttcatgggaagtaggtggatcagtgaaggcataatgggctgtggagaccttcacttctagattattgattcaaaataaaaagaagccacaaagagtaa

SEQ ID NO: 10938 - DNA, 336 bp, Homo sapiens
atgtcaaagctactaatagtatgtctctcttttgctgcatatctattgtatgaacaaaaaggtctgagtgcccagcacccagccattgcttctctggtacccatctggatcttcctctcagacacaacagttgtaacttttttttctttctagttctcagaaatatttaacatttttgctttgtatagaagtataacatacatacaatatagtcgataattcttaaagtatagctcttttaatatatgtacatctgtgtaaggactaagatcagagttgggcacagtggctcatgcctgtaagctcagctacttgggaagctgagacagtagggtc

SEQ ID NO: 10939 - DNA, 489 bp, Homo sapiens
gaggaagttggccaacgacccgaacctggaagcctgtcccatttgcttagacagatgcatgtttccccgcaattccctgcacagatgggatagttccccaactgtagcaaaaggaactggagctgagactgggaccccttacactctgctgtaggatggaggctggtgagcttgcaccagtggcctacatccatgcttcccagtaatttcctgcatggatgggacagtttaccaactgcagggagaggggctggagccgagtctgggccccttcactgctgtgggacagaggctggcaaacccaccagggtagcccaggcaggcaagcttcccctagaagctccctgcacaggtggggcatttccctgactgtagtgagagaggctagagtagagagtgggatcctttaggacctgctttgggacaaaggctgacaggtccttcaaggaggctcagacagacaaatcattcctgggttgtgggatatgg

SEQ ID NO: 10940 - DNA, 929 bp, Homo sapiens
cagtattaccactctgaatccatatctcttgcttgaaatactgcagtgattagttttgtttctttccagtcttttttttaacctagccataatgtccaagttaccatttaaaaaaaagtttgatttttaactgacaggtagtaattttatatatttatgcaacacagtatggtgtatatttacacatacacatatacatatatacacacacacattgtataatgatcaaatcagactaattagcattgccatcacctcaaatatttattgtttctttgtgatgagacattaaaaatctcttctattttgcaatatataatagattattaactgttgaccctgctgtgcaatagaacaccagaacttatttctcccatttaaactaacttctcatctgttttaccaacctctcctcattctactcctccctactcttcccagcttttgataaccgctattctctgctctacttctatgagatcaaattttttagatttcacatatgagtgagatcatgcaatatttgtccttctgtacttggtttatttcacttaacatgatgtcctctaggcttacccatattgtgacaaatgacaggatttcattcttgtttatggctgaatagtatttcattttgtatatacactgcatttaaaataatccagcagggcgtagtggcttatgcctgtaatcccagcactttggaaggccaaagtgggaggatggcttgaccacaggccttcaagaccagcctaggcaacatagcgagatgccatttctgcaaaaaataaattaatcagacatggtggtgcatgcctgtgttcccagctacttggaaagctgaggtgggaggattgcttgagcttctgtggttgaggctgcagtgagctgtgatcatgtcactgcactccagcctgggtgacagagtg

SEQ ID NO: 10941 - DNA, 139 bp, Homo sapiens
gtaatcctagctacttgggaggctgaggcacgagaatcacttgaacccaggaggcggaggttgcagtgagccgagattgcaccactgcactccagcctgggcaacagagtgagactttgtctcaaaaaaaaaaaaaaaa

SEQ ID NO: 10942 - DNA, 695 bp, Homo sapiens
agctcagagaagtttgatagtctgaagccttcttctctcaactcatcaaagtcattctccatccagctttgttccattgctcatgaggagctgcattcctttggaggaggagaggcgctctgatttttagaattttcagtttttctgctctgttttttccccatctttgtggttttatctaccgttggtctttgatgatggtgacgtacagatggagttttgttgtggatgtcctttctgtttgttagttttccttctaacagtcaggaccctcagctgcaggtctgttggagtttgctggaggtccattccagaccgtgtttgcctgggtatcagcagcggaggctgcagaacagtgaatattgctgaacagcaaatgttgctgcctgatcattcctctggaagtttcatctcagaggggtacccagccgtgtaaggtgtcagtctgcccctactggggggttcctcccagttaggctactcgggggtcacggacccacttgaggaggcagtctgtccattctcagatctcaaactcggtgctgggagaaccactactctcttcaaagctgtcagacagggacatttaagtctgcagaggtttctgctgccttttgttcggctatgccctgcctgcagaggtgcagtctacagaggcaggcagacctccttcagctgcggtgaggtccacccag

SEQ ID NO: 10943 - DNA, 5341 bp, Homo sapiens
tttttttttttttttttttttggtgagaaaggctcagcagctgatagactcagcaacaggcagccaggagctctgaggctcacagctggcagtctagttccactcagtctctacttgagaaattctttctttggaggtacagcagaggccttaggtgagtggcttgtctgctatggcagagattagaggtgctgccagactgccataagtgttaggcagtaacagcagcagctgcttatatgcatgtgaacagctggggaattaatttggtatgcattctcaggagccactcatctgctggcagaggtagccgaagaatgcccttagtgtaagtcctctacaaccatacaccaaatgtgctccctgcatttcaaattccattgtagaaagtctctgataatctcacttataccatgagccattcctcagtatctgtcctcttcctgttagtgttctacaattcctttctccttaatttttctccgctttacaaaatgtcacacagacaagtgcataatacttaaacaagcttttaaaaataatgctcataaatagctttggttctgtcataatatttgtatttataaacattttaagtcaattctcttcttttgttttcatttcagaaatatccatgtcctgaataaaagttgtgtcttgattagtttattatgtaacaatttagtgtgtttgacatttctaacttttatttctaacatttgctttattatagaacaataaacatgcagtgattgatttttcttacttcaagtggatgagtgagcaagtgactaaaatcttctgtgaattcttcagtgtatggttcttgccaatgcatctgagaatctagggactttctgaaatagtacttccttgctatgaggactgaagttggattagaatccatttcaatgaagatcagatgtcctgagtagaattcttactattgggtcctgaatcttacattaaatattctctcaaattccttgaggcatagcaacttgagcttaccagtttagaaactggagatttgggctgggcgcggtggctcacgcctgtaatcccagcactttgggaggccaaggtgggcggatcacgaggtcaggagatggagaccatcctggctaacactgtgaaaccccatctctactaaaaatacaaaaaattagctgagcctggtggtgggcgcctgtagtcccagctactcaggaggctgaggcaggagaatggcgtgaacccgggaggcggagcttgcagtgagctgagatcgcaccactgcactccagcctgggtgacagagcgagactctgtctcaaaaaaaaaaaaaaaaaaaaacggagatttggttaacaaaatagtcaaagtctctcttatagaagttttgttttattttttgttttttaaaattttttaccattttgtagctgacaagtactgacaataaactgctataagcatgtgtagaaaaaggctcaccttgagtagttaagagtaaggaaaaggaatagtgtgtagcatcgtcttagtggtaagacttaagttgatttagtagcaaatggaagtactagtgaaccacatagatttcagaagtaggagtaaaaggttagaagatgtgtcattttaatcttctctagactttttcttaatttttagaaatgtaagtggactgaacagaggaaaaccaaaacacagctggtcaataataagttaaattaatttgacaaactgcctgctatgcatttcatagcaatttaaggactatataagcaatggataaggcgaaaactctgcctttaaggagatcagtcattggggggaaacagaagcaaacaaacaaaaaggcaacataatagatattaatattaatacaagaattttaaaagcacagagttctataataataggaaaatagagggaatgattgctcaacttttcttgaaaaagagtcaggaaaatattgaccgagaaggcagtcattgacctgagtcttaaagaatgaataaggtttttacagatggagtagggtagggataactttccaggtataaggaagattttgtattccagggacctttgaatattttagaatggctagaaaacttggtattatgtagcacagaaaaagtggtatgactgaagagatagagaacttaccacaaagggtcttgaatgccatgatacatagtttggattttcttctgtagggagcaaggagttagtgaaggattttaaaggcaacatgactcttgggaggtagattcaatgtgaggctaatctccgaggtataggaaatacaggaaggaggagcaacaggtcgggtagtggtggaagcaggtttggaaaatatgaatagttttgtaaacgtttttgagtttgaattgccactggggaaggcttttggaaatttatttccagagttcaagactgagctatcattgcagtttgctcagctatttactgagctatctactgtcaatttggatagtatctacagtttgcattgtagatactggatacttggattggctggtgcaccctgtttgtgagactcactggagtttgaagagatgaccactggaaaatatccctaagcagtagctgcaattccacccccaccttggagagccaaaaccctcttcgttttcactctcctgtccttggtcttaagctacttaaagcagcctttagacatagggaaaaattgaaagcctctcttttaagaaaaacattaggtacttctggaatagagagttcaagaaattaggagaaaaatgaacttttgaagctttttctttcccttttttgtttacttcattctcttagttttaaaatgctggtaatggtcttttttttctttttttttttttcttggcgattttaatgctttggaaaagatctcatgcttttatctccaaaggaggaaattaatttgatgccatggaaattagttttctagtcgtatgccttgaatgagtgaagaatttctttttcatggtggtactaaaattggggaaagctatagaaactttcatctggaagcttacacttttcctcttttttgaaaatttggtgagagacttggatattttattattttctgtaaaagagtgtaatttgttgtacaggtctaatattgatccttttttggaagtatggaaagaatctgagtataaagcagaattacctctggatggcatgtattctcaaggacactgtcatagggaaacagtttatttagaagcttgtgtttccaaactgttgaatttgatattcacaaaattggcatgtgtaaactttaagctatttcctaagatgaagatgacaaacttggagggaaacttcattcatttggtttatttttatttttatttttatttatttttatctttttgagacagaatctcactctggtttgagacagaatctcactgtgtcccccaagttggagtgcggtggtgcgatctcggctcactgaaacctctgcctcctgggttcaagcgattctcctgcttcaccctccgagtagctgggattacaggtgtgcaccaccacacccagctaatttttgtatttttagtagagacggtttcgccacattggccaggttggtgtcaaactcctggcctcaaagtgatccgcccaccttggcctcccaaagtggagcccccgtgccccttgtttgtgacctgtcaatataaatatgctcagtagtggggggaggggtggggggtgaaaaaggaaatatgtttaatattaagactttggccttttagtgtaaactgatattcaaaaatttcttcatagaacatttgcttctttgcttgatcatttttctaattctgtacatctaaaatgcccagaatttgagttgctgttatagtctactaacatagaactttggagtaataagatgggaatttgtctctcttttgccaagacaagtattcgtaatctaacacagtattgttgccacgagtacgagtatgtgatagactgttgataataaagaaagcaggcacagttggtcagtcctaagataaaggagatgttttttcttatatgtttgtgcattaaagaaaaaaaaaatcttgaatctgaccaatgatgttttttttccttgtaataaaatttaacaaatgtttggcaagcttctggaatctaaatttgaaattatacatttgtcattttctttaaatatttcttcaccttagctttgattatgagaaatcactgtcctctgctgttcttttttttttttttcttttgaggcggagtctcactctgtgccaggctggagtgcagtggtgcaatctcggctcactgcaacctccacttcctgggttcaaatgattctcctgccgcagcctcccgagtagctgggactacaggtgcatgccaccacacccagctaatttttgtatttttgatagagacagggtttcaccacattgtccatggccaggatggtcttgatcttgaccttgtgatccgcccgcctcggcctcccaaagtgctgggattgcaggcatgagccaccgtgcccggcctgtcctctgtggttttctgggcttatgttaaaattataactcaatcaccagtctttataaatttgcttttttatatttaaaccaaacctaatgctaattgtgatatgttatttattctcacctgatttgaatcattggattcaattaaatgagtttaattatcattaaataattctaagagaaataatgtctattcggatggtgggaattttctttctacatgcagccccattctgaatgaatgaaatcaaatcacgtgaagatcagggtcctagagtaacctaatattttgtacattggttatttgactcctcatttttatattacatgttatatcaagggagggggtataaaaaatacaaaaattgcagaggtatctggaatgtacctatttgttaattctatttgtcatttcttttgtttcatcttttgagtaataagctgcttggaaaagtttctgttctttagctgattttttagctataaaaatgtatttgaaaagctcataaatttcaggattgaaaagataattgaaagtttaaaaaaaacctaattcattgaagtaataaccaaataattttcaatcttgattcaactgtgattcaaatcttacaccatttgcccacttctatgaattttatgtataaaatttttaagagtcagagtttttttttcttgattaattggatgtatttcacagaatttccaactgctcacgttagttttcttccttttagagttgatctctctaatgtattagatcttcatgcctttgatagtctctctggaataag

SEQ ID NO: 10944 - DNA, 726 bp, Homo sapiens
gacatttaacttgttctcacagcttggctattgcaaataatgctgcaatgaatatctcataagtcttgtatatgtccatacaagatcatgaaaatggacatgtctctgggtattttgaattggtgggacaattttgcttaagggtaggcttagtgggtggctctacatttgagagttctaattcccattcctatatatatttcttttctttttatttatttattttttgagatggggttctctgtcactcaggctggagtgcagtggcacaaacatggcttactgcagcctcagcctcctgggctcaagtgatcctcccatctcagcctcccaagaagctgggaccacaggcatgtgtcaccatgcctgactaattttttttttaattttctgtaagcatggggtcttgctatgttgcctaggctggtctcaaactcctgggctcaagtgatcctcatgcctcagcctcccaaagtgctgggattacatgtgtaagccaccacacccagtcttatatatgtatttctaattttgccttagccatgcccttaaaaactaattatactttcaactagtttttttttccaccttcagtctgtggtattgttcacattttgaaaacaatacctacagtaacctgtgaggtaggacatgatagtgttttattggaccccttttactttatgaattggaaaaattaaatttgcatgtagtttgtaaaaaaaa

SEQ ID NO: 10945 - DNA, 338 bp, Homo sapiens
tccgagccaggtgtgggatataatctcatggttcgccgctttttaagccggtctgaaaagggcaatattcgggtgggagtgacccgattttccaggtgcgtccgtcacccctttctttgactcggaaagggaactccctgaccccttgcgcttcccaggtgaggcaatgcctcgccctgctttggctcgcgcatggtgcacgcacccactggcctgcgcccactgtctggcactccctagtgagagaaacccggtacctcagatggaaatgcagaaatcacccgtcttctgcgtcgctcacgctgggagctgtagaccggagctgttcctattcggcc

SEQ ID NO: 10946 - DNA, 445 bp, Homo sapiens
gtttcgccatgttggccaggctggtctcaaactcctgacctcaggtgatccaccaacctcggcttcccaaagtgctgggactgaaggtgtgagccaccgcacccagcctctaaaaagttttaaaggcatttgtcttctttcgcttaaaacgtaagatattaaaaatattaaaatattaaacttaacatctaatatagttcacattagaatccagccaggcacagtgggacacatttgtaatcccagtgctttgggaggccgaggcaggaggatcacttgagcgcagaagttcaagaccagcctgggcaacaaagtgaaaccccacctctacaaaaaaagttttaaaaattagccagacatggtggcatatacctatagccccagctattcggaaagctgaggtataggatcacctgagcccaggaggtcaaggctgcagtgagct

SEQ ID NO: 10947 - DNA, 561 bp, Homo sapiens
cctgggagtaggaccctccgagccaggtgcgggatataatctcctggtgtgccattttttaagcccgttggaaaagcacaatattagggtgggagtgagccgattttccaggtgccctctgtcactgctttctttgactaggaaagggaattccctgaccccttgcgcttcccgggtgaggtgatgcctcgccctgcttcggcttgcgtgtggtgcgctgcacccactgtcctgcacctactgtctggcactccccagtgagatgaacccggtacctcagttggaaatacagaaatcacccgtcttctgcgttgctcacaatgggagctgtagaccggagctgttcctatttggccatcttggctcctccccccttttttttctttttttaagatgcagtctcactctgtcacccaggctggagtggagcagcatgacctcggctcactgcaacctccgcctcctgggttcaaacagttctgtctcagcctcccaagtagctgggactccaggcacctgccaccatgcccagctaatttttgtatttttagtagagatagg

SEQ ID NO: 10948 - DNA, 433 bp, Homo sapiens
aaagcaatttccttaccaaacattttacatttggttattagttatattctggtattctaacaataacactaataattataagctgttgaaaaattcatcagaccctacatttttatccccacatcctgaaaataaagtgggaaataaggtaaagagtagaaaatctgcctatgtttttcttcggatgacatgagatgctcacctaatatcactcctttagcattttctattaaattgttcattctttcctgggggcatatgaacagcttccattacggtaaatgtcagtcttgagtgcaaacctagaagagggcaaatggaaaacttttagacaataagtcaacttttcttcaaaagttcaaccactatacattccatggtgaaaatatttctatgtacagatgaaacctcttaggtttggggaaatttcaat

SEQ ID NO: 10949 - DNA, 316 bp, Homo sapiens
gtgcacaccaagaaccaagtttcagcttggttactgtgttgaagacacctttgctatatttcaagtcattccttcttttctcaattttttttaattgacaaaaattttatatatcgtgtacaacatcaatccatcttggcatctgtatttgtcagggttgtcttagagggacagaactaataggatatatataagggggagtttattaagtattaacttatataatcacagggtcccacaacaggctgtctgcaagttgaagagcaaggagagccagtcagagtgccgaaactgaagaacctggagtccgatgttc

SEQ ID NO: 10950 - DNA, 10685 bp, Homo sapiens
ctatgtgtcttcaggttgcaattgctgccttgtactacaaccctgatttgctgctacatactttagaacgaattcagttgcctcacaaccctggacctatcactgtacagtttataaatcaatggatgaatgatacagattgttttcttgggtatgtgtcttttggattttacactgcttttctgtttctggaaagtttgctttttaatatttgtgtataatagcatgtacaaagataattttcatgtcttaggaattatttttagtgtattgttaatatttaatttttagaggattaagaatgcatttcagcagggtaatctagtggaaagaatgcagcctctgaaaatttgatgtagccctttcccgcttttattttttttatttattttttttaaacacaagtgtatcattgtatctctaggcaacaagaattagttgtctgtctgggttccatgattaagtgtcagtgggtaaaaacattctaaatggagttggatttctaaggatggtacccctctggcaaagataaaatgtaatgtcacagaatgtttaactctttgcagatctcagggatgcctgttctcaaaagtggagtcagaaggcttgttatttgtagcccaggtgctgccccagtaggagaatttggttttatgtgaagcactcttcctagttttcaaaaataggaagagtgaggccgggcgcggtggctcccatctgtaatcccagcactttgggaggccgaggcgggtggatcacgaggtcaggagatcgagaccattctggctaacacggtgaaaccccatctctactaaaaaagcacacaaaaaagctagcagggcgtggtggtgggcacctgtagtcccagctactcgggaggctgaggcaggagaatggcatgaacctgggaggcggagcttgcagtgagctgagatcgtgccactgcactccagcctgggcgacagagtgagactccatctcaaaaaaataggaagagtgagattccaactagtgttatgtgcccacctcaggtcacccaacacagattagtgattgtgttatgctagaaattgagctagctgtctaatttgttttaaaacactatctaatatctaactggaaattaatagtattcttcttaagttttgtgagagatcatttagaaaaatttcctgagaggaacagactccccacagtggttaagacactgctgccacaggcaggagaagatggaggcctggattagggtggggcgttaggaatgggggaacatatttacaagctgctatgcgtgttctaatttttctacttgcaggacactggaattaatccctgattgagatttgttattaaaaccttgaagggaagaacatactatcaaagaaattgttgttaaagttatctctgagaaagatttagggagtagagatttggtaatttaaagttaagcggttggttctcttatgtgtttattagcactggaagcagtctccctgctattgtgtagactgggagtccttgggttgtgcttccttggattctttcgagctctgcttgataatcctcttttctgctgtgatccgtgtggcatgtatttaggggttgcatggatgagaaggtcctcaggtcaagtacagttctgttatagcgtactagttgggcattagtgacttgaatcaatcaaggaatgcaaataatgaagaataacagaagcctgtagaatattcattattggatttgttatattattcgcactttaaacacattgaatcgctgcaagtgaattttttattcacacaattttaagaatgttttgccaatgtaatcttttagttcttaattttttagttttaagcaacttagaggaagcatttagtagaaaaatgtctaatgtttactggtcaaactttttttctttctgaataaaattttccttgtccttatatttttcttatgctattttatagcacaggagtttagtagactgcttaaattaagttcagcttactatcttactagatgctgagtttttgaaacatctttcacctcttagggtttgggtagattatgtgtgctgagaaaccttgtagatcaatctaatgttggaagagtctaagaaactcttcattccccccaaccattgtataggacttttatgctgtcaaatataggtatttctgctttattaaaactccttatgccgaggcccatatataacatttatattaatcataaattgatattacagcaagattcaccatgttaattgcagactcccaataggtctttgaaaataattggtttacaaaatttgatttacatagcatttcatacagtacaaaacagggaatgtctctgtatgataccaacagatgaaccttagagtatgccttggacatttctttttgtagtttctccagaatttgttctttattccacttctcatgtctacattttttttttcttcaaaatttgcaggcatcatgaccggaagatgtgtataataggactgagtatccttttggaattgcaaaatcgacctcctgcagtagatgctgtggtgggacagattgttccctcaattcttttccttttccttggcctaaagcaggtctgtgctactagacaactggtaaaccgggaagatcgttcaaaagcagagaaagctgatatggaagaaaatggtaaagtcttctaattgaaattaatgttacaattgattttgatttgtgtatgcattttatatgaatactagtctatatggagacattaaacagatttacattcttcggcctgctacacatataacaaatattttgggcttggttgacttgctattaattgtatcatgctatataaatttagatttatgcaccttctgacacctaatatactcagcggttttttttatggagcctaatagatgctgttacacattaggaaacacatttataacaatcaaatggtcttgactgtaagttagcaatctagtatctaactttcttgtttgtgctaacagcctcatcaaggcagtagccatgagttaaatgaatcattacattaagagctgaagtgttagtaccacagattagtagagagtgtcttttttttctttttctggaatggttcttaggtgactcattagcaaaaattacatttgagagacgtccatatttgtgatttaaatataaattaaggtaaagtacataaatgaagtggatatacttgagaatcagaataagattgttagagttgaatattagacctttgttttgtttaatgatgagaatgcggagctacttgctagagactaggaagtagcattctcctattccaggtggattttttcctctcctggttaaaaacagatactttgttagctgagaaaaatcagaactcttcctggtaaacatacagctctatttttgatgctaaattctgtgattttagcatggatagatttaaaacacttttaactggcatcatcccagtttgttcatataccagagattataaactaccctttttctcccctccacagcacaaaatacagcttctaatttgtttttctgaaatctgtgtaggtcttttgaagaaatgcttctttattagaagtgttgcatgtgtgatttttgttttgttttgttttgtttttagctaactgtgtgtcaacagttgtagaattcttttattttttccagtatgttatgatctctaatttcttgttttggcaactctttattggcttatactgtatggcttgagggaaaattttctggtaatatcccacactttcttgtacttcctactaaagtatggaatgattaactagtggaggtatttctcagtctttttgtattaatagttataatttgccatgcattttttcgtgtatttggtccaaactctggttaagtgccttattcctaaaactacctagttcaatctacctgcttcaatatggtgtgtctaatagaactagttttaggttaatattacctggtttgggtttactccaggatttctctcttatcttgatttttgttctgcatttactgccttcctgttccagtatttcagttacaatctaactgctaggaacagattgacactgaaaatagatacagaatccatggtgatacataatgtagttcaagtttttaacttttcaagcgacatgtagctatttttctttacatttttgctatttctttttattataaattagcaaattatatatttatggagtacaaagtgatgttatgatttgtgaatataatgcggaatgattaaatcaaactaatatatccatcaccttaaataccctttttaatggtgggaacatttgaaatttacaatcttgccaattttgaaatgtacatatactattaactgtattcaccatgctgtacaatagataccaaaacaaaacaaaacaaaacaaaaacctaattcttcctgagactttgtacccttttaccaacattcccatattcccaccacctctagcctctggtaaccaccattctattctctacttctatgagtttgattgttttagattctatgtataagtgagaacaggcagtatgtgtctttctgtgcctggcttatttcacttatcataatgtccaagttcatcagtgttgttggaattgacagaattacctttttaaaagctgaatagtgtttcattttaaagaatccacattttctttattcatccgttgttgatggacacttaggttgattctgtaacttggctattgtgaataatgctgcgatgaacacagggctgctgacatctgttctacgtattgatttaaaatattttagatatatatcctgaagtgggatggctggatctgtatttttactgtttctactagcagaaatgatctcatttgggcatttctaagcactttataatcaactcagttaattaagaggactgaattctcaataggaagtcattgtttaaaacacatgcactgaccgtacagtcactttttttttaaacaaaggtaattttgaaatctgcaattgaataatattcttgtattaatgaacttgcatagcctaacagtagtaatgttcatctggataacaggtttagggaacttgttttcagtgaggaggataaggacattctcaacttagcaaactctacagtaaagataaggtttatttattttattttttatttttattttttgactctcctctttagaccagggataagatttatttttattaaaattttgtggaagattttttcctttccagagtgtagttttatagtctttggtttttgtcgtgaagttttatattttgtccttatgtgttttgattccttttaaataattaatgggttcacagaggagatttcaagtgatgaagaggagacaaatgtaactgctcaagcaatgcagtcaaataatggaagaggtgaagatgaggaggaggaagatgatgactgggatgaagaagtattggaagaaaccgcgcttgaggggttcagtactccacttgaccttgacaatagtgtggatgaatatcagttttttacacaagctctgataagtatgtctttacttccccacatcttctgatatttttttttctaaactctttcttcatttcttcctgttttgatatttgcccaagattggtctaggttcttttaaaaatttttttgtttattccttatgatagaaatccccaaacatacatacatgaaatgatagaaattaaaataatgaaacacctatcacccaatcctagcagctttcatcattgagaagtagcagggtgagcctgtatgttatccttgcaaaagtaatatgtggagtatctgtgtatattgttcatcctttaggcataaatgggcaagcatttttatagcaaagaatgaagtgtttcaggcatacattgcttaaaaattgtggctaacaacctactagttattcacaatccctagaatgaaattgctgccgtaagagggtgactttttactttgtaagtaatttgccaattttatacaacaaagaacagtataattacagttacaggactcataaatgattcggggggagaaaatatttgccacatatgcataataggcataatgtacacagtgtacagaggccatcctcagatacataagaccagtaacctagtagaaaatggaaatggaaaatttacagaataaaaacaagccaatgaggatatttagaaaattattaatcaaataaattattttaaatctcattaatatagattatttgttttatggttagatagtatttccatagttacattgtaatttagttccactgtgggacatttaagattgtttccaatgtttttaccattatgagggttattaaaatgaacatccttacatgtaaatgtttttactaataaggcaatattagcttaatatattggcattttttagtgttgctacaaataacattaatgaagaaaaaactacctagatgttcttattgaaattcagaggaattggaggcagagaacacaggaaactatattccaaagcatgggaaacgtaacagcataaacgtggagatggaaatatggaggatgtggcctagtgtagttccagacatgggtgtgtcataatcaccaaggaggcttttaggtcttgagtaggatctcaggagatgtatttttaaagatgcttctcaagtgacaagcaactttaaaccagcatgtaggggccactgcttaaagactgtgaaggaacgcagttgggctgggctatagtggccttgaattctggactgaggtggtccatcccattgcccattggaatagtgttgaaagttgtgttctgaggcggtgaccttttagatgtggtaattcacttcaggggagttacccggtgatggatgatgtgcagaaaaaactggaaaggactagatgtgggagccaagtgttagaggttcactttattaatttagatgtatagagacctggaatggggagggtgacatttgatggaaagcagcatacagatgaaagacattaagaaagaagcagagctttgggtgtggagagggcatgctcagggatgttaaggatgcacagtagtggactgggagactaatagaactggtgagataaatggagagatagaaggtttgggaggaaattgttaaatttggttttagttgtgttgagtttgagatgagctattcaaatggaacagtccaggaggcttaggggaaggtttttcctagaggtacagatttgaatccttggggtggtagcaatactaaagctgcaggtagtatgaaaattccagaggaaaatggtaacaagtgagtactggtgttctggattttagagaacatccatagaagacagcaaaggagacagagaactaggcagactagagatttgcaatgtcctaaccttcctttgatttcccacatagctgggtactaagtgggtactcagaaataatcctttgttggcgtaagtttcattaccttgtgtgtgttgtagtactgtactctttgtctcttactgtctgggataatttctttgtaatttgatcatgttactacttgttctgtaaattaatagtcgctgtaccctcctgtcttttcctcccaaaatgcaacagctgtgcagagtcgagatgcagcctggtaccagctgctgatggcaccactcagcgaggatcagaggacagcactgcaggaggtgtacacactggcagagcaccgacggacggtggcaggtcagccagagtaacctccagagtggagtgcatgtgtcagagtgccaacagacagccttatttgatgagccaggtggcacctaaacactgtttttgaaattgttagagacttaccctttaagataataaggaattgtcattattgtatgattgttttaatcactcatgatgtcttagctttgcaaaaacctgcacattaatatgtatttcctagtggtgttctcattcacattcttatcctatgttggaggcaaaggtacaaagtaagggttgggataagtcttgccgagggagacttaatcagttggatcactcccctaaacatttcaaccgtgggccaaagggacttgacgaattcttgcaaggagcttgtattcctggaaatggaatgctctctatttctcattgttgggctttatttgacattgtttcttgttgttgattttcagtttttaagctggaggaattactctgtgttgattattgtagttacttgtagattgtcattggaaaagattttgtagttacaaaaaaattttagtaggaaacatggcaaactagacatctagagtttagaatgctggctcttctgcatggacttagattttcagttctgtgcagattctcagtcagccttcctgatatgagaagtctgggccccctttcagcagtagagacagtgaagtagaatccacctctgagacgtgttttcttttcactcgttttttgcagattttccgatggtagtgaacataccaccttattgacataggtctgttattcttagttattctttggcaggataactaatactaccagtcacattctttcacagttctaagcatataaagaatctggctcctttgagtcatctccaactttgtcaccttaagcattctttttttttcttctccccttttcttttgaaaaatgctagaggcaaagaagaagattgaacaacagggaggcttcacctttgaaaacaaaggagtcctctccgcatttaattttgggactgtgcccagcaacaactgaaggaaagaacatcagctgaccaaatgtcatcgctgcattttatttcacaagaggagtgtgagggtcaaggggatgaaatgaggggctgcttttagggccctcctgctgtgccagttaccatctggcattaggcagcacttttatctactctttcccctttgacctttgtcaccctgaaatatatattttaaacagctactgtaagtatgaaatgaaagaaaaacaatcattggacggaaaaggacaacccatatgttccaaaggctgaatgcccaaggttgttttagaggattggatagacttgcacgtctcaggtttttgccatgcagaatcaatggatttatgcggataacagtgccttctgttgtacatgaattatcagaaaaaaatttttggagtgcattgcaattttttttaaagcataaaacatatttctagatacaacataaaccttggttatatgtcaactattctgcattttactctgtgaatttattgttaggcagttactgcaagtcactctggtttcaaaatcttcacggctccctctgctcaccctgctgctggggggcttttttcaggggttgtattataaaatatgcactggctgtggtttttcataagatgttttgtggctttttaaagaagtgtcttactccctcttctctcatttttttctgccttgaaaaggggtggtatttcttttggggtcaacaaatacacatatcagtttcactcctaaccttgtaagttcaggactcattttcttggcagcaagtggcaggggctctttagtcactggagttaacagtaagtctgagtatattctgaataatgtaattatgcaattaattgataatcatacctaaagcacattgaacttctaagagacaggtgctacgtaagcacactgtctttctggatggggacttgtattttaaataacttatcattccagctatgttggactagggtccaaagcattttataatatttttttttaatctaggaaaaagacccaaacaaatctaacttcttgctttctcacctatttgaattttctcctacctaatttgtttgtgtctttattatagctcagtttgacttctcaaacttttcaagggttggggcagctgcacttttaggttgcctataggaaatattgcatatggagattacagtgtttttctgacctagttcaagaccagaacatgggtcatagggtttttattcagcaaaatgaaaacgtatcttcagaacttaacatattactggatgtgatacagattttgctttctgtggaattgaaaattcacaaaaattcacagcttaaatttcccatcagtgactggaggaatttttttcaggtgcttcctatattaccatccctcatgcatattaactctttagaattttaggttaagtgatgtctatagaagtagcctggaaaaccatgagttttggagttcagtgaccccctgctttcctctgctcctcccttcccaaggcattgaagctgaatgtgccaactggcagttagaagcgaaagatggcattgggagaaattttagagagctttcaaactctttattctcatgttccacatggtctaattttaacataaataatatgccttcacactggattgtaaaaggcatgtgatttttgagattttattttgtgatgtattgtcttctgcagtattaaagggaaagagatattaatgtgcattaccctatcttgtttttgaagccagggtagttgtatgattttgttaccagcagtgctaacctgaatgtgacctggttaccttggaaatgcaggaacttatatgaatgtactataaaataaaatgcggactgattcccaggattctgaa

SEQ ID NO: 10951 - DNA, 1011 bp, Homo sapiens
cacacccctctgcttacctgtaaaatattctacttctttctccaactcttggaaaatctcatctgcctcagctttgccaaacaggactgtgtaactgcagtccaggccctcagcccgaatgtgccgccagctagggcctgctgagtggcctccattccctggggcctctctcctgggcctcttccttgtgctttctttgtctcctcccaacacagctggctcttctccagttggctcttgctcctcctgcttcctcaaaaggcccccttgagcccctttcaccaggaatctgtccatcctgtccccacaggaaagaagggacgtcagtggcgaggccaagacagaaattgctcaagttctatccccagtgcaaaaatctgtttgtccaaggggtctcacagcaacattcctagtttcacattttcattttaaagtttaaaaccatgtcctagaaaggaaacagaagatgttaaagccggaagggaccctagggacaatctgatccagggtctcccacgtccacctgtgcatcagaatcagctggctagcttgcaaaaacccagaggtctgcactccacgcctgagcacctgaatttttaaagaactacctcctgggaattcgcacgccacagctaaacttagaaactacaatccaaaccctcattttgcagaaggggaaactgttgcccacagaggcgaagaggtttgcccaaagtcaactgtccacccctttaaggaggaaggacccataactgacctcgctgccccccaccagtgttaaaatagatcagtctagtgatgctcaagtggatacgattcagaagcgagacgcaaagaggttaaacacgggtaaaccgcacgcaaaattctgatatcactgcaacacgtccgtggggtgggggtggcaagagtgctctagcatcgcagctccggcgcagatcggaatcccgcagtcaccctggtggcctcgtggtgggaaagacgcgccccagcgaatcggtcgcgtcactt

SEQ ID NO: 10952 - DNA, 323 bp, Homo sapiens
taacatgaattttgtgcaatactatgaggggaagattggttacttttcaaagaaaccacttattttctctcaaaactgagtgtctaatcaaaggcaattttttagaacaggttatcattggtcaaatgtagtaaaaagttgatattcctcttcaatattcacaagatgactctcttactcttctgtgtctttcgacatagttatttttagcaattacagctctgcctttgtctcatttactatgcagtctgtataaccattattagacattacaggaaagaaagccacatggcttaaaaagtactcattctgtcttatccacc

SEQ ID NO: 10953 - DNA, 396 bp, Homo sapiens
ggagctgtgttcctttggagttggagaggcactctgattttaagaattttcagtttttctgctctgttttttccccgtctttgtggttttatctacctttggtctttgatgatggtgacgtacagatggggttttggtgtggacgtcctttctgtttgttagttttccttctaacagtgaggaccctcagctgcaggtctcttggagtttgctggaggtccactccagaccgtttgcctgggtgtcagcagtagaggctgcagaacagcgaatattggtgaacagcaaatgttgctgcctgatcgctcctctggaagttttgtctcagaggggtacccagccatgtgaggtgtcagtcctcccctcctggggggtgcctcccagttaggctactcg

SEQ ID NO: 10954 - DNA, 2312 bp, Homo sapiens; identical to SEQ ID NO: 10844

SEQ ID NO: 10955 - DNA, 280 bp, Homo sapiens; identical to SEQ ID NO: 10843

SEQ ID NO: 10956 - DNA, 307 bp, Homo sapiens
gggcgcggtggctcacgcctgtaatcccagcactttgggaggctgaggcgggtggatcactaggtcaggagatcgagaccatcctggctaacatggttaaaacccgtctctactaaaaatacaaaaaattagccgggtgtggtggcgggcgcctgtagtcccagctactcgagaggctgaggcaggagaattgcgtgaacccgggaggcagagcttgcagtgagctgagatggcgccactgcactccagtctgggtgagagtgcaagactccatctcaaaaaaaaaaaaaaaaaaaaaaaaaaagaa

SEQ ID NO: 10957 - DNA, 446 bp, Homo sapiens
ctgggctttccaaaatctggttatattgctttctatgtgtcctgaccctactattatctgtcatttacctttactaaatctcactattgattgtaaccatgtaatccttttgattgttctggtttttctggaatgctttgttggtgataattatctagttgtcttttgaaggttgattgtaagtggctggagaagatgagggaatactcttttttgtttgtttttgttttgttttgagatgaagtcttgctctgtcacccaggctggagtgcagtggcacaatctcggctcactgcaacctccgtctcccaggttcaagcaattctcctgtctcagccttccgagtagctgggattacaggcgtgcaccaccacgcccaggtaatattttgtctttttagtggagacagggtttcaccatgttggtcagcctggtctcaaactcct

SEQ ID NO: 10958 - DNA, 420 bp, Homo sapiens
tctgaagccttcttctctcaattcgtgaaagtcattctccatccagctttgttccattgctggagaggagctgcattcctctggagggggagaggcactctgatttttagaattttcagtttttctgctctgttttttccccatctttgtggttttatctatctttggtctttgatgatggtgacgtacagatgggattttgctgtggatgtcctttctgtttgttagttttccttctaacagtcaggaccctcagctgcaggtgtgttggagtttgccagacgtccaccccagaccctgtttgcctgggtatcagcagtggaggctgcagaacagcaaatattgctgaacagcaaatgttgctgcctgatcattcctctggaagcttcatctcagaggggtatccagctgtttgaggtg

SEQ ID NO: 10959 - DNA, 84 bp, Homo sapiens
caccaaacaaaaaaaaacaaaaaaccaaaaaaaaaaaaaaaaaaaaaaaaaacaaaaaaaaaaaaaaaaaaaaaaaaaaaaaaa

SEQ ID NO: 10960 - DNA, 116 bp, Homo sapiens
gctaaggtaggagaatcgcttgaacctgggaggcagaggttgctgtgagccaagatcgcgccactgcactccagcctgggcaacagagcaagactccatctcaaaaaaaaaaaaaa

SEQ ID NO: 10961 - DNA, 392 bp, Homo sapiens
aaagctttgtctcagaggggcacccggccccatatgaggtgtcagttggcccctactgcgaggtgcctcccagttaggctacacgggggtcagggacccacttgaggaggcagtctgttcattctcagatctcaaactccatgcttggagaaccactactctcttcaaagctgtcagacggggacgtttaagtctgcagaaatttctgctgccttttgttcagctatgccctgcccccagagatggagtctacagaggcaggcaggcctccttgagctgcgctgggctccacccagttcgagcttcctggctgctttgtttacctactcaagcctcagcaatggcagatgcccctcccctagcctcactgctgccttgcagttcaatctcag

SEQ ID NO: 10962 - DNA, 798 bp, Homo sapiens
ttatcggcagcgcagccgaactgctttgagtaaaggaaaagattatcttgtgttagctcaaccacccttactacttcctgcggaatcagtagatgtttcagtattgcaacctctgagtggagaattggaaaatacgaatatagaaagggaagctgaaactgttgttctgggtgatttaagtagtagtatgcaccaggatgacttggtgaatcacactgtagatgcagttgaacttgaaccaagccattctcaaactctttctcagtctcttcttttagatattaccccagaaatcaatcccttgcctaaaatagaagtatctgagtctgttgaatatgaggcaggacatataccgtcaccagtgattccccaagagagttctgttgagatcgataatgaaacagaacaaaagtctgagagctttagttctatagagaaaccatctattacctatgaaacaaataaagttaatgagttaatggataatattataaaagaagatgtgaactccatgcaaattttcacaaagctgtctgaaacaatagtgccaccaataaatacagccactgtacccgacaatgaagatggggaagccaaaatgaatatagctgacacagcaaagcaaactttgatttctgttgtggattcttcttcattacctgaagtaaaagaagaagaacagtctccagaagatgcccttttgagagggttacagaggacagctacagatttttatgctgaattgcaaaattctacagatctaggatatgctaatggaaatcttgtacatggatcaaa

SEQ ID NO: 10963 - DNA, 1326 bp, Homo sapiens
catttttcttctttcttctttttttttaaaaagacatttattcagcatcataatcagactattacatttagcaatcaacagcatgggtgcaaaaaaaaaaacaacctacattaaaacccttcgttggaatgctttacactttccacagaacagaagctaaaataatccgttatacaattagtcacaaatacagtcctcgagtttttttcccatacatatgagtatttgtctaaaacatgtctgctttgtagcagctaggccctgccaccactgtgctttgctaaattcacaaatctgttgtaacctgtagcttccctgccacttctctggctctccgctcctgctaaggtttgtttcctaattaaaatcttctgccactgccacagctactgctactactggaaccatcatagccaccttggttttgtggtttggcaaagaattggcctccaccaccataggggccagagcttctgactccaaagtttcatgggtccataatttgaagactgattgttgtaactgccaaaatcattgtagcttccaccacctccaaaattgcttccatcattaccaaatccattatagccatccccaccgccaccataaccaccaccaccatgactgccaccaaagccaccatgacaactgaagcttcctccacgaccaccacctccatgaccatgatcaaagtttccagaaccacttccacctctggctggatgaggcaatggccaactcttgctttgacagggctttcctaacttcacagttgtggtcattcacactatggtatttctgaatgacagtcttatccatggagtcatggttgtcaaaggttacaaaggcaaaatcccttttcttaccactgcctcagtcggtcatgatttcaattacttcaatttttccatactattcaaaataatctcttagttgatgttcttcagtgtcttctttaatgccaccaacaaatatctttttcaaagttaagtgggcacctggtctttgagaatcttctcttgagacagctctctttggttccacaactcttccatccaccttgtgtggccttgcattcatggctgcatccatctcccccacggtgtcatatgtgacaaatccaaagcccctggagggcttggtgtttggatcactcattaccacacagtctgtgagcattccccattgtttaaaatgactcaaccattttgagccattttcaggttgtttcaaagctcaacccttcaatgaagagcttcctcagctgttcgggccctttaggagatgctgacttagacacgatggcagagtgaagacagactttaa

SEQ ID NO: 10964 - DNA, 2451 bp, Homo sapiens
ttttagaccaatatccctgatgaacattgatgcaaaaatcctcagtaaaatactggcaaaccgaatccagcagcacatcaaaaagcttatccaccacgatcaagtgggcttcatccctgggatgcaaggctggtttaacatacgaaagtcaataaatgtaatccagcatataaacagaaccaaacacaaaaaccacatgattatctcaatagatgcagaaaaggcctttgacaaaattcaacagccttcatgctaaaaactctcaataaattaggtattgacgggacgtatctcaaaataataagagctatttatgacaaacccacagccaatatcatactgaatgggcaaaacctggaagcattccctttgaaaactggcacaagacagggatgccctctctcaccactcctattcaacatagtgtcggaagttctggccagggcaaccaggcaggagaaagaaataaagggtattcaattaggaaaagaggaagtcaaattgtccctatttgcagatgacatgattgtatatttagaaaaccccatcgtctcagcccaaaatctccttaagctgataagcaacatcagcaaagtctcaggatacaaaaatcaatgtgcaaaaatcacaagcattcttatacaccaatagcagacagacagagagccaaatcatgagtgaactcccatccacaattgcttcaaagagaataaaatatctaggaatccaacttacaagggatgtgaaggacctcttcaaggagaactacaaaccactgctcaacgaaataaaagaggacacaaacaaatggaagaacattccatgctcatggataggaagagtcaatatcgtgaaaatggccatactgcccaaggtaatttatagaatcaatgccatccccatcaagctaccaatgactttcttcacagaattggaaaaaactactttaaagttcatatggaaccaaaaaagggcctgcattgccaagacaaccctaagccaaaagaacaaatctggaggcatcacgctacctgacttcaaactatatatactacaaggctatagtaaccaaaacagcatggtactggtaccaaaacagagatatagaccaatggaacagaacagagccctcagaaataataccacacatctacaaccatctgatctttgacaaacctgacaaaaacaagaaatggggaaaggattccctattgaataaatggtgctgggaaaactggctagccatatgcagaaagctgaaactggatcccttccttacaccttatacaaaaattaattcaagatggattaaagacttaaatgttagacctaaaaccattaaaaccctagaagaaaacctaggcaatacctttcaggacataggcatgggcaaggacttcatgtctaaaacaccaaaagcaatggcaacaaaagccaaaattgacaaatgggatctaattaaactcaagagcttctgcacagcaaaagaaactaccatcagcgtgaataggcagcctacagaatgggagaaaatttttgcaatctactcatctgacaaagggctaatatccagaatctacaaagaactcaaacaaatttacaagaaaaaaacaaacaaccccatcaaaaagtgggcaaagtcttctcaaaagacttctcaaaaagtcttctcaaaagaagacatttaggcagccatcagagaaatgcaaatcaaaaccacaatgagataccatctcacaccagttagaatggcaatcattaaaaagtcaggaaacaacaggtgctggagaggatgtggagaaataggaacacttttacactgttggtgggactggaaactagttcaaccattgtggaagacagtgtggtgattcctcaaggatctacaactagaaataccatttgacccagccatcccattactgggtatatacccaaaggattataaatcatgctgctataaagacacatgcacatgtatgtttattgcggcactattcacaatagcaaagacttggaaccaaccaaaatgtccatcaatgatagattggattaagaaaatgtggcacatatacaccatggaatactatgcagccataaaaaaggatgagttcatgtcctttgtagggacatggatgaagctggaaaccatcattctccgcaaactatcacaaggacaaaaaaccaaacaccgcatgttctcactcataggtaggaattgaacaatgagaacacttggacacaggaaggggatcatcacacaccggggcctgtcatggggtgggagggaggagggagggatagcattaggagatacacctaatgtaaatgacgagttaatggatgcagcacaccaacatggtgcatgtatacctatgtaacaaacctgcatgttgtgcacatgtaccctagaacttaaagtataataaataaaaattaaaaaattaaaaa

SEQ ID NO: 10965 - DNA, 420 bp, Homo sapiens
cctcgctgccaccttgcagtttgatctcagactgctgtgctagcaatgagtgagactccgtgggcgtaggaccctccgagccaggtgtggatataatctcctggtgtgccattttttaagcccgttgggaaagcgcagtattagggtgggagtgacccgattttccaggtgccgtctgtcacccatttctttgactaggaaagggaattccctgaccccttgggcttcccaggtgaggcaatgcctcgccctgcttcagctcatgcacggggcactgcacccactgtcctgcacccactgtctggcacaccccagtgagatgaacccagtacctcagttggaaatgcagaaatcacccgtcttctgcgtcgctcacgctgggagctctagactggagctgttcctatttggccatcttgg

SEQ ID NO: 10966 - DNA, 464 bp, Homo sapiens
ctatctcagaattgggcacatttctgagatattctgctgcaattgtgtaagatttgtctgcaagccttaattttctcattacctactttttataagtcaggcacaaataattggaactgcttatatagggaaaattgttgaggctttaaaatgtctcaacgccaaatgagaagaaagagaatacatattctttagtcttaatttggttccccaggagcaaacttgaatcctgaaacaagaattcaaactcacagagtttattttgtagggaggaagggaatgaagagaacacaggtaggggagaagagaaataagacaaggaagaggagaaaattaataaagataggcttctcaagccaattaccacagtaggcaactgaaacttaatcccgcatgagcacgctaggggcccgtgaaaaacacatgcttcagggtcccccgagggttaaaggagctgacgtatt

SEQ ID NO: 10967 - DNA, 1091 bp, Homo sapiens
tgatgccttttattctatgaaagtttttcattttaatgaaaaccgattcatcaaaatgttccttttttgcttacgttttttgtgtcttattttttaagctctgtcctgcttcaagtttaaatttctaccaaaagtattgatgttttactttttacatgtatgtgttccataaaaaatccactgagcagatccactgctcaagttctataaaaaaactacagaaatgttgattggaattgcatggaatttgtggattaatttggagaaaagtggtatctttacaatagcaaggctttccatctatgcatttgtatctcttttaatcaagtcttaatttgtgttgtggcagattccgctacttgccttctcaacaaactgctttcttccttgataagaaaatacaaatatgttttagagatggcaatgtgttcagcttcaggtgacgaatacacagtaggcattcaataaatagcacctacttaattatcatcatccccctggtctaccatttggtaaccaaagcgaaataaagttctaagcaggggtcagcaaactacagcccacagttagtctgacccacttacaatttttatgaagaagtttttctggaacacagccaggcccatttgtttacatgttgtctatgtctgcattcgcactagagcagcaaagttgaatgattgcaacagagactatatatagccaccagagcctatctggccctttcacagacaaagttggccaatccctgccttagacggtattctttgcgagatattggtttggaaggttctattcctctatgccagatgcttattgttccatactttgttgcaactaaaagtgtccatggggcccaatgttggctgaatgtttctggaaagacttttaaactcctgataaacgtaatgaccataaaagaaaagcttgctatcaccaactcttccatctatttcctgcctcaaacacagatttgatgcctggaactttgagagctactttgcaattatggggtaactcttatggggggaagagctagagggcaagcaataagcttaaggtggcaggcagagctggctatataatttgca

SEQ ID NO: 10968 - DNA, 617 bp, Homo sapiens; identical to SEQ ID NO: 10911

SEQ ID NO: 10969 - DNA, 2103 bp, Homo sapiens
tcagttgcttgccaaaaagatttattgaagaaaaatgagcaaagtgaaaacagacccatttaagtagtctgtgccagaaaagaatgaagatttatgtccttgaatcgctaacaagagtcataagaagagtgtgatattcagtgtttaagacctggaaaacatggacaaaaattcagaaaacacattttaacagaaagaaaattaaattgatgtatatgtttacagaacatttttctgacaaatatgcatatttgtaaaatatcattttgctttagtttgtatctaacatgtgccaagaaccctatcataaatcttatgtatcttacatgtgggtgctaaacaattactgaattgtcttaattcttatatgaggattaaaaattttttaaatagaagagaatcactgatgaaatactaatgaaaaaattgcttagaacaagcattttgggagaactttttaggctatggtaatgttttggagaggttaatttgcttctcttcatatccttaattctcacttaagtataatattgactgttaactaaatgatatgcatcattaaatgttgtagaaatgagcccctacattgctctgtcttcatactccctgaaggctaggacgaaaaattttacattaagtaattgttagaatattgaaactttgtgatactagggggacccttacactgcggtttttttttctaagtttccgtaaatctgttacatgacctgtagtcctaagcatctgcatttattgagtcgaatacttgccttaaatgcccacattctttcatttctaaaggtttttgcttgttggaaaaatttcttagatgttaaggctagctggctagactattgcacaattctacatggtatcccttttgttgcttttaaatcatgaactcatcgggttcttctttcagtagttcaaagatatccgtttcagttgtggaggtgtcttccttatagtctggggtatctaatacagaggtagttccagaaaatggctcagtgatcttaggtacagtctctgtattatcagtttcagacaaatcttcttctgtagatgattcttccactaggtttgtagctattgatgcagggacaacgaagtcatatctggattcaacagcagtaagcaaaacagaatgggtctctgcttcatttgcagtatctctctccatccaaatactggctccctcggtagtttcttcatcagttagcagagtatcttcccgtttatctttgtctttttcagcagaggtagtgagttcaaacacagtgataaacttctcatcagagtcagttaatgtagccacagcactggtgtcatcttctaaaacacttaggtcaatttcggttattttctcttcttcaagggcagttatgtctggaatagtagtgaagctttcttcaggagcaggagggatttcagcctcaggaatagtggaatcagtgacctggacagcctcatcagcagggacattggatttgatggaggaattataattgctcatatcagcttcatcctttttacgtggaaaggcaggagcgtcagcaacaccagcactgctgtcctttagtgtgccagagacttcagaggttattgagatctctgcatctcctgtgtcaatggtagctaagaggatatcttcttttgctatgtcagtggaaaaatctattaaagaaacagtagtaactggtgatgaaatattcccaattttcactggcatgaaatgttcggtaatagagtctcttgttatggagtttgtagtgccagtcagagaggtaatttctttctgtaggtgagttgttgacttaataaagtcggtccccatatcatcttctgatttgagtttttcctttttagctgtcagtttgttgtctgtagttgttgaaaaatcgctttctagcatatattcatttactgaagtgacgtggtctccttctgaagtaatagttgtttctgatttgggaatagcattgtcagccccaaagaaaatggttgctgcagttggtgttttactgctttctgttggaggatgagaataaattttgggcaaaccatcttcagccatggggcgaagtggcactgtgcactctc

SEQ ID NO: 10970 - DNA, 127 bp, Homo sapiens
tttcaatttttagtagagacggggtttcaccatgttagccaggatggtctcgatctcctgacctcgtggtctccccgcctcggcctcccaaagtgctgggattacaggcgtgagccaccgcacctgg

SEQ ID NO: 10971 - DNA, 505 bp, Homo sapiens
agagaaatggttttggggacaggaagtttataaagccttagtagtggtatgtgcttctggcaagcaacagaaagaacacaaaggcaaaacacacacacacacacacaccccaaattagggataggactagctgcatgtgaattgcaatgaaaagccctgtggggtacttgatggaggaaaataaagatggttggtactactttaattggtagaacaaggtactactctgttatttaaataccaatgcacaacatttcccaaagaaacctttctttatgaattctggaagaaaactttctttgggaaaggttgtgcattgttttattttaagttccagggtacatgtgcaggatatgcaggtttgttacataggtaaacgtgccatggtgatttgctgcacctgtcaacccatcacctaggtattaaacccagcatgcattagctatttttcctaatgctctccctcctcccaccccacccccaaacaggccccagtgtgtgttgt

SEQ ID NO: 10972 - DNA, 3289 bp, Homo sapiens
gggagaatcaacagaaagggaacttctggaactgagaaccaaagtatcccaacaggagcagctccttcagagcacaactgagcatctgaagaacgccaaccagcagaaggagagcatggaacagttcattgtcagccagcgtaggttccctgagagggaacgggggcagaaacaggcagtcttcccgatgccccacttgtgcttcagatgagaagtgatcaggggggcttggggatgttgggagtggagactgatttgatgtccccaaacctcctgtgccaggagcaattgtggctgcagagggaggggaggacagggggtggatagaaggagactccaagctgaatagccagaaagaaataaatgctttagaattctcacgctaagcaagtagggttaatttctgctggtggtttctactctgtggtgctcttttgttgtttcagtaaccagaacacatgatgttttaaagaaggcaaggactaacttagaggtaaggaaactactgcaccagtcagaggcaccaagcctgtcccccacccatcaccatccgttagcagatcttgtaggtgactcttggcctgctttggccttccaggagaagatttggggtccacttgcaagatcacaggtcctcagtgagcatcctgctagtttctgtccctatcaccctcccaccccatcagctcctgcccctgtatcttggttcactctcacattgtcatcatctctcctttttactccaatttttcttctttgaggccaagttcagagactggagaaatgcaattcagctgactcttgaagtcattagacattcgggagtctgcctctgaatgagcttctagtagagggatcttgaggccagttatgtgttctactcttcatgaaaaagtaaaagcaatttgcaacctaataaactgatttcactgcacattcccgggttaagaacagcgatttgattttgctatatctttaagtaacatgacaaaagagatctgttgggtctcattggtctaaaagcaaatttgttaataaataacaactgaaccttcagggaaaaaatgttatatatgtaccagacattatctacatttacttaaaacactaagtgttaatcattccctaggaagtgctttgaagaaaaacttgaggtatatgaaatggttaaaaatcagaaactaaaccttttaacatggacatcaaagctttgccataagcaattcagcatattcctagaaatgtttctaatccataacctgagagaatgttgatctccatagtgtgaaaatgacttgggccagtttaacttgctcttttttttattttttcactaattcccttttgtttttctctgataattcttctctttcctgagcctctttagagcagcacttacaggattgcctctgtaaagccttattcctgtcccagaaaaggtaacccaaaaagtctctagtatccactaaaaggtaacccaaaaatctctagtatccactggctttctccagtgtggaagctttcccctccacctcccatagatcactggaaaggacccgaggcctcggttctaatccctggcttatcactaactgctgtgtggctttggcttgtcccttagtctctgtgagactgctgcaccctcatctgtcaaagatggaactgaacttagttgagctctgaggtccctgtggacttggcccctccacaccctcattatggcaactggacataaacttaacagaggacttcccagcaaaatgtcctcttcttcctacaaacaggctgtttctatatgtgcatgtttcatgctaagcacttctttcttgggtggagatggcaaaggcctctttctgctgagacaaagtgatttggagagtcacctggcccctgaagggggagtggtaggatccagccacccagtgtgcagtgaattggagcagggatctcagcacacagggaggtggggaggctccccctaacctcgggcacctgttgctcctccagactgcagcgcatgctcttagctcatcctcttaactggctctcaccgtgctcctggctttggtcaccacgtagctctcactccagcttcaggtagccatcagtaggacctggcaatatacactgatttggtttgttttatgtttgtctgcaggtgaaatccctaagggctctgccgtgtactccagccttgtgacccttgccttccaggaaccatgcaagaagcgcagccaccagaagtccttaaaacagcaggaaaggtgagcctgtcccccttttgtgcagctacctatctgctgaggagcatctgggcctcattcctccaagtccactggagggtccagaagagggagtcagagatgtatcctggtggagctgggagaaaggcagaaagcctttctgacagctatggaataccgttagccaaggtccacttggcccagcactaagcaaaagatgcgtagtttgcacagaaggttttgtgatactgcctctcaacagccccagcagcttgggaactagcaagagcacatttcttgcctcatcagctgtcctgagatggaaaactcagtggatataggaccctgattccgatgaaaggggcacgtggtcccaatgctggagctcctctggcaggttctaaaagcacactacggagcagcggtgccctgccggacactgctggcgggggctcagtgagcactactcacagatccacacctgaccctgttgggtcgagtcaggctgggctttggtctgcactgtagcacctgtgttctttgagttcacatcatgaatgtggtgatttcccagataccatctcaggcttaacctagcacatcctatttcttttcttctatgatatccaaattggactgacctcacttcaaagttgctgtcccattttgtcaccctatcttatctcggggaaattgcagactgatggccagaccaactctgttgaaattcttgcatagagcaaacctgtgctcatttttaagtggcatgggagaggccccaagcctagtaaagcctagtctgtgtcttcacagtgctggtagaatgtgtttgtgtgtataaatatatgatatagatttatatatgttgctaacgccacatattgaaggccaacataactggtggacagcgtgggtgacagaaaatgaaagtctttttggtgattgtttaagcaagatgtgtataaagaaataaatagtttttctttcactgctttgtttcccatttctgcaccaatcccttgacagtataaagaactggaaagaga

SEQ ID NO: 10973 - DNA, 1263 bp, Homo sapiens
ggagtagtttgatcttctgaagccgccttctctcaactcatcaaagtcattctctgtccagctttgttccattgctggtgcggagctgcattcctttggaggaggagaggcactctgatttttagaattttcagtttttctgttctttttttcccccatctttgtggttttatctacctgtagtctttgatgatagtgacatacagatggggttttggtgtgcatgtcctttctgtctgttagttttccttttaacagtcaggaccctcagctgcaggtctgttggagtttgctggaggtccaatccagaccctgtttgcctgggtatcagcagtggaggctgcagaacagcaaatattgctgaacagcaaatgttgctgtctgatcgttcctctggaggttttgtctcagaggggtacccggccgtgtgaggtgtcagtctgcccctactgggggatgcctcccagataggctacttgggagtcagggacccacttgaggaggcagtctgtccgttctcagatctcaaactctatgctgggagagccactactctcttcaaagctgtcagacagggacatttaagtctgcagaggtttctgctgccttttgtttggctatgccctgcccccagaggtggagtctacagaggcaggcaggcctccttgagctgcagtgggctccacccagtttgaacttccctgcagcttttttttcctactcaagcctcagcaatggcgggcacccctccccaagcctcactgccaccttgcagttcgatctcagactgctgtgctagcaaggagtgaggctcagtgggtgtgtgaccctctgagccaggcatgggatataatctcctagtgtgccgtttgttaagaacattgtaaaagtgctgtattagcatgggagtgacccaattttccaggtgccatctgccacagctttgcttggctatgaaagggaattccctgacccctggcacttcctgggtgaggcgatgccttgccctgcttcagctcatgctcggtgagctgcacccactgtcctgcacccactgtctgacaagccccagtgagaagaacccggtacctcaattggaaatgcagaaatcacccatcttccgcatcactcatgctgggagctgtagactggagctgttcctatttagccatcttggaacagcccctgggttttgactctttatccaatttgccagtctgtgttttttaattggggaatttatcccatttatgtttcaggtta

SEQ ID NO: 10974 - DNA, 1152 bp, Homo sapiens
aatgagggaagctgaaggagaaggtagcccatctggagtaacgcactagtaacatgtatcagtagatgagcccatctggctgccacacactagtaacatgtatcagtagatgagcaatgatgtgtgtaaatctacagtagcacatcctgcccttcattgaccttacacacatggaatcaatgtctgtgctatgctcttgcacctgccgcatctcatgtaaaatgtctgttgtgggatatgctgaccagagctatgcaaggaaaggaattctggtaaatgtagttccagtttggcttaaattgacacaactcgaatccaccacaatggcatgacaaaaggagacaaatacaggggcacacacacaaaaacccccaaaatacaacaacaatactcagagagagagagagagagagagagagagagagagagaaagagagagaaagagagaagcaaaaaccacaggggaaaagggcaagaaaatgttgaaagcagaaagtgagtagacgaataggaacaggtaacagattaacataattataatgctgaatcttaatttacatgcagtgaaatccaagaaacaaacaaatccacattacaaaatcccccaaaggcacagaagtaggaatcatcagtcacctttgcaagtgaaggtgaaggtaagataaatacaggaagagtaaatctacatctgtgtaagaagtagttagattatcaatcctctttccagttgtggacacttggtgattgctccttcaccactgagagagaagactggaagtttttcttttggagaaaacacaattcctaaaactgagagaaaacatgtatggttgaagaaggttgtaccatattgaaaatggggtaaggtatgaaaacatttatatagaaagaatgctaagacctggccttcttctcttcagctccgagatattccacagccaagcatacatcctctaaatcatagactctaacaagagcaagagaaagacaaaagacactaacgtgagcatttctcacaaaattcttcagccagataagcctacattaaagtccttggaaggcaaaccacagacatttgtttacaaataccaagtagtatttcagggaccactatcaaatacgagagaacatcccagaaagcactattacatg

SEQ ID NO: 10975 - DNA, 104 bp, Homo sapiens
atcccagcactctgggaggccgaggcgggtggatcacaaggtcaggagatcgagaccatcctggccaacattgtgaaacctcgtctctactaaaaatacaaaaa

SEQ ID NO: 10976 - DNA, 154 bp, Homo sapiens
ggcatggtggcgggcacctataatcccagctactcaggaggctgaggcaggagaatcacttgaacccaggaggcggaggttgcagtgagccgaggtggcaccactgcactccagcctgagtgacagagagagaccctgtctcaaaaaaaaaaaa

SEQ ID NO: 10977 - DNA, 459 bp, Homo sapiens; identical to SEQ ID NO: 10822

SEQ ID NO: 10978 - DNA, 337 bp, Homo sapiens
tgcccccagaggtggagcctacagaggcaggcaggcctccttgagctgtggtgggctccacccagtttgagcttcccagccactttgtttactactcaagcctcagcaatggtgggcgcccctcccctagcctcactgctgccttgcagtttgatttcagactgctgtgctagcaatgagtgaggctctgtgggtgtagggtcctccgagccatgtgcgggatataatctcctggtgtgccttttgttaagcccattggaaaagcgcagtattagtgtgggagtgacccaattttccaggtgctgtctgtcacccctttctttgactaggaaaggga

SEQ ID NO: 10979 - DNA, 3089 bp, Homo sapiens
taaagattctttttaacctaaaagacacccaatacttacaaattagaatttattataacttgtacttgaaaacctttaattttccaacttttctcaaatttctcctcagccttagaattggaaaccatgttggccaggctgatctcgaactcttgacctcagttgatccacccacctcggcctcccaaagtgctgggattacaggcgtgagctactgtgcccggcccagaggttaattcttacaaagttaaaataaccattgatgatgacttaaaagcttctttagaacggggttccattgaaaggataagtggaaattgggaggtaaaatggcttaaaacagaaatcaatcattttttgcaatttggcagtctgagttattcagcccagccttctcactgaaaacaataaaaatgctagataaaatgtgtttaaatctggccaggtgcactggctcactcctgtaatcccaacactttgggaggccgaggccggtggatcacctgaggtcaggagttcaagaccaacctggccaacatggtgaaacgctgtctctgctaaaaatacaaaaattagctgggcatggtggtgggcacctgtaatcccagctactcgggaggctgaggcaggagaatcgcttgaatccaggaggcagaggttgcagtgagccaagactgcactgttgcactccaacctgggcaacaagagcaaaactccgtctcaaaaaaaaaagtgtttaaatattctaaaaaaaaatcagacaagataatccaaaatctaaatgaaaacaggagccccaagataaacagagcactaacactacctttgcactatagaaatttgccaaatctgtagactttgaaattcacttgtgactgccaattaaaatttgtatgcacctaataaaatgccttaaaattttgtaaagcaaaagctggcgttgctacaagtaaatttacaatttcagattttaacatatttccttcagtgatagataaataacgggtcagttaattaattaaacctgaatgacatacgtagagaactgcatccaactactaaatacatattcttttaaatacatgtagaacatttaccaaaattaaccttacactgtgccataaaggaagtctcaacaaattgcagggattataatcacaaaaagataactcaaaagtcccaaatgtttagaaattaagcagtacatgtctgataaccccaggtcaaaattgtaatgcaaattttaaaatattttgagtagccaggcatgatggtttatgcctgtaatcccagcattttggaaggccaaagtgggcagatcacttgaactcaggggtttgacactggcctgggcaacatggcaaaacacatctctacaaaaaatacaaaaattagctgggcatggtggtgcgcgcctgtagtcccaggtactcaggaggctgaggtgtaagggtcacttgagcctgggaggcagaggttgcagtgagtcaagatcatgccactgcactccagcctgggtgacagagcaagactccgtctcaaaaaaaaaaaaaaaaaaaatttttttttgaacagaatgtaattgaaaatgtgataaaagagaaaaatgtaaaatgcagctagggccatgcttacaaggaaatgtgtaactttacatgtatatatcagaaaagtatatagctcaggaaataagaaagatttaaaaaacagcaaatcccaaaagaaagtagaagtaaatataaagaacgtaaattaatggaacagaaaacaaacacacaatacagaaaattattaatgataaagccaaacttaatttccttaaaatgccaaatactgttgataaagtacttaagactgataaagcaaaaaagaaaaggaagtacaaattatgaatatcaaaaaacctaaagacatttatttaaagagtaagactatcttatgagcaactttatatcaataaatttaaaaatttagatgaatggacaaattactgaaaaagcagtgtgccaaaaccaataaagaagaaatagaaaatctgtattaaagaaattaaattcatgttaaaatactttgcacaaagaaaacgccaggcccaggaattctttcaaatatttgaggaagaaatattaaccaattttatacaaaactcttccagaaaaaaaaagagcataaaaggaaacactttctagtttgttctctgcagccagcataactttgatatataagcctacaatgacattttaataaaaactaatctgtctcatgtacacagttgtaaaaatcctgaatgaaatattagcatatgaattcaacaatatataaaaagggtaatacaagttaggttcgttctaggaatgtaagatttaacattcaaaaatcaatcagggccaggcacggtggttcacacctgtaatcccagcactttgggaggctgaggtgagtggatcatttgaggtcaggagttcaagaccagcctggccaacatggtgaaaccccatctctactaaaaatagaaaaattagccgggagtagtggcgcatgcctgtagtcccagctactcaggaggctgagttgggagaattgcttgaacccaggaggaagaggttgcagtgagccaagattgcaccactgtactgcagcctgggcaacagagggagaccctgtctcaaaaaaaaaaaaagaaagaaacctgtctcacttatattaacagaataaagggggaaaaagaacctctatatttgtagaaaaggccattgataaaagtcaatacctgttcatgaaaaaaatgttttctacaaaaacacaatcaagaacatatttaacagtgaaacactataaactttcccttgaaatcaggaatgagacaagtgtgtctgctgttcccacttttatttaatatcatcaaagtatagctagcgcaatgaggaaaaagaactatcataattggaaaggaaaaaataaaactataattattcactgatgacagttacacagaaaattcaaaatagtttacaaataattagatctaatgtcacagttctgaatacatggtcaacataatataaatcagtcatttttaaaaacagtca

SEQ ID NO: 10980 - DNA, 103 bp, Homo sapiens
agtctgcctttctgccttcttaatgccggcaaagatcatttttgttccagggatgtacttcttgggattctccacatactccatcagtgtatcctccccccag

SEQ ID NO: 10981 - DNA, 735 bp, Homo sapiens
ttttttttatttcagtgtttctcattgaaatattaagtcacatctacatatatatatatgatgaacttgacattctcgtcagtgagctccgtgatccacgcggtaggctagttggcatacggcgttgcgcccaggtgccaccagcctccatgtcagctccgtggtgactcttcttacacattcttaaatacaagtcctttgtttctataggagatattctcaaagtgggatgtgaatctaagttatgaagcataacaattaaataacatccatacacccatcacttcatgcagaatgaaatatttctagtcctgtggaagctacaggactgctggaatttcttctctgatccagtccccttgcttcatcacagagatgaccactcttctgaaggttatgtccataatccctgtgcttttctttatagtctacatatatatctatgtatagagagggcaggtgtaggtataaatatagatatatctaaaaatatattattttgccatatttatttttaagctttaaaaaatgggtatcatgctgaagtagtatttaccttgaagcacattgtgatcaataaaaacaacaccatcacgcccagtggtataagcatggctcacacagctaatcctggcattttgggaggctgaggcaggaggagttcaagaccagctctaaaaaaaaagggaccaggagttcaagaccagctctacaaaaaatgagacccagacccta

SEQ ID NO: 10982 - DNA, 658 bp, Homo sapiens
tttttttttttgagatggagtctcactctattgcccaggctggagtacagtggcccaatcatagctcacttgtagccttaaactcctgggcccaaacgatcctcctgcctcagcctcctgagtagctaggactagaggtgtgcatcatcattcccagctaatgggtttttttttaaatttgtgtagcagcagggtctcactatattgcccaggctggtctcaaactcctggcctcaggcgatcctcccaccttagcctccaaaattgctagaattacaggcatgagccactgtgcctggaccagaaacttgcttttattaaaggatctcagaactcatcttcatagtactgacctcagtctgtaaatatgtatttattgtattaatgtctatgtacttcaaaatgttgtaagtggcatgagatctgaggttctgtctccctttgctcaccactatatctccagcatccatcaaaatttaagaatccctcagatgtttaacacatgaatttctatacctcagaagttacctgatcacagtatggttagtacaatggctaaattggagtcaaagtgatttggttttaaagtctgaagtactcaatacaattctgtaaggactaaatgatacaatgtccataacatgcttaggatagtttc

SEQ ID NO: 10983 - DNA, 901 bp, Homo sapiens
agaaagtcctactaaacagtactgccattccacattggcaccatcttggggcatcagtcatcccaggaaatggatggtcaaatatgtaaaataagcaattaaatctgagggtataaaacatgtatttcttttttttttttttttttttgagacagggtttagctgggtcacccaggctggaatgcagaggtgtaggcatggctcactgcagcctggagctcccaggctcaaatgatcctcctgcctcaataccctgagtagctgggacgacaggcactgccaccacgcccagctaaaaacatgaatttcaaagctatataaacctttgctatttcataacttaggtccactaagagaaaagcaagctaaaaatagggccaagggaagaatgtcatcatattcactttgcaaactatgagaaccaatacaaatagcaagacacacacatatatatacacatttatacggtctttttttctgactataaccctcccctcccctggactggagcatgatagagtaatgaaaaatgatctcaggttagattaaccagaatgctgagaaagcagacttcctctttaaccaatcatcaatcaacctgctacagtcattttttaaaaaaaaagtcacacgcgcactgccactgccactaccacactaccaccaagtactagccaggttgtggtaaaactggtgttctcccacaactcttctgaaatgcaaaaaaacagtagaaacatcttgaactctagccaaattatactacttgagactgcttccatcacataccctatttcctctgcctgtagtgtttttcttcaccatctttatctactgaaatcctgcttatacgatagtttagcctctggcttaaattccacctcctctgtgatgcctttcc

SEQ ID NO: 10984 - DNA, 824 bp, Homo sapiens
agctcagagaagtttgatcgtctgaagctttcttctctcaactcgtcaaagtcattcccgtccagctttgttctgttgctggcgaggagctgcgttcctttggaggaggagaggtgcttgatttttagaattttcagcttttgtgctctgttttttccccatctttgtggttttatctacctttggtctttgatgatggtgaccgatagatggggttttggtgtggatgtcctttctgtttgttagttttccttctaacagtcaggaccctcagctgcaggtctgttggagtttgctggaggtccactccagacgctgtttgcctgggtgtcagcagcggaggctgcagaatagcgaatattgctgaacagcaaatattgctgcctgatcattcctctggaagtttcgtctcagaggggtacctggctgtgtgaggtgtcagtctgcccctactgggaggtgcctcccagttaggctactcggaggtcagtgacccacttgaggaggcagtctgtccgttctcagatctcaaactccatgctgggagaaacactactctcttcaaagctgtcagacagggacatttaagtctgcagaggtttctgctgccttttgtttggctatgccctgcccccagaggtggagtctacagaggcaggcaggcctccttgagctgtggtgggctccacccagttcgagcttcctggccgctttgtttacctactcaagcctcagcaatggtgggtgcccctcccccaggcttgctgccaccttgcagttccatctcagactgctgtgcaagcaatgagtgaggctctgtgggc

SEQ ID NO: 10985 - DNA, 815 bp, Homo sapiens
ggagctgcatccctatggagggggagaggtactctgatttttagaattttcagtttttctgctctgttttttccccatctttgtggttttatctacctttggtctttgataatggtgacgtacagatggggttttggtgtggatgtcctttctgtttgttagttttccgtctagcagtcaggaccctcagctgcaggtctgttggagtttgctagaggtccactccagaccctatttgcctgggtatcagccgtggaggctgcagaacagcgaatattgctgaacagcaaatgttgctgcctgatcgttcctctggaagctttgtctcagaggggtacccggccgtgtgaagtgtcagtctgcccctactggggggtgcctcccagataggctgctcgggggtcagggactcacttgaggaggcagtctgtccattctcagatctcaaactctgtactgggagaaccactactcccttcaaagctgtcagacagggacatttaagtctgcagaggtttctgctgccttttgtttggctatgcccgccccagaggtggagtctacagaggcaggcaggcctccttgagctgcagtgggctccacccagttcgagcttctgggctgctttgtttacctactcaagcctcagcaatggcgggcgcccctcccccagcctcgctgccaccttgcagttctatctcagactgctgtgctagcaatgagtgaggctccgtgggcgtgggaccctccaagccatgcatgggatataatctcctggtgtgctgtttgctaagaccgttggaaaagtgcggtat

SEQ ID NO: 10986 - DNA, 236 bp, Homo sapiens
gaaggtgaatctctatgtctctcgatttatttgcaatggtgtgaacctgttaagtagtctctgaaaggctactgtttgcatggtgatgttggagattgtggtctgagggcaggccgttgggaagattgctgtaaggtaaggaagattcaagaacaagctggaatcccagcattttgggaggctgaggtgggcggatcacaaggtcaggagtttgagaacagcctggccaatatggt

SEQ ID NO: 10987 - DNA, 560 bp, Homo sapiens
ggttcaggccgctgaaccaggtacacaggtgttccatatgcctgcaattctgcctggttgtggagcagagaggcctccctgcaccacgatctcaggggaacagggtggtggacccagaaatgacacacacagatcagtttcaagttgtcaagcaggccctggctgcatgtcactgtccaggagaaactacagctgtaataattctcctcccatccagactagtaacggggaaagcacaattccagtgcctactgctaaggcactttccacagtactggctgtggaggcccctatcctgctccagagcaggtactctagtctctggcccgagactgaaatgcctgtgcagacacgctgctgcgtcaccaaggaatggctgagtttgtatgcactggtgttaaaagtggcatcctgctctcaattctgggtctgggaaaatgtctgcagcttttccaagtgtctttccctcacagtgtctccaagctttttcctcacccacattcgattcctagatttcagttcctggagcaaagggagagtggggggaacatgttaacact

SEQ ID NO: 10988 - DNA, 2648 bp, Homo sapiens
gtggacacccaccaatctccccacatttcggcactaccacagtaatttctgagagcacctatccctcgggacctggtgtactgcatcctaagcctattctcgatcctctgggctatggtaatgtcactgtgaccgagtcttacaccacctctgacactctgaagccctctgtgcacgttcacgataaccgaccagcatcaaacgtggtagtgacagagagagtggtcggcccaatctctggcgctgatttgcatggaatgttagagatgcctgacttgcgagatgggtcgaatgttatagtgacagaaagggtaatagcaccaagctctagtctacccacctctctgactatccatcatcctagagagtcttcaaatgtggtagtgacagaaagagtaatccaaccaacttccggcatgataggtagtctgagtatgcaccccgagttagccaatgcccacaatgtcattgtgacagagagggttgtttctggtgctggcgtaactggaattagtggcaccactgggatcagcggtggcataggcagcagtggcctggttggcaccagcatgggtgctgggagcggtgccctgagtggagctggcataagtggtggtggcattggcctgagcagcttgggagggacagccagcattggccacatgaggagttcctctgaccatcactttaaccaaaccattgggtccgcctcccctagcacagctcgaagtcgaatcacaaagtatagtaccgtgcaatatagcaagtagtcaggaccccagctcactttttcatagtcattgtggtttagatccaattcccaccactaaaaaaccaacaatgtgatttataacgcacaacttcgtgctcaggtcatctaggagcaaggtgagaaatcacaatgagaaaaataaatggaaacaccactgctaggggagagctctccttagcattcataaacttttctcttatattaggactaaggaactaaaacttgaggcagagtcttctttgtgcctgagtggcctgtagtccatctccagcatgtaactggccttacgatggcaattggcatcattctccttgctctgttttgcttttccatatagctcgagcaaaattcaaaaagaactaaatatgcaatatatgttcatatctatgggaaaaatctaaaatgtgtgccagatgccctgttggtttcacagataacataaataaaaattcaaccacagatttatacaagggttaaccattttttttaagtttgactacatagtcaagtccacaagccatcaagcactcctaccttaattattgcactagagaaaataaattccaaattaggaagtgtttcctaggaggaaaattccattagagagtggcaataggatgaggtttcttcagggtaaactagcaatgcctgagcctgaaccttaatgtggggcctcagttaaatctcctgtggagtcaaggattcttctgattctagtgtgtgtttagtgatagatgtagtcttgacgaatattgcttactggtgaggttgaggaatatcacactcgtctttccctttaccactgtggttttgacttaagaaagcaaaactcactaagtttacttctcgaattgaagcaagtgaggcctgacatggttgtcatcactagtggcaaatgaccttccaagtaagcagatgggaactgaattgtgttttcaggttttgtttttagtaggtgatattcattcgtatccagctctttattacatagctctgaagttaaaatgatttacataggccgagctgtggacaaaaaaaaaagaagcagcagcttgtagtatgcttaagctttggggaatttttttttaaggggatctaaaaaaatgtttttagaacatgtaaaatgtttaatggtgaaagttggaaaagaattcttctgtaaagtaataccatgctaattattcgcttttagtaagtaaagtagtggttgctttagcaaacctctgctgcccttttgcaggaatcaaccaggaacctttagcagaattgacaatatggtgttgataagcatgaaataataatagaaacctattctgctagtttatctcaccctctaatttttctcactagcataaattttaaattcctgatttgatttgtcaataagatcttggcttatatatgctgatttataggtagtgtccaaattatatagtataacatatttttctagtttcaaaatttagtaatgtcctatttatgatatatcatttctgtgtgtttgctatgtagtattacccaattaaaaatctctaaaaagaattaaagcattctaagaaaaaggtaaatttactattgcatggtacagaaattttttctttcttaaatacaatgttactataagctcactaaaatgaaactctatatgacaaaataaaattagaaaaaaatttgccctggagttgtgaattatatacaacttttaaagaatttaccccaattactcaaatttcccaggaaattacaaagccaaagaatattcaacttcctccactggtcaaaagaggataggagtgaattactgaacctagagctattttgctctgtaacaacagataaggctaatattttaaaagccacagtatacatcttcttt

SEQ ID NO: 10989 - DNA, 783 bp, Homo sapiens; identical to SEQ ID NO: 10864

SEQ ID NO: 10990 - DNA, 293 bp, Homo sapiens
cctgaatcaaacattcttaagttataaacccttaaaggaaatcagtgtaaccatgagcaattgcatattatcatcctctcatatagtctccataaatctatgtgcactcattttactcatatctttgtgtctcaggctcaccatctaaatgcagaagcaagatcaagaacacggaataaccacagaggtgcctctactgaagagcaaatggtaggaaaattgagtatagtatgtatcatctttggttcaaaagcatcttattccgtgtgaagaagttattcttccatcattcc

SEQ ID NO: 10991 - DNA, 658 bp, Homo sapiens
tttttttttttgagatggagtctcactctattgcccaggctggagtacagtggcccaatcatagctcacttgtagccttaaactcctgggcccaaacgatcctcctgcctcagcctcctgagtagctaggactagaggtgtgcatcatcattcccagctaatgggtttttttttaaatttgtgtagcagcagggtctcactatattgcccaggctggtctcaaactcctggcctcaggcgatcctcccaccttagcctccaaaattgctagaattacaggcatgagccactgtgcctggaccagaaacttgcttttattaaaggatctcagaactcatcttcatagtactgacctcagtctgtaaatatgtatttattgtattaatgtctatgtacttcaaaatgttgtaagtggcatgagatctgaggttctgtctccctttgctcaccactatatctgcagcatccatcaaaatttaagaatccctcagatgtttaacacatgaatttctatacctcagaagttacctgatcacagtatggttagtacaatggctaaattggagtcaaagtgatttggttttaaagtctgaagtactcaatacaattctgtaaggactaaatgatacaatgtccataacatgcttaggatagtttc

SEQ ID NO: 10992 - DNA, 191 bp, Homo sapiens
cattctccgtccagctttgttccattgctggtgaggagctgcattcctttggaggatatgaggcactctgatttttagaattttcagcttttctgctctggtttctccccatctttgtggtttttatctacctttggtctttgatgatggtgacgtacagatggggttttggtgtgtatgtcctttctgtt

SEQ ID NO: 10993 - DNA, 124 bp, Homo sapiens
ctcctgagtagctggggttacaggcatgcaccaccacgcctggctaattttgtatttttagtagagatggggtttctccatgttggtcaggctggtctcgaactctcgatctcaggtgatctgc

SEQ ID NO: 10994 - DNA, 742 bp, Homo sapiens
gacatttaacttgttctcacagcttggctattgcaaataatgctgcaatgaatatctcataagtcttgtatatgtccatacaagatcatgaaaatggacatgtctctgggtattttgaattggtgggacaattttgcttaagggtaggcttagtgggtggctctacatttgagagttctaattcccattcctatatatatttcttttctttttatttatttattttttgagatggggttctctgtcactcaggctggagtgcagtggcacaaacatggcttactgcagcctcagcctcctgggctcaagtgatcctcccatctcagcctcccaagaagctgggaccacaggcatgtgtcaccatgcctgactaattttttttttaattttctgtaagcatggggtcttgctatgttgcctaggctggtctcaaactcctgggctcaagtgatcctcatgcctcagcctcccaaagtgctgggattacatgtgtaagccaccacacccagtcttatatatgtatttctaattttgccttagccatgcccttaaaaactaattatactttcaactagtttttttttccaccttcagtctgtggtattgttcacattttgaaaacaatacctacagtaacctgtgaggtaggacatgatagtgttttattggaccccttttactttatgaattggaaaaattaaatttgcatgtagtttgtaaaaaaaaataaagaaaaaagaaa

SEQ ID NO: 10995 - DNA, 105 bp, Homo sapiens
gagacggagttttgctcttgttgcccagactggagtgcaatggcgcgatctcggctcaccgcaacctccacctcccaggttcaagcaattctcctgcctcagcct

SEQ ID NO: 10996 - DNA, 762 bp, Homo sapiens
tcctgcctttgcctcctgagtagctgggactacaggtgcctgccaacatgcccagctaattttttgtatgttttagtagagatggggtttcactgtgttagccaggatggtttcgatctcctgaccttgtgatccacctgccttggcctccaaagtgctgggattacaggcatgagccactgtgcccagccataaactactcttatcttatgtagaaaggctgaatgatgagccaatcaaaaataataactacaacaactttttcaagaaataggcagtgctgtaagatataaatagatactacaaagagttaaaaagcaggtggaggaagttgaggtgtagaacttttattagttcatttttgcttgtttgtttgtttatctaaacagtgttacatttttatcaggttaaaatagtgggtactgagacagtatttgcaagtccatgtgggaatctcaagtcaaaatacataaaatggatacaaaaaaaatagaaagcaagaaactaaactgtatcaacagagaaaatcaccttcactagaaggaagacaggaaggaaagaagaccacaaaacaaccagaaaacaaatgagaaaatggaaggagtaagtccttacttatcaataataacattgaatgtaaatggaataaaccatccaatcaaaacacagagtggctgaatggaggaaaaagcaagatctattgaccgttgcctgcaagaaacacacttcacctatagagacacacatagactgaatgtaaaa

SEQ ID NO: 10997 - DNA, 118 bp, Homo sapiens
cttctctgtattggttattctagttatacattcttctaaatttttttcaaagttttcaacttctttgcctttggtttgaatgtcctcccatagcttggagtaatttgatcgtctgaag

SEQ ID NO: 10998 - DNA, 101 bp, Homo sapiens
aggctggagtatagtggtgcaatctgggctcactgcaacctctgcctcccgggttcaagtaattcttctgcctcagcctcccaagtagctaggactacagg

SEQ ID NO: 10999 - DNA, 98 bp, Homo sapiens
caatgtcactgttctcaccaactttactgcttaaaaatgataattttaagtaaaaatgtgatttacataaacatataagtatattttttttaaatttc

SEQ ID NO: 11000 - DNA, 970 bp, Homo sapiens
tttttttttttacaaaagcacactgaaaccactcttggttaataccaaagctatttacacttgcatagtaattctttaataattatcatgattcaatttttgcacagataactaagtataaatttatatgtttcaggattatgaaatgtgagtgatttctttcaaactaaaatatctaatgtagttaagactaaattatgttcattctagggttcgagtgtttatgttcctgtttccagggctagtggatcattgcatgaaataagagcctatgggaaaagaaatctcagaggaagaagggaaaagaaaaacgaggtgcacatgtttggttcaaggccagttgtcccagatgctagagaagataaaacatacctccaattgtcttctatcccaggcttcatgggcttaagcttgagtcctaaggcaaaggatctacaggtaatgagcaagtgaaatctaaaagcagctgcttgtctatggaatcaccctgggacatggagagcccaaggcatcagcagaattggcactggcagcagcagggcttgcagtgttggcagcagcactaatgacagcagcggtgcagttagtgataacaacatatttggcagcagcaagagttcatttaactccttatacattagctccctgcacctcgagcatacacagccccggtctcgatggtaacagagatggcagacaacagtagaagccgcagcagcagcagtttcttctgtgctaaccagcagcactttcgtctcccagtgactgagagcagagcaaaggaagtaggaaaatagaaaagttgaggaaacataatggtcatgacgggatggaacttacagccagccataactgggttaaaactaaggactgccatttaattatcacacagtttttaaaagtgagttacagtgacactgctcaaatttaacctctctatgcctcaaatttattgtgtataagatggaaa

SEQ ID NO: 11001 - DNA, 1190 bp, Homo sapiens
gggaggggcagctataaaggccgcgccggggccacgaggagcagagccggcgccgtcaccgcccgcattgccgctcccagtcccgcgctcggcacgacatgaaatcccccgacgaggtgctacgcgagggcgagttggagaagcgcagcgacagcctcttccagctatggaagaagaagcgcggggtgctcacctccgaccgcctgagcctgttccccgccagcccccgcgcgcgccccaaggagctgcgcttccactccatcctcaaggtggactgcgtggagcgcacgggcaagtacgtgtacttcaccatcgtcaccaccgaccacaaggagatcgacttccgctgcgcgggcgagagctgctggaacgcggccatcgcgctggcgctcatcgatttccagaaccgccgcgccctgcaggactttcgcagccgccaggaacgcaccgcacccgccgcacccgccgaggacgccgtggctgccgcggccgccgcaccctccgagccctcggagccctccaggccatccccgcagcccaaaccccgcacgccatgagcccgccgcggtgagtgactgcccgcgtcccggcgagccctgcgccctaacagccgggaccggggcctttgggaaaaaccacttcaaccccagacggcggggcgggggcgctgcacctccttgggggacccggcgccccgcaatcgcgctggccccctcgcgtcagggtctcggggcccctcaggctggacccggaccggccctggcacagctctctgacccagtcctttccccacagggccatacgctggacgagtcggaccgaggctaggacgtggccggcgctctccagccctgcagcagaagaacttcccgtgcgcgcggatcctcgctccgttgcacgggcgccttaagttattggactatctaatatctatgtatttatttcgctggttctttgtagtcacatattttatagtcttaatatcttgtttttgcatcactgtgcccattgcaaataaatcacttggccagtttgcttttctaccatccggctgtggctcagtgagactcctgctgggagggtggaggcccaggaatgggcgggcaggacaccctcatccagtcctgcggggctggtgtgaaaggcgctgggaaccggctttgaatgaataaatgaatcgtgtcatctgc

SEQ ID NO: 11002 - DNA, 1190 bp, Homo sapiens; identical to SEQ ID NO: 11001

SEQ ID NO: 11003 - DNA, 1190 bp, Homo sapiens; identical to SEQ ID NO: 11001

SEQ ID NO: 11004 - DNA, 2613 bp, Homo sapiens
gacactgccccccatcagggacaaaggtcacccctgggctggcccccatcctctattggggaccttgctcctccatgccctggggaggaagaagagaaataagggtgggtcattgactgggtgctcttggtactcctgcaagaatgtgtgatgagggagaagcagggacccatccaccccagcacaaacatgcttgcacttctctttcctcactaagggctctcagggtccacgtcaaggctccagcagtcgtccaccattgctccctacgtcacactccggaggggtctcaatgccgaaagcagcaaggcgaccttccctgtgagtggccttgagctgtcgaggacctccctgctccttcacatggggagggagggtctcccagggggacagtaactggccatcccttcagccctggggatggcctctggggtggcctcagcccctcctgagctccctgtcacccactgtccaccaaggagggcatcctgcctttctctctggcctgtcagggtggcaggagggagctcaagaagcctgcaccctgggttctggcctcactggacaggcctgagcctaagtgtctgcatctgcagaatgggtgctactcagaaagctcctgagggttgggggcatcgtgttgcttagaggaaatagttctctaaggccaagaggagcccaactagagtgtgcatgtgtgtgagagagagacaacgggaatgcagccagcagggtggctgtcctctgcgtgcccagcccagctgttctgtgtctctcttgcctgcctcctcttcctcagagacctaagagtgccttggagcgcctgtactcaggggatcaccagcgaggcaagatgagtgcagaggagcagctggagcgcatgaagcgacaccagaaggccctggtccgagagcgcaagaggacactgggccaaggggagaggacgggcctgccctcatctcgctacctcagccggccgctccctggagatcttggctcagtatgttaggaggggccaggcagcggggcagggacagggagccgagtgcccctcagagtcccccaaacacaagcacatcacacctcccagtgagagagctgtccattgacctacatggttcagagaacaccccacggggctgtttgtccacgacccaggctggacgaatgcctggtcagagggtgacctgaaccagagctggagtgaggatcaaacaggcccaggagcctgaggaaatacccagtcagtcctcccagccgcgatggagaggggcctttgcaggcgttcggaatctcggctgaattcaggacctgggaatacagggttcagagaggagaggaggaagatggtgacatgatttggttagaagcacaagcaaactgatcagcctcccagacctgccagcagatgctgtgtgagggtgatggagcacggggtcacacccctgccccaagggccactggtctccctgggcttgcagtgcagaggcctcagggtgtctgggattgctggggaggcctgtgctgccccctggtggcgcttcctggcgctgcgccctgtccacagtcaccttaggtccctttggaaacattccatttgacttttccctgttgtttgaaatcccatgtttccctaaacctctagcctgattgttctttccctaattcattgcacaagctcctttgcttttagtgttaccgctcattgcctctctaatcctgcctgattgtgtttacagaagcttctgatttgcattgaacatgctctaactggcctgtgctacttattaccgggcttgtaatagcggttcttgtctccatagcctgttgagtgttcccagatgtgactcacctttctgctgccctcttcatgcaggcctactgactcataattcacttgtcccaaaagccaccccacaagcctgagccaacctgctgcctgacgccacagtcattggcagaggtctgggcattattaatttataaaaatccatgctttacacctggacagtagacagggacttcagagattgcacgtttgaatacattctcccaagactgaggttgttcggttttaattcctgtagtccaatcacacaatttcttatggaaaaccttttgtgtttctggtatttaataacttgaagggatagcaaaatatactgtgtattcagagggcctctctgcagctgctagctcagacaccaaaggggtaaggcccaggacattcatatctttaaaagctgcaaacctggtaacctttaaacttttaaaacaaatgtcatatggggtaacactgaccttttataatttgatgtctcaaatgtagagattatctaaaaatcgtaacttgaataccttgtaatttttctcttaaaaaagaagacttgtgtaagtctctgcatcaacgccaataaacatgttgcttaataataatggattggcgtggttcttccccaggataccttatagagtctagtgaacttttcctgtttgtggaaacaatcaggctgggtttaaatgaggacttgtctctatttggagcatttgtgagcgtgtaaggaaatgagtgttttctttgtgaatcattaaattgattttttcatctttgga

SEQ ID NO: 11005 - DNA, 2614 bp, Homo sapiens
gacactgccccccatcagggacaaaggtcacccctgggctggcccccatcctctattggggaccttgctcctccatgccctggggaggaagaagagaaataagggtgggtcattgactgggtgctcttggtactcctgcaagaatgtgtgatgagggagaagcagggacccatccaccccagcacaaacatgcttgcacttctctttcctcactaagggctctcagggtccacgtcaaggctccagcagtcgtccaccattgctccctacgtcacactccggaggggtctcaatgccgaaagcagcaaggcgaccttccctgtgagtggccttgagctgtcgaggacctccctgctccttcacatggggagggagggtctcccagggggacagtaactggccatcccttcagccctggggatggcctctggggtggcctcagcccctcctgagctccctgtcacccactgtccaccaaggagggcatcctgcctttctctctggcctgtcagggtggcaggagggagctcaagaagcctgcaccctgggttctggcctcactggacaggcctgagcctaagtgtctgcatctgcagaatgggtgctactcagaaagctcctgagggttgggggcatcgtgttgcttagaggaaatagttctctaaggccaagaggagcccaactagagtgtgcatgtgtgtgagagagagacaacgggaatgcagccagcagggtggctgtcctctgcgtgcccagcccagctgttctgtgtctctcttgcctgcctcctcttcctcagagacctaagagtgccttggagcgcctgtactcaggggatcaccagcgaggcaagatgagtgcagaggagcagctggagcgcatgaagcgacaccagaaggccctggtccgagagcgcaagaggacactgggccaaggggagaggacgggcctgccctcatctcgctacctcagccggccgctccctggagatcttggctcagtatgttaggaggggccaggcagcggggcagggacagggagccgagtgcccctcagagtcccccaaacacaagcacatcacacctcccagtgagagagctgtccattgacctacatggttcagagaacaccccacggggctgtttgtccacgacccaggctggacgaatgcctggtcagagggtgacctgaaccagagctggagtgaggatcaaacaggcccaggagcctgaggaaatacccagtcagtcctcccagccgcgatggagaggggcctttgcaggcgttcggaatctcggctgaattcaggacctgggaatacagggttcagagaggagaggaggaagatggtgacatgatttggttagaagcacaagcaaactgatcagcctcccagacctgccagcagatgctgtgtgagggtgatggagcacggggtcacaccccctgccccaagggccactggtctccctgggcttgcagtgcagaggcctcagggtgtctgggattgctggggaggcctgtgctgccccctggtggcgcttcctggcgctgcgccctgtccacagtcaccttaggtccctttggaaacattccatttgacttttccctgttgtttgaaatcccatgtttccctaaacctctagcctgattgttctttccctaattcattgcacaagctcctttgcttttagtgttaccgctcattgcctctctaatcctgcctgattgtgtttacagaagcttctgatttgcattgaacatgctctaactggcctgtgctacttattaccgggcttgtaatagcggttcttgtctccatagcctgttgagtgttcccagatgtgactcacctttctgctgccctcttcatgcaggcctactgactcataattcacttgtcccaaaagccaccccacaagcctgagccaacctgctgcctgacgccacagtcattggcagaggtctgggcattattaatttataaaaatccatgctttacacctggacagtagacagggacttcagagattgcacgtttgaatacattctcccaagactgaggttgttcggttttaattcctgtagtccaatcacacaatttcttatggaaaaccttttgtgtttctggtatttaataacttgaagggatagcaaaatatactgtgtattcagagggcctctctgcagctgctagctcagacaccaaaggggtaaggcccaggacattcatatctttaaaagctgcaaacctggtaacctttaaacttttaaaacaaatgtcatatggggtaacactgaccttttataatttgatgtctcaaatgtagagattatctaaaaatcgtaacttgaataccttgtaatttttctcttaaaaaagaagacttgtgtaagtctctgcatcaacgccaataaacatgttgcttaataataatggattggcgtggttcttccccaggataccttatagagtctagtgaacttttcctgtttgtggaaacaatcaggctgggtttaaatgaggacttgtctctatttggagcatttgtgagcgtgtaaggaaatgagtgttttctttgtgaatcattaaattgattttttcatctttgga

SEQ ID NO: 11006 - DNA, 349 bp, Homo sapiens
taagcatctgctttggttttgctcaggggaagagaggctttgagcctgctctgttctcaacaacctgctcagcggtcaaaggcctgtgaggatgcaggtcctgggtcaacaggaagtcaccacggagctggacagtcatggttggatcttatcggttagattttccctcttgggaagcttgttacaaagttgatactgtgaaacagccttagaaacattccatttgatttagcatttcaattttatatgatttagtttttttttctaatttaaagaaaacatctatctcaaatagatgggtctcatacagcagtttttctgcctcattggctccaagctgcttttgctt

SEQ ID NO: 11007 - DNA, 10766 bp, Homo sapiens
gttgcacagacagatggagcagtaccgagaccagccccagcacttggagaagattgcctaccagcagaagttgctgcaggaggaccttgtccatatccgagctgagctctccagagagtccactgtgcgtagagggtggcagacctgtctccctcaggacgggctgagcaaggggctgcttttctcccctcccaagatgtagttgagttggtgtccagaggcaagagtcctgaaatagcagagcttctccagtagcagaactgccacctgacagtagataaccttgtctgggggtgacatgtctgcctgcacgtgtgccttaggctgcttactacagcgactcttgaaggccagtgacacccagtgggccagattcttcagagctgcctgcaaggctgttcccctgatctgtgtgcagttaattccaagttgtcagaatctgctttttcacttttcagtctgttgtggtacaggccagggctgagaatcaaagcatcctgagggtggaagagtgaacagtgcaggtgaccagggtcagagcacaaatgagaggatgccacgctctttcctgctcctctctctctcccaccaggcctgcccggtctccttccctcttcccctggctgggtcagcatggtcaggagtacaggtgttcgtgaggccttccaagggggcaggggataactaagaaccggaagcattgtcttggccaacaggagatggaaaatgcttggaacgaatacctgaagttggagaatgatgtggaacagctgaagcagaccctgcaggagcaacacagaagagccttttttttccaggtgacctgatacctgtccatctcttctgagctcttgttttttgttttttgttttttgtttttccaagagacttcacctgtgggggttgtgagcactgctcagagtccttctccccctcagccccagatgctccacccctgtaaaggagccaccccaagctctcccttgaggatcccttccccaagccaggctgtgatgagaagcttcaccccattccccttgccttgctgctctcaaagacaagctcttgggtgttttagaaagggctttacttctgatcatttggtgtcatcagtaatcacagagtgatccatgttcctgtagttcttggccccatcttaggctgctagctcatcacttagacagcagcaggaagtgcccaccccttccctcctctgattcctggagatagatgttatcacacctctaccagagggagacagtgtgaattctgtcctttgaggcactctggtctccaggcagtcatctgcatttctggaggccaggctgggtgatgcccatctctgtgacccctataccactcaggaaagttggccttagagccctgccacttcacccttaaaaaatcaggccaccctattgatagctgcctctgtcccccagaagtgagacagtgaaaggccctgtgtggtttttcttcttccaaattgggttccaaattgcccagtgttcccccactgtggtgcttaaccaggtttccaccccaccctcacaattttttaagtggaaaataacctgtttttttctcccctgacttaagatctatatcttctcctttcagggccctgacataataagtgtgtttgaattcagcaagcattaattgaggcttcttgtgtatgaggcaccatgctgggccacttttggtgctgggcttgttaactgataagatagttctaaccaaggctctttgtttaagtgatttaatgagtatgttgactctccagacattagcctcaccccagaaagttgaaggaaattctggagtagggtgtaggtgtgtgggccctgaggcttttccaagggccctgctgtccctctattcatgcagagatggttcccagagagccctgcctaggaccacgtggaggagaccctcgcctgtggctcagggctggtctacaagactctccccagcacttgtctatctcctgctgctgttggggtcgttttcctcccataatttctcttcatccacactggctaacatttcactactcttttttgtagccgcagcatttaccgtaatgacttgaaaatactaggtgaatgttgttgacaaagtccttcaattatttctggttatgagtttataaaactgcccaggttatacctattttcttggacttcagtgatctgaatttttttagcagtaatttttttttgctttatttttagcagtaatttttttaagcttttcattctttgttcctgtaattacacaaatggtacatgaatacgtgtctttgaaaagaccaaaacagtaagaagcaaaaacaaaaaatgatataaaagttcctcttccccctctccctttctgcccctcccatcaccctccctatgtgtcatcagtgctatctattggtggcattgccttctagaccattttctatgcattttcaaaaatatgcacatgcatagaatcatatgatttattcaggaatgggagcaggtaaaaggcttacttgaagaggatcacacttacacattatttggcaactcactttttttgtcataacctgatatcgtggaaatctttccaggacagttaatccaaaatttatgctgcccaataaaatataaattaattaaaagtaactgaaattcaaaatgtattcctcatttacaccagactcattcaagtgctccatacccacatgcagctatcggctactgtcttggacagcagggattataggtttctatcatctcagaaaggtgtattgggcagcgccagtctaaggaaattaaacttgtttttcttgactgttacatactatttcatagtctgggtgttttctactttatttagccattcctcttctgatagcatttaattattttcagcgttttgcttttataaatggtggtgtgataaggatttgtgtaactgccttttcacattgtttacaagtatctgtgtaagataggctcctaggagtggacttgctggggttggaatgagtatacatcttaaaagttgatggatatgccaaaccaccttctaaagggctgcacctgtttatcttcctacccacagcaaatgaaagtactggacctatttgctcacatccttgtcagcacttgtaattgatctttttagttttactagtctactaaatggcatcttgctttaatttgcttttatttagttattagcaggttaaatatctattcgtatgattattggccatttgtgtctttactgtgccttatgtcatggtgatttaacatatagcaggcctagaatccttttttttttcccccttccctcccaaaagcaaatagatacactgtgacaggtctttgtcacagacgccctggagaactcagccccatgacttactctcagataggccagcctggagcctgcatcttgatttccaccttgcctgtggcactgctcacactttccctaagtggcacagtaacctgggaagctaacaaagccctgctttgagcaggcactgtgctagcttctttggtgtcattctaggccaggcaggctgttagagccctagaaaaatcatcagcactgcagatgcacttgcagccccatgtgcagattctcagtaacagggcttagaaattcgcctccctgtagtcaggtttggctgcaggaaaatagccttttcagtcaaggctaaaacagtgagttcaaggctttgctgaaagcagcacataggagcctttctacccagtgtggtgggaggaggcaggaatgaaactccaccccctcatttcccccaaaattcccctcccctcattatgaaggcccaaaattccatcaccgttggagaaggatagggactctccagccttttttattctctgctctctgttcttttctcacatgtgggggtgacagaaaggcatcaggggggcaagaaagtggctgacaggggagctttgccagggagctatggaggaggaagaggactgcgtttaatccctttctttacctgttctcaacactcagcttggggacttcagccctagaggtcatcctcttacatacacatgccctgggctcggtaatacacctgtctgttttaggatgctcatgctttggcatggagctgagaatcaaacccattattagcttgccagacctgaggatgtgctttatgttggaggggttgagagagagagtgagaactgtgagccccaccttgggacaggaggctttggacttctgttgtcctggctgttggaaagtatttgctcagggaatttttacatgactggtcctttattcacgtagcatgtatgcactgagaacctgctaagtgccaggccctgtagggatggatcaatgagcagtattgggcaggtccatgaggctcatgcagtgcaagaactcttccagttgaggggtagctaggtgcctcgagaggagatggggtgggaagcctgcctttattttagtccatggggtgggaccaaggctatctttcccccattttaacttaaaagtcaagagaatactacatttgatgtttaaacagccccgtcaagagatggctgtagtcccttaaccccatcagacccctctgcacctcttttagatcctcttcccattcgattttggttgtcagaatgcacatgatcatatagcctaggtccttccccattgtatgtagatatgtatttttttggagtttataatttttttttaattgatatataaaaattgtactcttattgtgctaaaaaaattaacagctttatcatatatttcacatgtcataaaattaaccctttcggctggtcatggtggctcacgcctataatcccagcactttgggaggccaaagcaggaggatcacttggagccgggagttcaagaccatcctgggcaacataacaagacccctgtctctacaaaaactgaaaaagaaaaagaaaaactagccaggcatggtggcatgctccggtactcctagctacttgggaggccaaggcgagaggatcacttgagcccaggagtttgaggttacggtgaccttgatcataccactgcacttcaacctgggcaacaaagtgaccctatctcaaataaataagtaaataagtaaattcacccttctaaagtatacgtttcagtggtttttagtatactcacagcatgatacagccgtcaccgcaatcaattttataacacttcatcatcccccagtagaaatcctgtatccattaacagtcactctcattcccccagcgtcccctctgcccttgccaaacactaatctactttctgtttctactgatttgactagtctggacatttcttataaatggaattatgtaatgtgtggctttttgtgactggcttctttccctcacatgttttcaaggatcatccttgttgtagcatgcatcagcacttcattcctttttattgccaactaatattccattcactactgtatttttaactaaacctcaaatatcgggttcagctgactttttaaaaatgttttttatatcctagagatggtgtaaactctagtccttgccttcccttctgtcatgattacataggacagtgcctttcaaaaaaactgtggtaaaggccaggtgcagtggctcacgcctgtaatcccagtactttgggaggccgaggcaggcagatcatctgaggtcaggagttcaagaccagcctggccaatgtggtgaaaccgcgtctctactgaaaatacaagaattagccagatgtggtggtgggcgcctgtaattcagctacctggttgggaggctgaggcaggagaaatgcttgaacctgggaggtggaggttgcagtgagccgagatggcgccattgtactctagcctgggcaacaggagtgaaactccatctcaaaaaaaaaaaaaaaaaaaaaggaaaaaactgtggtaaaatacgtagaacataaatttaccacctttattattattattttgttgagacagggtctcactcttttgcccaggctggagtgcagtgatatgatctcggctcactgcaacctctgcctcccaggttcaagcgattctcatgcctcagcctcccaagtagctgggattacaggcgcacaccaccatgcctggctaatttttgtatttatagtagagatggggtttcacatgttggccaggctggtctcaaactcttggcctcaagtgtttacctccttggcctcccaaagtgcggggataacagacaagagccattgcacccgactcatcttgattatttttaagtatacagttcagtggtgttaagtacattcacatttttgtgcgcccaatctccagaactttctatcctgtataactgaaacattatacacattaaatagttctgcattcttccctctcccccgcccccagcaaccactgttgtacttcctgtctctacgaaattgactactctaagtatgtcatacagtattttagcggaatggcacagtgtttacggcagtctgtttttaaattaggtaggcaagctggactgctgaaagctactctgaaatttctccctggatcgtgggcattttccttgtctatgcttacctagaaagctatgaagcaggcttggttctagcactagtggggtttccagaggggatgctgcccctcagggcggggggctctgtctgaaatggtaggataagtcctaagaagaaacttgtaaggagctaagaaggcaaacccaccacttcgtcttcctcaggagaaatcgcagatacagaaagatctatggagaattgaagatgtcactgcaggcctgagtgcaaataaagagaacttcagaattctagtggagtcagtaaaaaatccgggtgagatgttcatcttcctggatgtgggggatctgattgggggcagggtggtgggagggtggaaggctgggaaccaggtgggtgggatggcccttggggaggttgagtcttcgaggtgctaaattactccactcatcctccaaggaagggggtctttgttccatcccgtgctttgtttccttctatgccccttagagagaaaaacggtgcctttgtttcctcacccgcctgtgccttcactctcaacttctgagagcaagccgcccccacagcccagtcctcccaccagccctgtgcggacccctctggaggttcgactcttcccccagctgcaaacctacgtgccgtaccgacctcacccaccccagctgaggaaagtgacatccccccttcagtcaccaactaaggcgaagcccaaagttgtaagtagtgataactaggagctgaatgccattgtttcctctctgtcctcagattaccttctcctgggagagaaactcctgggaaaacttggggaaatggacccagccagcgtcctaaaggagtccttagtcacaagcagttaaaaagtagtatttccctgctattgtgccttagactgtcagaactggaagagccctggaagatgatctaacccaactctcccattttgcagttgggaaaactgaggcccaccaagaagaagtgagcgtgctgagtagggtggagtttgtgatctgcagagaggtgtgtggctgtggacgaagctgtccccatgcaaacctttgtgcaaatccgcagggggctctcctgcagttacacagcctgtgggcagtgagttcagtccagtggaaaagtgtccttcccttcacccgccgctgagcactgggctgggttgtgaggatgctttgatctttaaaataacctcgcagagtatacacagcaagagcagtatccccattccacagagaagaaaactaagagcctaaattgttgacatttgctcaatgtctccatgctaactagtgaatccaatcacatctcctggcccttctcttttattctgtgccatctgccatctaattgggctttcagtcccagatccggtctgtggcctctgtggctgactgggccagcaccttggtttgcctggcatagaaaggggccaagctcttggcagagtctgggaatgcaggagactttaaagaaataggagatgtggtcaggtcccaagagagctcacgcctccagggccaggccagccttggctggagaacacaatgaggctggtcccagtgcagggaagccatagaagagtggacctcggaatggggccctccagatttttgccaacaaaggcttggaggagacttacctgggcattgtgtgtgcctggacctctgatgaggtcagtgcacagtgctgggtaaaacacatgagttctgctgccctggtcttcaccatctacctgcttccagccatagtccagggcccagagctggacccaggatatggcccagcacccagccagagagtcactgtggatttcagcatcttgagatctccttcccaatcccagatccaagaggtggactggagctctagccctaaaacaggagagggaaaattccaaaacaaacagcaggaatgtctggggcagatggctgccaacatagggcagaatgctgccagctgggacagggcgtaggggaaaaaggcactggcataggagctgggacacccagattccgggactgattctctcactgtgtcctcaggcaagtccgtcccttccctgagcctcctcattttcccttttgtagatggtcacagaggctcctcctcagcttggtcatctgtggctctcaggcagggctttctcagcttgggtgagcatcaggatcaccaggagaggtcctctctcctaggaatatatgtgtgtttgccagttttaccatttgttttattacttacttgtttttaacacttataagatgggcgtggtgctgcttgcctgtcgtcccagctactgggaaggctaaggcaggaggatcatttgagcccaggagtttgaggctgcagtgacctgtgattacacaactgcactccagcctgggcaatacagcaagaccctgtctcaaaacaaaataaaacccatttatatttgtgaaacaataatatccatcctgaaaatgacataaaacaggattatataatttaacaaataacaataaagagaccacctgttttataccaacagctagactaagaaatagaacactgccagcaaccagaagcctgtgggttctttcccaggccaagctgcttcctgtctgccagaagtaaccacaatcttgactttttggataataatccccttgcctttttttttttttttaattttagtacctgtgttgactcctaaacactgtgattatgctggtatataattctatatactattttgtgtcttgcatcttttcttcaacattatgtttgtgagatttatatacattgttgcatgtggctatagttcttttatttttatttgacttattttcttgagtttaatgtctttttaaaaataaattagataatattctcaaaagatacaaaagcaaaagatataaaaaagtacataataacatgtctccttcccaccctctgcctccagacattccattcaatcaaaggcaatcaatgttttatgtttatctttctggggagctttttagaaattggtgattcggatatcttgtcaggattggaaactgtggatcctcagagaaccagtgcgtatcttaggcagatggcttaactttcacacatcagtgaagattgttgataaacctttgctttggagtgctctttcctgaactttccaagagcttggagtgccctttcctgaactctgcaaaattcttaaaaacaaaaccaaattagaccgagaaagagggaatttaggaggtggaaggcatgatggtcgttagtcctgcgagtgggtgttcatggcaaccaggggccggtctgttgatatgtagaggaaccacagccctcacagaacactgtggacagggagtttcaaggaaaatgttgcattcatcacattctagggaatgaactgcatggtaggcagtgagtcactcatcctgaccgcctgttctgtctgagtcaggaaggaggaaatattttgtaaccatgcacatttctgatagaaaggccaggaggatgtagactctgtccttgttcaggtccccaccttgctgaaggcgccagagctcgtgtagggccaatgagccggctcaggctgagcactgctgagtgggtagatgttactctccaggtaggtggtgctgtgataagcatggaagtcagggcagggttagcagcctgcctgcgatgtgcactccagatgagcggagggagcagttcagcacagcaccgagggcatggacccaggagacctgagtcctgggtttcaggacacagttatacaggtaacacttggaggaatagaaactgtatacctctgaggggatagaggagcagagcatgtcccttcttcactgctccgccaggggaagtgtgagtgctccttggctgaggcagtcatgttctgtggctctgatgtggcctgttcctaccctttaaacctccactgtggcagtacctagcagtcctccctccagctccgtctcgctgaccactggtctggttctctttctcagcaggaagatgaagcacctcccaggcccccactccccgaactctacagcccagaggaccagcccccggctgtgccgcctctgccaagagaggccaccatcatccggcacacatctgtgcggggcctcaagcggcagtcagacgagaggaagcgagaccgggagctggggcagtgtgtg

SEQ ID NO: 11008 - DNA, 3995 bp, Homo sapiens
caggagaaatcgcagatacagaaagatctatggagaattgaagatgtcactgcaggcctgagtgcaaataaagagaacttcagaattctagtggagtcagtaaaaaatccgggtgagatgttcatcttcctggatgtgggggatctgattgggggcagggtggtgggagggtggaaggctgggaaccaggtgggtgggatggcccttggggaggttgagtcttcgaggtgctaaattactccactcatcctccaaggaagggggtctttgttccatcccgtgctttgtttccttctatgccccttagagagaaaaacggtgcctttgtttcctcacccgcctgtgccttcactctcaacttctgagagcaagccgcccccacagcccagtcctcccaccagccctgtgcggacccctctggaggttcgactcttcccccagctgcaaacctacgtgccgtaccgacctcacccaccccagctgaggaaagtgacatccccccttcagtcaccaactaaggcgaagcccaaagttgtaagtagtgataactaggagctgaatgccattgtttcctctctgtcctcagattaccttctcctgggagagaaactcctgggaaaacttggggaaatggacccagccagcgtcctaaaggagtccttagtcacaagcagttaaaaagtagtatttccctgctattgtgccttagactgtcagaactggaagagccctggaagatgatctaacccaactctcccattttgcagttgggaaaactgaggcccaccaagaagaagtgagcgtgctgagtagggtggagtttgtgatctgcagagaggtgtgtggctgtggacgaagctgtccccatgcaaacctttgtgcaaatccgcagggggctctcctgcagttacacagcctgtgggcagtgagttcagtccagtggaaaagtgtccttcccttcacccgccgctgagcactgggctgggttgtgaggatgctttgatctttaaaataacctcgcagagtatacacagcaagagcagtatccccattccacagagaagaaaactaagagcctaaattgttgacatttgctcaatgtctccatgctaactagtgaatccaatcacatctcctggcccttctcttttattctgtgccatctgccatctaattgggctttcagtcccagatccggtctgtggcctctgtggctgactgggccagcaccttggtttgcctggcatagaaaggggccaagctcttggcagagtctgggaatgcaggagactttaaagaaataggagatgtggtcaggtcccaagagagctcacgcctccagggccaggccagccttggctggagaacacaatgaggctggtcccagtgcagggaagccatagaagagtggacctcggaatggggccctccagatttttgccaacaaaggcttggaggagacttacctgggcattgtgtgtgcctggacctctgatgaggtcagtgcacagtgctgggtaaaacacatgagttctgctgccctggtcttcaccatctacctgcttccagccatagtccagggcccagagctggacccaggatatggcccagcacccagccagagagtcactgtggatttcagcatcttgagatctccttcccaatcccagatccaagaggtggactggagctctagccctaaaacaggagagggaaaattccaaaacaaacagcaggaatgtctggggcagatggctgccaacatagggcagaatgctgccagctgggacagggcgtaggggaaaaaggcactggcataggagctgggacacccagattccgggactgattctctcactgtgtcctcaggcaagtccgtcccttccctgagcctcctcattttcccttttgtagatggtcacagaggctcctcctcagcttggtcatctgtggctctcaggcagggctttctcagcttgggtgagcatcaggatcaccaggagaggtcctctctcctaggaatatatgtgtgtttgccagttttaccatttgttttattacttacttgtttttaacacttataagatgggcgtggtgctgcttgcctgtcgtcccagctactgggaaggctaaggcaggaggatcatttgagcccaggagtttgaggctgcagtgacctgtgattacacaactgcactccagcctgggcaatacagcaagaccctgtctcaaaacaaaataaaacccatttatatttgtgaaacaataatatccatcctgaaaatgacataaaacaggattatataatttaacaaataacaataaagagaccacctgttttataccaacagctagactaagaaatagaacactgccagcaaccagaagcctgtgggttctttcccaggccaagctgcttcctgtctgccagaagtaaccacaatcttgactttttggataataatccccttgcctttttttttttttttaattttagtacctgtgttgactcctaaacactgtgattatgctggtatataattctatatactattttgtgtcttgcatcttttcttcaacattatgtttgtgagatttatatacattgttgcatgtggctatagttcttttatttttatttgacttattttcttgagtttaatgtctttttaaaaataaattagataatattctcaaaagatacaaaagcaaaagatataaaaaagtacataataacatgtctccttcccaccctctgcctccagacattccattcaatcaaaggcaatcaatgttttatgtttatctttctggggagctttttagaaattggtgattcggatatcttgtcaggattggaaactgtggatcctcagagaaccagtgcgtatcttaggcagatggcttaactttcacacatcagtgaagattgttgataaacctttgctttggagtgctctttcctgaactttccaagagcttggagtgccctttcctgaactctgcaaaattcttaaaaacaaaaccaaattagaccgagaaagagggaatttaggaggtggaaggcatgatggtcgttagtcctgcgagtgggtgttcatggcaaccaggggccggtctgttgatatgtagaggaaccacagccctcacagaacactgtggacagggagtttcaaggaaaatgttgcattcatcacattctagggaatgaactgcatggtaggcagtgagtcactcatcctgaccgcctgttctgtctgagtcaggaaggaggaaatattttgtaaccatgcacatttctgatagaaaggccaggaggatgtagactctgtccttgttcaggtccccaccttgctgaaggcgccagagctcgtgtagggccaatgagccggctcaggctgagcactgctgagtgggtagatgttactctccaggtaggtggtgctgtgataagcatggaagtcagggcagggttagcagcctgcctgcgatgtgcactccagatgagcggagggagcagttcagcacagcaccgagggcatggacccaggagacctgagtcctgggtttcaggacacagttatacaggtaacacttggaggaatagaaactgtatacctctgaggggatagaggagcagagcatgtcccttcttcactgctccgccaggggaagtgtgagtgctccttggctgaggcagtcatgttctgtggctctgatgtggcctgttcctaccctttaaacctccactgtggcagtacctagcagtcctccctccagctccgtctcgctgaccactggtctggttctctttctcagcaggaagatgaagcacctcccaggcccccactccccgaactctacagcccagaggaccagcccccggctgtgccgcctctgccaagagaggccaccatcatccggcacacatctgtgcggggcctcaagcggcagtcagacgagaggaagcgagaccgggagctggggcagtgtgt

SEQ ID NO: 11009 - DNA, 349 bp, Homo sapiens; identical to SEQ ID NO: 11006

SEQ ID NO: 11010 - DNA, 3612 bp, Homo sapiens
ttttttgatagcattttttgatagtagccatcctaatgggtgtgaggtgctgccatcatttctttttgaaatcaagtgtccagtgcatgtggtctgaaaacttaataggattctaaagtgtccacatcacacctgaaatgtttgcgtaggtctgtactgtcaggcaaacgtgtgcactcacacatcactctcacctctgtctgtgcccggagcatgattccagttggttcttggtgtcgaggttgtcagtgacggtgacctggtacctggtgagaccccatttgccggaagcatgtgtgcactgctcccttgggaagatagaggcctctgaatgtgtttgtttcttggcttcagaaccacgaccatgcctgcatcgcctgtcggatcatctatcggtcagacgagcaccaccctcccatcctgcccccaaaggcagacctgaccatcggcctgcacggggagtgggtgagccagcgctgtgaggtgcgccccgaagtcctcttcctcacccgccacttcatcttccatgacaacaacaacacctgggagggccactactaccactactcagacccggtgtgcaagcaccccaccttctccatctacgcccggggccgctacagccgcggcgtcctctcgtccagggtcatgggaggcaccgagttcgtgttcaaaggtaggattcccatctcaagtcccagtatcacagccaataaacagccctgtgacatttttgtggaggcagagctgagggaaaggacctcttttctgcctgagttcccaggaaagaaattggggagtcatttctgcctcagtccttcccaacaccctctgagtttctccctgctcaaaatggatcaggtggacagcctccacttgcaggcctgaatgcgagaggagtccacgccactgcctgtgggaagttgccagccagggaggatgttactgggaatgaaatctctggccaggtgcggaggctcatgcctataatcccaacactttgggaaaccaaggcaggaggatctcatgaggccagaagtttgaaaccagcctgggcaacatagtgaggccctaactctataaaaaaataaaataaattagctggatgtggtggcatgtgcctgtagtcccagctgttctggaggctgagctaggaggatcgcttgagcccaggaagttgaggctacagtaagatatgatcgtgccactgtactccagcctgggcaacagagaaagaccctgtctctaaaaaacaaaaaaaggaatctcaagtctgcactttgtgttctttatacacaactctggcagattccatgctgcccctctaataacactgcgtttgcttgcatgccacagtgctttcctgagtgagcaataaagaggtgttagtgacacctcaggtgctcagagctgtcctttccaaccctgagcttgtcgtgtaattgagaggttgtcacctgcttggaggtgggagcatctgtgggaaggttcaggctgtgtccttatcactaaacgaggaggggaggaaggagctgcaccaggctgctagcaacaaagcagggcttgtggttgctatttttaaaaggttgcttttttttccccctaagtttgagcatctttgtaaaatggtgtcagccctatcataccaaataaagagggatagcctcgatcccaggtgactcctccaggatggcgttccaggcttcagtcccattactataaaaatgttactgttaacccagaaagtcctggaagactttagccctccttttgggtagcaaggtttgctcaggaatacaggccctttgagaaacttaattgaaagcaagcaatctttacttgactccaccctgaagctcatcgtgttatacacggaagtggccccctggagggaccttcagaagcaattctccacaaaagctgggatttgtatttagtttattcactcacatttttcttgcttgcagcctaacttattttagatgcctgatgtatgggcccataggaatgtgtgagaatgccaaccagaataggtgtttgacaccaaaacttttagaaacccgaaaaccttttgataaaagcaaaattccagcctttgttgaatatttttctttcaatcccaacgagtcagcatcaccaaataaaactccttaggagcactccgagctgtagttttatttgttgcctgcaggcactcccagctgtattctgggctcagtgtttctacaccagatggtctgtgttgcgtggccacacctgcagcatatcggtgtgactgccacccagatcaacaggttgaactcttctccgcctgacagtgctttgatgactactgccgtcagatgggtgggtctgtaggtgggattgtttttggaaaagaaagccttgtctagttagagtgtggccagtgttttctgggtgggtttctggatcccacgcctactccctggagtcatggaactctcctttctcctttgcagtgaatcacatgaaggtcacccccatggatgcggccacagcctcactgctcaacgtcttcaacgggaatgagtgcggggccgagggctcctggcaggtgggcatccagcaggatgtgacccacaccaatggctgcgtggccctgggcatcaaactacctcacacggagtacgagatcttcaaaatggaacaggatgcccgggggcgctatctgctgttcaacggtcagaggcccagcgacgggtccagcccagacaggccagagaagagagccacgtcctaccagatgcccttggtccagtgtgcctcctcttcgccgagggcagaggacctcgcagaagacagtggaagcagcctgtatggccgggcccctgggaggcacacctggtccctgctgctggctgcacttgcctgccttgtccctctgctgcattggaacatccgcagatagaagttttagaaagttctatttttccaaaccaggattccttactattgacagatttgctttaccaaaagaaaagacatttattcttttgatgcacttgaatgccagagaactgtccttctttttctcctctccctccctcccagcccctgagtcatgaacagcaaggagtgtttgaagtttctgctttgaactccgtccagcctgatccctggcctgagcaacttcacaacagtaattgcactttaagacagcctagagttctgggcgagcgtgtttggtagcagggatgaaagctagggcctcttatttttttctcttaattattattatatttctgagttaaacttagaagaaacaactatcaagctacaacttttcctgccattttcctgtggttgcagcctgtcttcctttgaaattgttttactctctgagttttatatgctggaatccaatgcagagttggtttgggactgtgatcaagacaccttttattaataaagaagagacacaggtgtagatatgtatatacaaaaagatgtacggtctggccaaaccaccttcccagcctttatgcaaaaaaaggggagaatcaaagctttcatttcagaaatgttgcgtggaaaagtatctgtaattaaagtttcgaagtaatttaacctatttttacatcatttgtctta

SEQ ID NO: 11011 - DNA, 3614 bp, Homo sapiens
ttttttgatagcattttttgatagtagccatcctaatgggtgtgaggtgctgccatcatttctttttgaaatcaagtgtccagtgcatgtggtctgaaaacttaataggattctaaagtgtccacatcacacctgaaatgtttgcataggtctgtactgtcaggcaaacgtgtgcactcacacatcactctcacctctgtctgtgcccggagcatgattccagttggttcttggtgtcgaggttgtcagtgatggtgatctggtgcctggtgagaccccatttgccggaagcatgtgtgcactgctcccttgggaagatagaggcctctgaatgtgtttgtttcttggcttcagaaccacgaccatgcctgcatcgcctgtcggatcatctatcggtcagacgagcaccaccctcccatcctgcccccaaaggcagacctgaccatcggcctgcacggggagtgggtgagccagcgctgtgaggtgcgccccgaagtcctcttcctcacccgccacttcatcttccatgacaacaacaacacctgggagggccactactaccactactcagacccggtgtgcaagcaccccaccttctccatctacgcccggggccgctacagccgcggcgtcctctcgtccagggtcatgggaggcaccgagttcgtgttcaaaggtaggattcccatctcaagtcccagtatcacagccaataaacagccctgtgacatttttgtggaggcagagctgagggaaaggacctcttttctgcctgagttcccaggaaagaaattggggagtcatttctgcctcagtccttcccaacgccctctgagtttctccctgctcaaaatggatcaggtggacagcctccacttgcaggcctgaatgcgagaggagtccacgccactgcctgtgggaagttgccagccagggaggatgttactgggaatgaaatctctggccaggtgcggaggctcatgcctgtaatcccaacactttgggaaaccaaggcaggaggatctcatgaggccagaagtttgaaaccagcctgggcaacatagtgaggccctaactctataaaaaaataaaataaattagctggatgtggtggcatgtgcctgtagtcccagctgttctggaggctgagctaggaggatcgcttgagcccaggaagttgaggctacagtaagatatgatcatgccactgtactccagcctgggcaacagagaaagaccctgtctctaaaaaacaaaaaaagaaatctcaagtctgcactttgtgttctttatacacaactctggcagattccatgctgcccctctaataacactgcgtttgcttgcatgccacagtgctttcctgagtgagcaataaagaggtgttagtgacacctcaggtgctcagagctgtcctttccaaccctgagcttgtcgtgtaattgagaggttgtcacctgcttggaggtgggagcatctgtgggaaggttcaggctgtgtccttatcactaaacgaggaggggaggaaggagctgcaccaggctgctagcaacaaagcagggcttgtggttgctatttttaaaaggttgctttttttttccccctaagtttgagcatctttgtaaaatggtgtcagccctatcataccaaataaagagggatagcctcgatcccaggtgactcctccaggatggcgttccagggttcagtcccattactataaaaatgtttctgttaacccagaaagtcctggaagactttagccctccttttgggtagcaaggtttgctccaggaatacaggccctttgagaaacttaattgaaagcaagcaatctttacttgactccaccctgaagctcatcgtgttatacacggaagtggccccctggagggaccttcagaagcaattctccacaaaagctgggatttgtatttaatttattcactcacatttttcttgcttgcagcctaacttattttagatgcctgatgtatgggcccataggaatgtgtgagaatgccaaccagaataggtgtttgacaccaaaacttttagaaacccgaaaaccttttgataaaagcaaaattccagcctttgttgaatatttttctttcaatcccaacgagtcagcatcaccaaataaaactccttaggagcactccgagctgtagttttatttgttgcctgcaggcactcccagctgtattctgggctcagtgtttctacaccagatggtctgtgttgcatggccacacctgcagcatatcggtgtgactgccacccagatcaacaggttgaactcttctccgcctgacagtgctttgatgactactgctgtcagatgggtgggtctgtaggtgggattgtttttggaaaagaaagccttgtctagttagagtgtggccagtgttttctgggtgggtttctggatcccacgcctactccctggagtcatggaactctcctttctcctttgcagtgaatcacatgaaggtcacccccatggatgcggccacagcctcactgctcaacgtcttcaacgggaatgagtgcggggccgagggctcctggcaggtgggcatccagcaggatgtgacccacaccaatggctgcgtggccctgggcatcaaactacctcacacggagtacgagatcttcaaaatggaacaggatgcccgggggcgctatctgctgttcaacggtcagaggcccagcgacgggtccagcccagacaggccagagaagagagccacgtcctaccagatgcccttggtccagtgtgcctcctcttcgccgagggcagaggacctcgcagaagacagtggaagcagcctgtatggccgggcccctgggaggcacacctggtccctgctgctggctgcacttgcctgccttgtccctctgctgcattggaacatccgcagatagaagttttagaaagttctatttttccaaaccaggattccttactattgacagatttgctttaccaaaagaaaagacatttattcttttgatgcacttgaatgccagagaactgtccttctttttctcctctccctccctcccagcccctgagtcatgaacagcaaggagtgtttgaagtttctgctttgaactccgtccagcctgatccctggcctgagcaacttcacaacagtaattgcactttaagacagcctagagttctggacgagcgtgtttggtagcagggatgaaagctagggcctcttatttttttctcttaattattattatatttctgagttaaacttagaagaaacaactatcaagctacaacttttcctgccattttcctgtggttgcagcctgtcttcctttgaaattgttttactctctgagttttatatgctggaatccaatgcagagttggtttgggactgtgatcaagacaccttttattaataaagaagagacacaggtgtagatatgtatatacaaaaagatgtacggtctggccaaaccaccttcccagcctttatgcaaaaaaaggggagaatcaaagctttcatttcagaaatgttgcgtggaaaagtatctgtaattaaagtttcgaagtaatttaacctatttttacatcatttgtctta

SEQ ID NO: 11012 - DNA, 3613 bp, Homo sapiens
ttttttgatagcattttttgatagtagccatcctaatgggtgtgaggtgctgccatcatttctttttgaaatcaagtgtccagtgcatgtggtctgaaaacttaataggattctaaagtgtccacatcacacctgaaatgtttgcgtaggtctgtactgtcaggcaaacgtgtgcactcacacatcactctcacctctgtctgtgcccggagcatgattccagttggttcttggtgtcgaggttgtcagtgacggtgacctggtacctggtgagaccccatttgccggaagcatgtgtgcactgctcccttgggaagatagaggcctctgaatgtgtttgtttcttggcttcagaaccacgaccatgcctgcatcgcctgtcggatcatctatcggtcagacgagcaccaccctcccatcctgcccccaaaggcagacctgaccatcggcctgcacggggagtgggtgagccagcgctgtgaggtgcgccccgaagtcctcttcctcacccgccacttcatcttccatgacaacaacaacacctgggagggccactactaccactactcagacccggtgtgcaagcaccccaccttctccatctacgcccggggccgctacagccgcggcgtcctctcgtccagggtcatgggaggcaccgagttcgtgttcaaaggtaggattcccatctcaagtcccagtatcacagccaataaacagccctgtgacatttttgtggaggcagagctgagggaaaggacctcttttctgcctgagttcccaggaaagaaattggggagtcatttctgcctcagtccttcccaacaccctctgagtttctccctgctcaaaatggatcaggtggacagcctccacttgcaggcctgaatgcgagaggagtccacgccactgcctgtgggaagttgccagccagggaggatgttactgggaatgaaatctctggccaggtgcggaggctcatgcctataatcccaacactttgggaaaccaaggcaggaggatctcatgaggccagaagtttgaaaccagcctgggcaacatagtgaggccctaactctataaaaaaataaaataaattagctggatgtggtggcatgtgcctgtagtcccagctgttctggaggctgagctaggaggatcgcttgagcccaggaagttgaggctacagtaagatatgatcgtgccactgtactccagcctgggcaacagagaaagaccctgtctctaaaaaacaaaaaaaggaatctcaagtctgcactttgtgttctttatacacaactctggcagattccatgctgcccctctaataacactgcgtttgcttgcatgccacagtgctttcctgagtgagcaataaagaggtgttagtgacacctcaggtgctcagagctgtcctttccaaccctgagcttgtcgtgtaattgagaggttgtcacctgcttggaggtgggagcatctgtgggaaggttcaggctgtgtccttatcactaaacgaggaggggaggaaggagctgcaccaggctgctagcaacaaagcagggcttgtggttgctatttttaaaaggttgcttttttttccccctaagtttgagcatctttgtaaaatggtgtcagccctatcataccaaataaagagggatagcctcgatcccaggtgactcctccaggatggcgttccagggttcagtcccattactataaaaatgtttctgttaacccagaaagtcctggaagactttagccctccttttgggtagcaaggtttgctccaggaatacaggccctttgagaaacttaattgaaagcaagcaatctttacttgactccaccctgaagctcatcgtgttatacacggaagtggccccctggagggaccttcagaagcaattctccacaaaagctgggatttgtatttagtttattcactcacatttttcttgcttgcagcctaacttattttagatgcctgatgtatgggcccataggaatgtgtgagaatgccaaccagaataggtgtttgacaccaaaacttttagaaacccgaaaaccttttgataaaagcaaaattccagcctttgttgaatatttttctttcaatcccaacgagtcagcatcaccaaataaaactccttaggagcactccgagctgtagttttatttgttgcctgcaggcactcccagctgtattctgggctcagtgtttctacaccagatggtctgtgttgcgtggccacacctgcagcatatcggtgtgactgccacccagatcaacaggttgaactcttctccgcctgacagtgctttgatgactactgccgtcagatgggtgggtctgtaggtgggattgtttttggaaaagaaagccttgtctagttagagtgtggccagtgttttctgggtgggtttctggatcccacgcctactccctggagtcatggaactctcctttctcctttgcagtgaatcacatgaaggtcacccccatggatgcggccacagcctcactgctcaacgtcttcaacgggaatgagtgcggggccgagggctcctggcaggtgggcatccagcaggatgtgacccacaccaatggctgcgtggccctgggcatcaaactacctcacacggagtacgagatcttcaaaatggaacaggatgcccgggggcgctatctgctgttcaacggtcagaggcccagcgacgggtccagcccagacaggccagagaagagagccacgtcctaccagatgcccttggtccagtgtgcctcctcttcgccgagggcagaggacctcgcagaagacagtggaagcagcctgtatggccgggcccctgggaggcacacctggtccctgctgctggctgcacttgcctgccttgtccctctgctgcattggaacatccgcagatagaagttttagaaagttctatttttccaaaccaggattccttactattgacagatttgctttaccaaaagaaaagacatttattcttttgatgcacttgaatgccagagaactgtccttctttttctcctctccctccctcccagcccctgagtcatgaacagcaaggagtgtttgaagtttctgctttgaactccgtccagcctgatccctggcctgagcaacttcacaacagtaattgcactttaagacagcctagagttctgggcgagcgtgtttggtagcagggatgaaagctagggcctcttatttttttctcttaattattattatatttctgagttaaacttagaagaaacaactatcaagctacaacttttcctgccattttcctgtggttgcagcctgtcttcctttgaaattgttttactctctgagttttatatgctggaatccaatgcagagttggtttgggactgtgatcaagacaccttttattaataaagaagagacacaggtgtagatatgtatatacaaaaagatgtacggtctggccaaaccaccttcccagcctttatgcaaaaaaaggggagaatcaaagctttcatttcagaaatgttgcgtggaaaagtatctgtaattaaagtttcgaagtaatttaacctatttttacatcatttgtctta

SEQ ID NO: 11013 - DNA, 923 bp, Homo sapiens
tctcagtagacaggatcattaggaaaatagcaacatcaatcctgttacacaggagcagtgacacaggggtggctgcagtgtggtacatgccacacaaatgatagagaaagtgcccgttcattgcagtttcctcttcctgggggacctgagccctgactcactgtcttattaggggcaggcggaagaagctgcactctggcatccatgccaccttctaagatgaacatgcggagacagaacttcagctgctcagagagagtgcagtgggcatggtctgccctgggggcttgctccattacaccctgacttggcatgcaaccgagtctttgtgtaaagccatcctgtcattgcacatactggctcactcagtgtctttcctgctgctgatgtggctctgtgctggcagtttcagggtcagtgtgctgctttcctagggacattagaagggcgcaggagtacatgtctgcccattcctttggagtatcgcagatgatgctatacgataccaagtgttaccgctcacagagactgaaagggaaatgggagtaaccgaaagccagatggaacgaaagcaaacatggaaaccatgatcacggcaaagagccatccttgtatttaagaagtaactttggccaggtgtgatggctcacgccgtaaccccagcactttgggagaccaaggagggtggatcacgaggtcaggagatcaagaccatcctggctaacactgtgaaatgctgtctctactaaaaatacaaaaaattagccaggcgtggtggtgggcacctgtagtcccagctactcgggaggctgaggcaggagaatggcatgaacctgggaggtggagcttgcagtgagccgagattgtgccactgcgctcgagcctgggcaacagagcgagactccatctcaaaaaaaaaaaaa

SEQ ID NO: 11014 - DNA, 138 bp, Homo sapiens
gctagagaacaagtgtgtgcctgcccagtcagtgggtgcccctcagccttggccacaggacagatgtgaggccatgaactgatggcatgggagcacggggctggggtggcccagccgtccccagaacactgagctacc

SEQ ID NO: 11015 - DNA, 924 bp, Homo sapiens
tctcagtagacaggatcattaggaaaatagcaacatcaatcctgttacacaggagcagtgacacgggtggctgcagtgtggtacatgccacacaaatgatagagaaagtgcccgttcattgcagtttcctcttcctgggggacctgagccctgactcactgtcttattaggggcaggcggaagaagctgcactctggcatccatgccaccttctaagatgaacatgcagagacagaacttcagctgctcagagagagtgcagtgggcatggtctgccctgggggcttgctccattacaccctgacttggcatgcaaccgagtctttgtgtaaagccatcctgtcattgcacatactggctcactcagtgtctttcctgctgctgatgtggctctgtgctggcagtttcagggtcagtgtgctgctttcctagggacattagaagggcgcaggagtgcatgtctgcccattcctttggagtatcgcagatgatgctatacgataccaagtgttaccgctcacagagactgggaaagggaaatgggagtaaccgaaagccagatggaacgaaagcaaacatggaaaccatgatcacggcaaagagccatccttgtatttaagaagtaactttggccaggtgtgatggctcacgccgtaaccccagcactttgggagaccaaggagggtggatcacgaggtcaggagatcaagaccatcctggctaacactgtgaaatgctgtctctactaaaaatacaaaaaattagccaggcgtggtggtgggcacctgtagtcccagctactcgggaggctgaggcaggagaatggcatgaacctgggaggtggagcttgcagtgagccgagattgtgccactgcgctcgagcctgggcaacagagcgagactccatctcaaaaaaaaaaaaaa

SEQ ID NO: 11016 - DNA, 925 bp, Homo sapiens
tctcagtagacaggatcattaggaaaatagcaacatcaatcctgttacacaggagcagtgacacaggggtggctgcagtgtggtacatgccacacaaatgatagagaaagtgcccgttcattgcagtttcctcttcctgggggacctgagccctgactcactgtcttattaggggcaggcggaagaagctgcactctggcatccatgccaccttctaagatgaacatgcggagacagaacttcagctgctcagagagagtgcagtgggcatggtctgccctgggggcttgctccattacaccctgacttggcatgcaaccgagtctttgtgtaaagccatcctgtcattgcacatactggctcactcagtgtctttcctgctgctgatgtggctctgtgctggcagtttcagggtcagtgtgctgctttcctagggacattagaagggcgcaggagtacatgtctgcccattcctttggagtatcgcagatgatgctatacgataccaagtgttaccgctcacagagactgggaaagggaaatgggagtaaccgaaagccagatggaacgaaagcaaacatggaaaccatgatcacggcaaagagccatccttgtatttaagaagtaactttggccaggtgtgatggctcacgccgtaaccccagcactttgggagaccaaggagggtggatcacgaggtcaggagatcaagaccatcctggctaacactgtgaaatgctgtctctactaaaaatacaaaaaattagccaggcgtggtggtgggcacctgtagtcccagctactcgggaggctgaggcaggagaatggcatgaacctgggaggtggagcttgcagtgagccgagattgtgccactgcgctcgagcctgggcaacagagcgagactccatctcaaaaaaaaaaaaa

SEQ ID NO: 11017 - DNA, 138 bp, Homo sapiens; identical to SEQ ID NO: 11014

SEQ ID NO: 11018 - DNA, 8793 bp, Homo sapiens
tttgcgctcggaccttcgccagaggggccgggacatcatgacggtgggagccaggctccgaagcaaggcggagagcagcctcctgcgccgcgggccccgagggcgagggcgaaccgagggggacgaggaggcggccgccatcctggagcacctggagtacgcggacgaggcggaggcggcggccgagagcgggacgagcgcggcggacgagcggggcccggggacccggggcgcgcggagggtgcacttcgccctcctgcccgagcgctacgagccactggaggagccggcgccgagcgagcagcccaggaagaggtaccggaggaagctgaagaagtacggcaaggtaggggcactgcgccaccactgcccggggggcgcgggtgtggtgtcccgcgggggagcgggagccgggtccttaccatcgactcacccagtttctccgggctgcacctgcgacccctccgcccccgctcccattccctcgccggagggaagccgcgagttgcgagtcgtgatagaaacttaaatcgggggttgcgctgggtggtccctgctgtgcctgctattgcgctcctggcttcttaagaacattctcaaggggctcctaccgcggtggtttttatgtaagatcaggaatcagtttcctgattacagatgggaatactgaagcgttagcgcggcaggtgacttggagaaggtggcccagttggaaagaaagaaattgcaacccagtgtatttgttttccagtaacatcccctccaggatatcccactagttgagaaatgtttgggttactctcccaaatattcccaaggttatttcccgagcctgggagcgcaacaaatacataaataggcgctcgttgaatttttctcgtctagccaactatcagtgtactctggggccttcaaaacattctgccgtttgtctcggggagatggggttaggaagaatgaatatgggagaaaatgacagtttccttcgcggaaatcaaagcgcagatgcagttcccgggtgtctctgcatggaaacagtcgaagctgctgccggaagctctgctggcctggacaaggccacccagaataaagtcacagaagttactgtgtcctggccaaaggccacgggccccatctgatttattgtctatttatctgtgttgcccaatgccgtcttacacctgaagccattcagtctccatgcctgggagcttaggtttatcatcctctttaaaggtatgtcagcagcttctggagcagaatacaggaaggggtaaaactataaagttgggtctttcaggcttagagccctgctaggacgattcatctctgctttgggtcccagttgagcacaaagaagccatcacgtccctctccattggtgaactgatactgcagaaacctcagctcaaggactaggacttgaagatattttgggggcactcattatgcgtcaggcattgtgctgagcagtagagatgcgaaaatgaatacagtgcagccctgccctagagaagggcacagcctcccagggagacactgacatagctggctccccccgcccccgggggggcttcagggcacagagctcaggcagttcactcctcagcggtgagcttgtaaactcagggaagttttcaaatcacggtgacatgaaaactgggcacagaaggatgagttaagatttcaccagataacagtgaagtggtatgaagtaggcacacttcatccccactagaacggctactccaaaaaatgtccaaacaaaccgaataacaaatgttggcgagaatgtagagaaattggaaccattgtacattgctggtgggaatgtaaaatgggacagctgctgtggaaaacaatttgggagttccttaaaaagttcagtgtagacttattctgtgatctagcagttccactcctagggatgtaaccaaagaattgaaaacaggtactcaaatcaatgtttatatacacattttaatggaagtattatttacaatagtcaaaaggtggaaacaacccgaatgtccctaagtggatgaatgcataaacaagtgtgttatatacatacaatgggaatagtattcagccataaaaggaaggaaatgtactaatccatgctacaatatgatgaacctctaaaatattatgctaagtgaagtaagcaagacccgcaagatcacatattgtgcgtatgattccatttgtatggaatgcttaggataggtcaacccatggagatggaacacagattggtggttgccagggactgcgggaaagaggaatggagcccatctgcttaatggggaatgtgttttttcctggggatgatgaaaatgttttggaactagatagaagtggtggttgcacaacaatgtaaatgtactaaatgccaccgggctgtacgcactttaaaatggtgaattttatgttatgtgaattttgccttaactaaaacaaacaaaaaaaacaagatttcagtggatagagaagtggtgtcatctcaggtagaggggccatcacaagcccagctgtgggcatgaaagctctagagtgttgcacgctagttcaatggacccaggaggccaggtgagaggatgtcgtcaggttagggttggatctctcctttctgcccttcaaaagtgacttcagcttctactttcttggagccacctgagagggtcaccaggctcaaacatggagatataaagcaggtgacccctctttgttccccgagaccccagctcccctctgagagagtagttgggtagaaagctctactcagatcaaagaattccaaatgcactctcttaaatgacactgaaatagtggttgagagatattttatgtttctttgcatttcatttctcaaatctgtgtttttaacagtgttccagttaatgaactattttagtagattttttttccctaaattacaaagtgacaagtagcttttaaagtataacaggctgagcaaaatggatgtacaaataccaaaaatgtcacgtttaatgcaggcgattgtcattctgatcttgtttataatggatcactcttgattgttaagcttgttcccagagaatatgtttttcttttgttgtttcaaacatgtaagtaaaattcccccagtgattcttatcacacatttaaagaactgtatctcttagcaacatcacatacccacacatgcgcatgccccagcccagtgtctctttgagacatcaacagggtaatgtccaggaaagcagtgtctagagaagacacagacattacttggttcttgcaaagctcctcatttagcgggagaggtaccaaaggaaacactcagcctctttctacatgctcaggatacagtaatgagcacaacagagtccctgccctccttctgttactgtgagggaccctgtaatttaaactattgaaagctcagctgggtgtggtggctcaggcatgtaatcccagcactttgggaggctgaggcgggtggatcacctgaggtcaggagctggaaaccagactgacgaacatggtgaaccctgtctctactaaaaatacaaaaagattagcctggcgcggtggtgcatgcctataatcccagctacttgggaggctgcagcaggagaatcgcttgaacctgggaggtggaggttgcagtgagctgagatcgcgccattgcactccagactgggcaacaagagcaaaacgcggtctcaaaaaaaaaaaaaaaaaaaaaagctcaagtaagccagaagtcataggaaattatagtcttaagaaactttcccaaacagacaacaaaaatattgggtttatctatcaccaccacaaacctaaattgctatgtaatcaaaagaagcagatgttatttagcagtaataatagctgacattggggggcacttatactgcctgcagtttgtgccaggccctgttctcagtgctttgcttacatgatctcatttactcctcttaacaacccaatgaggtggttactaaatattcccattgtataggtgaggaaaccgaggccatgggaaattaagtaagtgatagagttggaattcaagcccagggcatgagtggttaactagaagcttacatattgcctttatttaaaaagggaaacatagtatgggggttaaggtcataggccctgaagtgagatttctttgggattgaacttcagctctgcctctaaccagatatatacatgtggacagatgtaatctctctgtgctttgaatgattgaagtctgatagacaaaggccaccagggacatgccagtagccaatccacgttaggtttatgtgcttagggctacaagggagagtgcatgccagaggaattgtggggtcttcaaaaagtggagatctcaagtaacgaattgaatatttgagtctgaactaaagagttcttcaaatctaggagatacttgtagtcattagaaatggatgagaccatctaaggagagactgtagggaaagaaagagagaaggaaagacccaggactgagtattgaacaacaccaacattttaaagtctggtagaagggataatttagcaaagaaagctgaggaggagctccctatttaggtaggggagaactaagaatatggagtcaaagacgccacatgattatttcataaagtatgtcaaaagctgctgagaggtcagggagagaaagacagaaaagcgtccactgggtcaggcagcatgggggttgtagatggccatgaccagacagtccctcatgggttggggtaggagccggagtcagagggaataagaagcgcagacgtggaggcagtatatgtggttggctcttttggctggcttggcacgatggagggcagagactggggcaggatatggagtcacggtgatacccgagcatgtatgtaagctaatgggatccagtggagaggaagcgaatgatggaggtggtgaagggaaagccaagatcaaggtgggagaaggcactgacaccaagtatcaagggaatggcttgggggaagaagaccactttctccaccgtaacacaggcaatgcgggagaagccaggggcagccacaggcagggctgttgagagtggtggaaggtgaacgtgttccctgacgatgtctgggtttttttttttttttttttttttctgtgaaaggtgaagtgggatcatctcatgaaggtatggagacttgggtgtgttcgtgtgtgttgcaagtggggaggcttaagaagggaaaaggtatgaggcagtacccgggggagagagaaattcatcctactggacagatgtggaggtttgtcaggtggtgttggaagtcaaggtgagatatgtgattgtgatcaggaattttaagttaaaccagtctgagtggttatggtaatatggaaaagtcaaaggactgagagacaaggtatgtggcctaaggcacaggttatctgcatggacattgatatcaccaagagtgatgacagaagttgaggtacggaggggaagaccatgggcagccgtgcaataaatgtttggtggtggtggtggtaatttttctgttgcaatcacatttgagtcctttagatgtcccctgtctagcacctgacattccctgaatgtcccctacccagccttgtagaaaaggaagaggaggagtggttaccaagaaagcattgcccaagcctgaccatcagggagcttataatggtattggaaatgctggacttacatagatatagcaattagaaaatggcagaagactacaaaaggacagatgtgtgggtcagacagaaatatgccattgaggtagaaggaggagaagatgggctttcagataaggtgaaggaaggaaaacttaacccagccttctgacggtccagtaatttttagctggaacagagaagaggagtgatctttggtttaaaaaacaaaataaaactgctttagttttagaattagcagccttactgctgtttccaagaaggtctttgaattatctggaaataagctgtgcttgaaagcactttgcaaggtgatgatgtctgctgtgagccgctacatattcttaggctggaggtgggcaccttccaccagagatgtgggaatgtggtaacttgctgatttgtcacaagagaatcaggaaaaatgatctttatatatgtcgccgtgactcattttttttcatgaaagatggtagaattaaaaagttgcctaccctaatcctttgcttttctcttttattcctaacactagaatgtcgggaaggtcatcatcaaaggatgccgctacgtggtcatcggcctgcaaggcttcgctgcagcctactccgccccgtttgcggtagccaccagcgtggtatccttcgtgcgctaatgggagctgctgtggcaggtgcccccagagtgaacgggagcccctgctgtgggaactttgtgaatcctggagcatctcagacttgaacacacagcatatttggaagagaaaacatgcctttctttgttgaatcacattagtatgatgagtgagtcatccctgcccatctgctgagcttctcacatctctcagtcacacgtggacccagtggtcaatcctgcagagaattcggcggaggttaggtttgggagtggagctagcgtgctaaagccagagccttcacgtgaaggtggcaggcactggggcggaagccaacactcaacagatgcaagcagtgtgggtgtgcagcagaacagtgatcttgggggaggaagaggatgttactagagtcagatgatttgctgtattctcctgaaaggtcgtaggctgacaggcgctcacattccttggctgcctcggttctgagggcagctaaggagctgtttattcctcaagtcatgctccccgatctccttcctctaccactctgtcaccaggagtttaattacaggcttgaggagaagaaaggaagaaaagatatcttgatgctttgaaaactgtgttggcagtgtggcatgactgtttaaagtagataaaaccttgtcattttaccccatccctgcatgactgtgaagctggcgaggaaggaggaagaagggcaagttcagatgcaggctgggtggctgggacaggttggctaagggactactctggagggctcttctgcctggcattgcccacttcggcccagccacgtgtttgcagcgaccagagtccctgcaaaggtgtggctggctgtggtcagggtgctactagcaccatcagcgcactcccgccattggctcagctcctctctgccagtccaactaagagtgctttgtcctgggtgggacataggggctgagagagatggggggagacataacacccaggaatgaaaatacagatttagagaaggaaccagtaagtaggagacagatgtgaaggaaatggaaatgaggcaagaggacgttggaagagagaagtttgctgtccaggagccaggtctggagcatcagtgtgagggagttcaggtaggctgggcctgtgcctctaggtagggacaagggaggctgggtagccagggctggtgcttaaaacccctgaggccatgagctcattggctgcctttgtagcatcctgtcttcttctgtgctgcctggtttgacctcatctcacctggattcaaagggtaaggtgggcatgggtcttgggcctgacacccaccaaggatgacctgtggactgccatcggatgctgaacagggagatgaaaggaggtcctcttaccatacccctctgccaaccccccagtaggccactgttctgactttgtttccagaatatccagaaatccaaaggggctgttgctgaacagtctgcaggaccagtgacagcacctacctgttgtcccaaggcatacaaaggaggcctcaacgctcatgcttctctaatcaagccctaccaagacagacagaaagacagacagaaaaaaggaaggggtagaggagaaggttgaagctgtggagctagactctgcttcacttcctgaagcttcaacttcatgtcgaagattcactgggacccaattcctgcattgttaatatttgtgaggaaaagtgaaacaagtgatctggttttagcccagatgatgaaagtggatatggcacattttcacacacgtgagataattacagcttgccccacaacactgggtgttggagaaagggagagatagtcataagtggaagaaaaagccaagcatagtgagtgggaaagagagtgagagcctgtgcaggctgctgacgagccccaggcagcccacaagtttctcgtggggagatggaggcagagcccagggtaggggacagagctgctggggcctttccttgcctgggaatctgtcccaggaagagcttccccactcccatcccccaaattggaaaaaccgtacattcaagcctgtttggccctgaaattcttaagaatctggttaagaattaactcactaatgtcaaaagtcaaaacctcctaggggttgtcctgggagtcaggttcacgggtacagaagatgaatctcagatgtcactcaacctgagccgtcattctctgtggcagggctgccctgggtttctcttactcaatccctggagtgtaagcatttggattgtgtcacagattacctttttaccttttctttctttttttttctttttttcaatatcagtgcccacaccttactgagtattgagttttagagctttcgcttgatgtgcttgaccaagagacttcttttgtatccttttcttgtcctatgatgtaaataaaagcctcgatttatgtaatgtt

SEQ ID NO: 11019 - DNA, 2523 bp, Homo sapiens
cgggaaggtcatcatcaaaggatgccgctacgtggtcatcggcctgcaagcgttgcgctgcagcctactccgccccgtttgcggtagccaccagcgtggtatccttcgtgcgctaatgggagctgctgtggcaggtgcccccagagtgaacgggagcccctgctgtgggaactttgtgaatcctggagcatctcagacttgaacacacagcatatttggaagagaaaacatgcctttctttgttgaatcacattagtatgatgagtgagtcatccctgcccatctgctgagcttctcacatctctcagtcacacgtggacccagtggtcaatcctgcagagaattcggcggaggttaggtttgggagtggagctagcgtgctaaagccagagccttcacgtgaaggtggcaggcactggggcggacagacactcaacagatgcaagcagtgtgggtgtgcagcagaacagtgatcttgggggaggaagaggatgttactagagtcagatgatttgctgtattctcctgaaaggtcgtaggctgacaggcgctcacattccttggctgcctcggttctgagggcagctaaggagctgtttattcctcaagtcatgctccccgatctccttcctctaccactctgtcaccaggagtttaattacaggcttgaggagaagaaaggaagaaaagatatcttgatgctttgaaaactgtgttggcagtgtggcatgactgtttaaagtagataaaaccttgtcattttaccccatccctgcatgactgtgaagctggcgaggaaggaggaagaagggcaagttcagatgcaggctgggtggctgggacaggttggctaagggactactctggagggctcttctgcctggcattgccacttcggcccagccacgtgtttgcagcgaccagagtccctgcaaaggtgtggctggctgtggtcagggtgctactagcaccatcagcgcactcccgccattggctcagctcctctctgccagtccaactaagagtgctttgtcctgggtgggacataggggctgagagagatggggggagacataacacccaggaatgaaaatacagatttagagaaggaaccagtaagtaggagacagatgtgaaggaaatggaaatgaggcaagaggacattggaagagagaagtttgctgtccaggagccaggtctggagcatcagtgtgagggagttcaggtaggctgggcctgtgcctctaggtagggacaagggaggctgggtagccagggctggtgcttaaaacccctgaggccatgagctcattggctgcctttgtagcatcctgtcttcttctgtgctgcctggtttgatctcatctcacctggattcaaagggtaaggtgggcatgggtcttgggcctgacacccaccaaggatgacctgtggactgccatcggatgctgaacagggagatgaaaggaggtcctcttaccatacccctctgccaaccccccagtaggccactgttctgactttgtttccagaatatccagaaatccaaaggggctgttgctgaacagtctgcaggaccagtgacagcacctacctgttgtcccaaggcatacaaaggaggcctcaacgctcatgcttctctaatcaagccctaccaagacagacagaaagacagacagaaaaaaggaaggggtagaggagaaggttgaagctgtggagctagactctgcttcacttcctgaagcttcaacttcatgtcgaagattcactgggacccaattcctgcattgttaatatttgtgaggaaaagtgaaacaagtgatctggttttagcccagatgatgaaagtggatatggcacattttcacacacgtgagataattacagcttgccccacaacactgggtgttggagaaagggagagatagtcataagtggaagaaaaagccaagcatagtgagtgggaaagagagtgagagcctgtgcaggctgctgacgagccccaggcagcccacaagtttctcgtggggagatggaggcagagccagggtaggggacagagctgctggggcctttccttgcctgggaatctgtcccggaagagcttccccactcccatccccaaattggaaaaccgtacattcagcctgtttggccctgaaattcctcagatctggctaagattactcactatgtcgcagtaaccctcctaggggttgtcctgggagtcaggttcacgggtacagaagatgaatctcagatgtcactcaacctgagccgtcattctctgtggcagggctgccctgggtttctcttactcaatccctggagtgtaagcatttggattgtgtcacagattacctttttaccttttctttctttttttttctttttttcaatatcagtgcccacaccttactgagtattgagttttagagctttcgcttgatgtgcttgaccaagagacttcttttgtatccttttcttgtcctatgatgtaaataaaagcctcgatttatgtaa

SEQ ID NO: 11020 - DNA, 2548 bp, Homo sapiens
agaatgtcgggaaggtcatcatcaaaggatgccgctacgtggtcatcggcctgcaaggcttcgctgcagcctactccgccccgtttgcggtagccaccagcgtggtatccttcgtgcgctaatgggagctgctgtggcaggtgcccccagagtgaacgggagcccctgctgtgggaactttgtgaatcctggagcatctcagacttgaacacacagcatatttggaagagaaaacatgcctttctttgttgaatcacattagtatgatgagtgagtcatccctgcccatctgctgagcttctcacatctctcagtcacacgtggacccagtggtcaatcctgcagagaattcggcggaggttaggtttgggagtggagctagcgtgctaaagccagagccttcacgtgaaggtggcaggcactggggcggaagccaacactcaacagatgcaagcagtgtgggtgtgcagcagaacagtgatcttgggggaggaagaggatgttactagagtcagatgatttgctgtattctcctgaaaggtcgtaggctgacaggcgctcacattccttggctgcctcggttctgagggcagctaaggagctgtttattcctcaagtcatgctccccgatctccttcctctaccactctgtcaccaggagtttaattacaggcttgaggagaagaaaggaagaaaagatatcttgatgctttgaaaactgtgttggcagtgtggcatgactgtttaaagtagataaaaccttgtcattttaccccatccctgcatgactgtgaagctggcgaggaaggaggaagaagggcaagttcagatgcaggctgggtggctgggacaggttggctaagggactactctggagggctcttctgcctggcattgcccacttcggcccagccacgtgtttgcagcgaccagagtccctgcaaaggtgtggctggctgtggtcagggtgctactagcaccatcagcgcactcccgccattggctcagctcctctctgccagtccaactaagagtgctttgtcctgggtgggacataggggctgagagagatggggggagacataacacccaggaatgaaaatacagatttagagaaggaaccagtaagtaggagacagatgtgaaggaaatggaaatgaggcaagaggacattggaagagagaagtttgctgtccaggagccaggtctggagcatcagtgtgagggagttcaggtaggctgggcctgtgcctctaggtagggacaagggaggctgggtagccagggctggtgcttaaaacccctgaggccatgagctcattggctgcctttgtagcatcctgtcttcttctgtgctgcctggtttgatctcatctcacctggattcaaagggtaaggtgggcatgggtcttgggcctgacacccaccaaggatgacctgtggactgccatcggatgctgaacagggagatgaaaggaggtcctcttaccatacccctctgccaaccccccagtaggccactgttctgactttgtttccagaatatccagaaatccaaaggggctgttgctgaacagtctgcaggaccagtgacagcacctacctgttgtcccaaggcatacaaaggaggcctcaacgctcatgcttctctaatcaagccctaccaagacagacagaaagacagacagaaaaaaggaaggggtagaggagaaggttgaagctgtggagctagactctgcttcacttcctgaagcttcaacttcatgtcgaagattcactgggacccaattcctgcattgttaatatttgtgaggaaaagtgaaacaagtgatctggttttagcccagatgatgaaagtggatatggcacattttcacacacgtgagataattacagcttgccccacaacactgggtgttggagaaagggagagatagtcataagtggaagaaaaagccaagcatagtgagtgggaaagagagtgagagcctgtgcaggctgctgacgagccccaggcagcccacaagtttctcgtggggagatggaggcagagcccagggtaggggacagagctgctggggcctttccttgcctgggaatctgtcccaggaagagcttccccactcccatcccccaaattggaaaaaccgtacattcaagcctgtttggccctgaaattcttaagaatctggttaagaattaactcactaatgtcaaaagtcaaaacctcctaggggttgtcctgggagtcaggttcacgggtacagaagatgaatctcagatgtcactcaacctgagccgtcattctctgtggcagggctgccctgggtttctcttactcaatccctggagtgtaagcatttggattgtgtcacagattacctttttaccttttctttctttttttttctttttttcaatatcagtgcccacaccttactgagtattgagttttagagctttcgcttgatgtgcttgaccaagagacttcttttgtatccttttcttgtcctatgatgtaaataaaagcctcgatttatgtaatgtt

SEQ ID NO: 11021 - DNA, 116 bp, Homo sapiens
gctaatttttgtatttttagtagagacagggtttcactatattggccaggctggtctcgaactcctgacctcaggtgatccaccgccttggtctcccaaagtgttgggattacagg

SEQ ID NO: 11022 - DNA, 2846 bp, Homo sapiens; identical to SEQ ID NO: 7399

SEQ ID NO: 11023 - DNA, 857 bp, Homo sapiens; identical to SEQ ID NO: 7400

SEQ ID NO: 11024 - DNA, 11445 bp, Homo sapiens
tgattatttactgtctagaatggatgttaccagctgcatctcttaccgaaattttgcaagttgtatgggagactcccgtttgttgaataaggttgatgcttatattcaggagcatttgttacaaatttctgaagaggaggagtttcttaagcttccaaggctaaaggtaaggagtaaagtctataaacagatatatactatctagttccaggcgtggaatcttggtctgtgtttcaagcaagtgagtaatgattatgaaataatacattgaaattatattgttattcttagcagcgtaatgggtttctccctaccagtttgtttactttgtttttgattcagtaatcaaattccttacaaattcctggttccttacaaattcctggttccttacaaattagagtaaatgtatggaatgaattgtgcatctgtgacaactttattatgaaattgggaattaagctgagaactaggagcccaacactgatccatgtcattgtttttcccaattctagttggaggtaatgcttgaagataatgtttgcttgcccagcaatggcaaattatatacaaaggtaatcaactgggtgcagcgtagcatctgggagaatggagacagtctggaagagctgatggaagaggttagttttaaagtaaatgggattcaaccatttttaaaaattattttgctataacatgaaggattccctttcacttttattttataaccatgaccctaaagaatttaaattttgctataggtacccctaagctgagaaacagggggggtgtccaggtgagctgaatgaactgttcagtttggtcttctgcttttctttttttatttctttgcttattatgtgctgttaactttctttaaagtagcatgtaatttgctttagaaatgggaagtggtactgaaattttctgtagattcttaatttttcttcacaggtttttgctttaaatttgacaagtaggtaaaagcttctaatggttgttcctccccattgatttatctccccataggtttattaacaaaactaggatacccaagactgaagaaacaagaagaaacctcaagtgtattgacacgtaaagaagcagcagtcctgccccagttctcctaagaaaaatccgctgtgggcagagaacgatgatgatttaatggtgtttactcctttacaggattcttgtctttaaagctgtgtgtttttcaatggtgttgttcatacatatagtcactcacttaacttgggctacttttaaaaaaaatacacaagataaaattgatggagaaatggtgggaattgaaaacacgcaggtggagcagtggagtaaccttgagtttctctctccacttaaacctttcggagttcctttatgagggcttaccaaatctgttaggcctgcagaaacactgtcatcattatggtctaaaagggctaacagattatctttaaattctatgattcccacttgaaagtcagatgcatttgccatgtatttgcatctgtctcaatggagatgactctacagcttgcttgaatttttgcatttgttttttctttgtttttcttgacattgcttacaggaaggaaatatgtttatgcaaaccagaccacttatctgcaaaggtgtaaactatattcagtattttattgtaaatatgtatattctttaagagtatatattgtactagtgctttttttcttactgttatatgatagaagctatgaaaaaaatgaagatttctttcaagccaatcaagccaacgactcttcagccagtattggaagattttgtatttgattttggttttttgtttttgttttttaatttttaccaccatgacatgtatttttctttacctccggatcctgccagagtaatatgtcaagaagctcaagaagcacactggaggttaccttgaggcgtttgtgtaatctgcatactagtggagtagccatggtgaccgtagccacatgggtgttctgttgctgttttgcaggttcaaaccttgtactactcagctgatcacaagctgcttgatgggaacctactagatggacaggctgaggtgtttggcagtgatgatgaccacattcagtttgtgcaggtacacattgcacagtctgaggtaacctcaggttaaaatttgactagagaatttgatagcatacttaaattttcctttaataaaggaaagtggaccaatttcattggtataactggacagaaacatttttgggagaaaacaagcatatcttagagttagtatttttgccacatgaaaagatattaacaaattaggaaaccctattgaaatttttttctcataaagcaggaattacaaacagtaaaggccaataagatggaacaatatagaaattatttgggaagattatgaaaagcagttgtttgtgtcaggcatgactgatagttttttttaaaaaggggcagggggacttaaattgttgatggctatgaaagaaatttttggatgttaccttaactactgagctgtcttactggaaattagaaatggtatagttaagatggactatacaatgtaataagtctaaaagtggtggatcatatgttaaaacctgatctagatgtttctttaaccaagatgaattaaaatatagtagagttccactgtgctgattgagttactttgccttttataaaatccaatttcatttttcccctatgagtaaacacataattattcagacacattatcaacaattactagagaacaaacttctcaagtataaattttttaagtttatggacaaatacagaaaagtacacaagtcataattaccacatagtgaacctaccagtgtaaacactacccaagtcaagaagaggtttctagcatcccggcagcctttctcttgcctcttcccaaccgtttccgtatagtgctcccaaaggaaaccattatcctaccttctgacacattaaattagtttggctatgcttgaaaaaatttatataaatggtcatatagtatatatttttatttggcctttagctcaaattatgtttttgagggacaagctataaagcagtcgactcagcccagactaaggaatgcttttctttaaaaatcagagggtaagtggtagacttagtagtagcctatatggttacaaattatcaggtgttagctctctcaggtgtcctgtggcaacagtgagtgaatatttctaaaagttttggaatttgaattagttgagaacctatgtttgtgcattttgaatatattgaggatattttcccccttaactctaaacattttgagttaacattttaaaagtacattttcaacatgcagaggttgagtgcccaataagtggcaggccataatgttcggtatggcaacacaaaaatgtgtaagagacagtttctgcttgtaggaccttctaagagtgggcaaaacaatacaggcttataagaggtagctacgaaaggcctaaaggagaggacacagtgagacaggagagaagccagggatatttcacacaagaggtaacttttgagcagtgttaggatttagaggagtctgcatagcagataaagggagaggtgttagcaaagagtatctgtgaggatgatactcttggaattgcaggtcataagactgggaaagtaggtaaatgctccctgaatggggcttatactttatcctataggcagtgggaagccttaggtaagaatacagtgatacgaaagttttgcattcactttagtaatggtgaaaaactggggaacagtctattaggtggcagtctttgggctggaatatcccaactgatttctggttttattttctaaaattgttgccttggacccttcctatttttataaccagacacagaaaatcaataaaagtttgagcccagtttatagactattgccagcagtagttcaggttttaaaaaaatgatgagggattaatctaggggcatgaaggagaaaggatagattttttatttatgtctatatataaatagacatttatatttacaaaggttgacttagcaggccttagtgattgcttagcaagattagggaaaagaaagaatttgagaataagtgggattctgacatgtgtgactcattagaatgtgatgccatgaatagagatcatgaagaggatgcgagggacacatgttagacttcaggaatagaaaaaggaggttgagaagaagccattagaaaagtcagaggacaataagaatctaatcatgttgtaaaagctacctaaggtaggagaagaaagtttgaaagaggactaaacactgtcaagttctctgggaggtcatgtaaaataaggtttagggatatattctttacatataaaggatttaatcagcatttctatattaggcttgttattaggcattgcttttgggcctttctctttcacagtcattttctcttaattatagtttgtacattagaacagtttttttacttcagtacagcctcaatgtaagcatcatccatttgtgatatttggatcccttcttcccataggttgggatgaggttttatgtaccttgtaattcataataatagataaggttagataagtctaaccttattttttattcttaatattcatagtataaaagtgatatgaaagatgcattcacaactttagtaacagtggaaaacagcctgtcatagtgtaaatctgttttatagtatgacataacttgtcatagtataaaaaggatggggtttatcttcataattcctaatctttattttagttgtattgccttgggcaatgcatatcttcttgagtttcaatatttttatctataaaatgggtagataatatcaccctcactggactaaaagagatgatgtaaataaagtacctagtaatacctaggtacatagtaaacatctaagtggaatttaatcataaccattgataatgatacattccctgccttttctcaaaatagcctacgtatgttgtaaccacactcaggcctaacttttgatatagctttttcttaatagcttcaagtagctagcaaaatctttttctcaattacttgttatatggctttttgcttccactagcaacagaaatttccattagaaattttacctatccatgtgttctggccatctggaccagcacaagtgggatgagcaaactaggccaggtgctgaagttgctacctgttcatttggcagttcctctcagagtagtctttactcttccaattccatatgatcatatcctttggaagtggcaaaggctaaagtaattggaaggaagccatcaaggaaaactcatacatgagaacacatgtgtaaagtagttctcttacaatcatttggaaattggcagctttgttcatttctccctctttagtattcctgtatattctacttttgtgaatatttggttgtttttagtaatgtttcatttctgattactattttcttgtgttttgatgtaattttgtctagaaaaccactctataatacctataaggtaatcctaaagaaatattctttaagtgtttcttgtaattgccacttttttcctgtcaagtactttcagagaaactggatgaatctatatctgcttacgttttgctggcattgtatgaaggatacctgtacatatgatttagttaggtttgacaatttcatgaaaatagtgggttaaatgtattctctgttaattcacactattttaaatttatagcattcttttaaaagattctatacttaatataaaaataattatagattggttttttcttctgctgaggtcttgatttgcaacatgtttttcaaattgttaaaactgagctttttcttacctaggctaattgtgtaggcgtagttgtctcatcattgagtggagatggaagtatgccagtaatttgtgtcatttggaaagtgttggcttgagttaaagttagtgtcctataaatgtcatatataggtgaaggatactcagtgttgtggaatagctcaggaacaaaggtacatcagatgtggtctttggctaggtttctgtagctaccttttgattttgcagaaaaagccaccacgtgagaatggccataagcagataagtagcagttcaactggatgtctctcttctccaaatgctacagtacaaagccctaagcatgagtggaaaatcgttgcttcagaaaagacttcaagtaagtatatgacacttgccagattgttttcagcttacctatttttaagaaggagtgttgccaatttaatacctcttaaattgactactcgaggaaaaaactcagaagcaattaaatttggaaaacgagagcagattgttccagtctgggatgtggagactggagtccaattcaggatcatatacacaaaccaaaagtaataattacatcttaaacatggaactcttgtgcttacagataacacttacttgtgcctggctgtgctggatggtatattctgtgtcatttttcttcatgggagaaacagcccacagagctcaccaacaagtactccaaaactaagtaagagtttaagctttgagatgcaacaagatgagctaatcgaaaagcccatgtctcctatgcagtacgcacgatctggtctgggaacagcagagatgaatggcaaactcatagctgcaggtaagaacagaagcattcaactggctaagcatgtagatgggcatttttgtgacatgcaaactttcaaagagagggtttaatatgccatctttcacggcaatccaataagatagggaaataacaatactattgaatatggctaaccttcagttcaatgtctgtatctaatttttaaaaaaattatgtcatggctaaatttttctaatattcaagccaagactaagcagtttatttgtactgataatgcgatttttcagctattacaagcacttagttaaaagatcaactaaggcatccttaaaaagttttaatactttttctcattgtgcagatttcttaaacttacaggactggaaaccgtggtccagtttaatattttaaacataaatctttatggttttattttttaccaggtggctataacagagaggaatgtcttcgaacagtcgaatgctataatccacatacagatcactggtcctttcttgctcccatgagaacaccaagagcccgatttcaaatggctgtactcatggtaagcgcattatgttgcaggagcaacccctatttagctttttcctcgtaacttcaggatgttagaaattctcatctctcacttttggcatagggccagctctatgtggtaggtggatcaaatggccactcagatgacctgagttgtggagagatgtatgattcaaacatagatgactggattcctgttccagaattgagaactaaccgttgtaatgcaggtaataatagttttctcctgagatatccagtatttaaatatgataattaaattatcaatatgtaactttattttatacttacataggagtgtgtgctctgaatggaaagttatacatcgttggtggctctgatccatatggtcaaaaaggactgaaaaattgtgatgtatttgatcctgtaacaaagttgtggacaagctgtgcccctcttaacattcgtaagttgattttttttcctttttttttttaaagaccttcaaatcaacagtatgtgtagtatacacttagagtctgggagatgtagcaataatcttgacttgacttttcttgtagggagacaccagtctgcagtctgtgagcttggtggttatttgtacataatcggaggtgcagaatcttggaattgtctgaacacagtagaacgatacaatcctgaaaataatacctggactttaattgcacccatgaatgtggctaggcgaggagctggagtggctgttcttaatggtgagtgttgggatttggagaggtgaagagtagatagtggcaagactttgttctaaaactctgagagaaaaggccaatgactatagttgtacagttaagaattcagaagcagtcatctcttttgatgcaatggagattagggtgatttgtcctttagaaatatattttctaatcaaagacttataatacttgatatataacttaattcaccagtcttttgatgggtgcactgagtgaatttccaagtcattttcttctataaaacatatccttaatgcatcatcttgaattttgagtttccccttctttacagccagaatttaaagaatctgatctgcaaaacaaaggcaaatccctagtcttttccaactgtctactccatacctaattggaaatacaacctttagactattttaacaagtttccaaagtattaaactttttaaatgtagacatagctttctttccacctccattttattgacttttaatgtctaattatataatcataatttaaaagttagcattgtttttggtaccaggctgaaccttagcaggcttatggctcaactggtgaaggcttaagtgtagacacagcctgttggcctagagcattgtcagcgtgctttacagatacatagaatgcaagctggttaagtgatggtcaaatgaaaaaataatgaatttgagaatcagtaataaaattttttctaagctacggagtatttattgctaacattttatctatttgaaaataatcataactctgtttccagaagaaatttctgtaccacaatcattttatttttttaattgagacatggtctcactgtgttgcccaggctggtctcgaacccctgggctcatgcagtcctcccacctcaggctcccatagtattgggattataggcatgagccaccgcatctggccccaaaatcattttatacagttggaaagccctaagatatttttctgctttcctataatctcttctgagtcttaattctgtacattgggctgatataaagtccagtgcacagaactattctggtttgctacttagtagctgcatctgtaggataattgtccagcttcttcctgcttttcttcttctctgaaataataatagtaactaccacagagttggtgaaaattgtacttatttagatgctgctactgcttcctctccctcccccttttaagttgcctaagttccacgtgggaatggtttttttattgatttgattcccagctcttagagagtatttgtcatattaggcatttaataaattctttttgacaaaatgaacaggcatttctatttttaaaaccactgatttttaagcaaaagacagatttaggggagttttaccttattacactttaatctctggatttaccccatctcatttctcttttaggaaaactgtttgtatgtggtggctttgatggttctcatgccatcagttgtgtggaaatgtatgatccaactagaaatgaatggaagatgatgggaaatatgacttcaccaaggagcaatgctgggattgcaactgtagggaacaccatttatgcagtgggaggattcgatggcaatgaatttctgaatacggtggaagtctataaccttgagtcaaatgaatggagcccctatacaaagattttccagttttaacaaatttaagaccctctcaaactaacaggcttagtgatgtaattatggttagtagaggtacacttgtgaataaagagggtgggtgggtatagatgttgctaacagcaacacaaagcttttgcatattgcatactattaaacatgctgtacatactttttgggtttatttggaaaggaatgcaaagatgaaggtctgttttgtgtacttttaagactttggttattttactttttggaaaagaataaaccaagaattgattgggcacatcatttcaagaagtcccctctcctccacatttgttttgccaatttgcacattaaatgactcttccctcaaatgtgtactatggggtaaaaggggtagggtttaaagatgtagacagttgggttttttaagggccctttttcaataactggaacactctataacaaaggatacttatttaaatagatgacattgactatttttgtttttattaaaaggaagcttacatgcctaccaatatttaatcttttatgattgcctttttataactttttatattctcagcagagtgctttaccaattgaagtaaaatgtggcaggctggagttattgaagcagagtggcagtcttcagtttgcagagtaggggtctgtcttttaaactctgagtgcaaacttcagagttcttgccttggctgcagtttttttccttcaagaatgcagtactaacatttatttgagtggagttactgaacagtaacatagctgtgatttttggtatttgaaacactggttttaaatattttgacttgttgagggtatgttttatatagcaagacattatatagcagtaaaaaatggtgttttatcttctatataattcctgtttttattattaacaaaacagtcctaaatagcagccctcaattgtgaaaaaatttactttaaactacattaggttgtgaatgcaggttttatcagaactatgtttttgttcagtttatctgttcatatggataaatattggttgggatgacttggtgtctaatgtgtagtgctacacacctaacttatggggccaaaatagcatgtcctaatgcttgctgctgatttaaacacattaaaggtactttgcaggaaatccttgcaccatgggattaatatccaattgctgcttgtacactcattcattactaaaagttttgagaaatttttttttccagtaatgagcttaagaaatttgtggaaaataactcacctggcatcttacatctgaaataaggaatgatataaggtttttttttctcacagaagatgaagcacacaggaacctaatgggccaactgggatgaggtgactattctgagatgactattcagtggctaacttgggttaggaagaaaataattaggtattttctccaaatgttcactggtactctgccactttatttctctcatctgttacacaaagaaccaccaggaaagcaaatcagtttggttggtaactctgtaattcctaactatcactggtttggttctggactaaaactacattgacagattgaatttgcctaatatgatgactgtttttaatatggatctgtatgtgttctattcagcacaaggaaataaaattttagttgaggattcagcactaaaatccttgagatcacttctcatttcataagtgacatgcttaatgcaaataatatatgggaatactttgggtcaaagttttcctgcattaccttggatgccaaagaggtagtttggtggccaaaaagtatctttttttaagaagctgttgtagctagtctgcatgaacatgagaagtttcc

SEQ ID NO: 11025 - DNA, 535 bp, Homo sapiens
taataccacacttctggtcaacttaataaaacactctaaatttcctaaaaaggtagaaaagctataaaatatctaaaccaaatattattggttatactcgggtggatcttttattatgaactttaaatgtagggttctgatttttggcttctagtgtgtcatgtactttaccactgctcaacatgttttcaaattcccaatataataatcatattttagggaaaatccaggatttgagtatgtgatatatcattagaatccttgcttaattaacaaattaggtgtgtgccctattacctctcctgacctcagaattcttaaaattgaagtaggcaaaggaggagccccagtaggacatttctgtaactgcatgcagagttgccttcagaaaagtgaatatgattcatggaaaattcagttgctgtcgtaatttacacgcagctgctttttgttccaaaaaaaaaaggtctgaagagtcagcaagtgagacataagatacaaggttaattaactaggtgtaaaggagaaagaaaaa

SEQ ID NO: 11026 - DNA, 197 bp, Homo sapiens
agatactgcgtttcatgaagccttaccaaattattctacttgaaaatacttatgtgaacttacatagcatttcaatttgttgtacctctccttaaactaaaacttacatatctgtatggcataattagatgtttatcatttgtatacgtgttattaccactattaacatttgttgtattaagacagtgatttttgat

SEQ ID NO: 11027 - DNA, 3802 bp, Homo sapiens
attgagtggggtccatctcggacataggctccaaatggaaaagaagctgatgcttggcgactcctctctggccctggtctggctgggcctctgcctgcctccctggggcaagcctgggactccactccttcctgcgctgccccggcccctttctcttgggggttggtagcatctgctgtcctgggtagaggtccttaaggacactgcttgcgtgctggttttcaacccccaagctgtctttgtgggtcacacagtatcactcaaataataggttacttgagaagttcggtactcccttttaattgttgtcgatacgtagtttacttaagatatgtaaaatattttcttattttcttttaggagcttactccacgggaacagcctctagataatctgagttgttgaaaatacgaagcctgttactcgtgaacagtggctgacaacagtgttgttgtgagcctggctgtctgcttggacccagaggtttcgtctgccagggtttttggttgtatttaggatttcagggaaaagtgtccaagctttcagtgttggagcaggtaaggtatcaacactgttagtagcaacaaaattttaacttaataagtctgtatttgctatttataaagtggcatttgtaaagaaactgatagtagaatgtagtattcgtattcatttgaaatacattcagccatttgtatcagcagtctctatagcagcagattctgcatctgtggattcaaccagctgcagattggaaatatttgggggacaaacaataaataataatctgacaataaaaaataataaaaatgttataaaacagtgtagtacagcaactgtttctatgatgtaatctagagatgatctaaatatttgagaggttttgcataggtcatgtgcaaatagcctgttctctctttaatgagaacccagttttataaactagagctcttcctgtagaaagctaccagcatggatgcagcagcccttttcagctgggttggagcttcataggcccccagaggcagaggcgactgcaactttgtgcccttctgggcaaaggctagtgcgagcccctcagactacatctttactagaaactccaagtgttgcatgaaaacgagagcttgaccctcttttgagatgacagtcatatttcttgcaaatattttggcttgcacaagcagaaaacttcttctaaatgtaaaatttccaatgagaacgaataaaccattttaactgatgtggtttaataattgctctaccatatatatttgtaagcagcattctctgctttgcccttaatctttgaggtcagcattgcctcctggatcagagcggttccttgtgacttgcctggggtcacctggctggtgaaggaagcccccctttctgtttaccaccatctctagtgcccccctcacacagcagcctccagagtttgcaccctgacttggagtcgctgctggtgccctgattgagttgagctgtgtcctttaacaatggggtcacttcaggtgagcatagaagtgatgtgtcccttatctccaaggcttccgtggagtgccctggggggtgtgggtcatgtttacagagcgtggaggccacggccaggcagcatctttagctggacaggaaaatgagaagtgacagcatttagagggaagcaaaaagaacaacacaggttacaggttgcaagtaattttccattttgtattttcgttctttttcttttttttgagactgagtcttgctcgcccaggctggagtgcagtggtgcgatctcggcttactgcaacctccacctcctggattcaagcaattctcctgcctcagcctcccaagtatctgggattacaggcgcctgccaccatgcccagctaatttttgtatttttaatagagatggggtttcaccatgttggccaggctggtctcgaactcctaacctcaagtggtctgcctgcctcggcctcccgaagtgctgggattatgggcttgagccaccaggcccggccccattttgtatattttttaaggctttcattttatgccagtccttcccccaggatggaacatggcataaaatcagagtcatcattagcattgaaatgtaattaaagcttggacagcttggaaaagaattctcaaagtatctactgtctttttcagatttttgtcatttcaacaagagtaaaagtttcataaataagattctttagtaatgtattagaatgaaagtgaaaaataatacagaaaaaaaaatatactggcctggcacagtggctaactccagcctggggacagagcaagactccgtctcaaaaaaaaaaaaaaagaaatataccttaaagtgatcgccttgaccatgttttctaagtgtcccagttgtcttgctgctaacaatatctccaaagctcagtagactaaaacaaggtttatttcataccacacaatctgttgggtcaggagttaggcagttctctcacattgtgcccgtgagggtcattcacttggcagcagggctggtatggagggtcccagatagtgatagcatccttcctggccccagcccctggttggggagctgaaagtcgggactcagcttcttcatatcctcttttcagcatggtggtggccagcccatacttgcaaaagtccagaacagacttgggtccctttgcaggccacacccaaactggcacagcgtcttgttcactgtgcttgtggtcagagcagcccatctgcctgcggaggtgctggggagctcgtgccacctccgagctgctcgcgtccttgctcacgtccttactcacatccttaccctgctatactgtccaatatttcctatttgtccctactgtctggcttgtgaagccttgtcctgagcagttaaatgatgaaattgtacatttgatttgttagctgtatttttgtctaaacgttagttgtttaactatattaaaattatctttacaaatcatcttgaatcatctcacatagcacacattaggaaacactggtcagaaggacttgctttatgtagagctccactgtttgtagggaggtggcccctgctgcgcgtgtttggcggcaatgtcaccttttgttctgtggtcagttggtcactatgtgcttacactttaccgctaggtatggacgacaaaggcgacccgagcaatgaggaggcacctaaggccatcaaacccaccagcaaagagttcaggaaaacatggggttttcgaaggaccactatcgccaagcgagagggcgcaggggacgcggaggctgacccactggagccgccacccccacagcagcagctgggcctgtccctgcggcgcagtgggaggcagcccaagcgcactgagcgcgtggagcagttcctgaccattgcgcggcgccgcggcaggaggagcatgcctgtctccctggaggattctggtgagcccacgtcctgccccgccacagacgccgagacagcctccgagggcagcgtggaaagcgcttctgagaccagaagcggcccccagtctgcttccacagctgtgaaggaacgaccagcctcttctgaaaaggtgaaaggaggggatgaccacgatgacacctccgatagtgacagcgatggcctgaccttgaaagagcttcagaatcgccttcgcaggaagcgggaacaggagcccactgagaggcccctgaaagggatccagagtcgcctgcggaagaagcgccgggaggagggtcccgccgagactgtgggctccgaggccagtgacactgtggagggcgtcctgcccagtaag

SEQ ID NO: 11028 - DNA, 15769 bp, Homo sapiens
ttttgagacgaaatttcactcttgttgcctaggctggagtgcaatggcatgctatcagctcactgcaacctctgccttgcaggttgaagcgattctcctgcctcagcctcccaagtagctggcattacaggcatgcgccaacaagcccggctagtttttttgtatttttagtagagacgggatttctccatgtggtcaggctggtctcgaactcctgacctcaggtgatcctcccgcctctgcctcccaaagtgctgggattacaggcctgagccactgtgcccggcctaattttgtatttttagtagagaaggggtttattcgtgttggtcaggctgatcttgaactcccgaccgcaggggatccacccgcctcatccacccaaactgctgggactacaggcatgagccaccaagcccggccgtttttagcgtttaaaaggattgcagcttggctggtggcagtccctctgtcctggcacagacgcagggggagaccctgtgtcttcagacagcatggacttcaggaccctactgagagatggaatcaagagctctccggggttctttgagtggggagttgtatcggaaaccaccatcagcgcgcctgagctcgcctcgcattgttcttctgtagtgcggggggccactgccaccaccgtgaggacacgttggggtctggggagggattgttatggctgtgggtgcaccttgcacgtcttgccgacctagctttgcacgctgatcttccctccgtgcccgcttacattgttaactgggtttctgccctccctcctctccttcgtatttctgtgtctcattgacaactgttctgtagtcgctttgttgacagttgccaaactgctttccaaaaacatttccactgcaatcccggtttttggtgccagccgcagtggtgtgagtgcgctcgctttattatagtcttgccagcactgggcgtctctgtgtattgtaaacacatgcgatcatcactcttatctctccatcccccccacaattaaagatgtgccgtgctatctctgctcaggttaccttggccttgggatgagttggctggaggctcaggcagcgcgagggacaggaggagggcgaggcgctgcctggtggattagcggggagccatggcacgggcaggactcaggagaggaggccggcagctcacagcagaccgcggggctcagctggcctgccctgtgcttggggtttgtttttgagcgttgaaatgaggtccttaaaccttagtccgtgcattgagagcaaggcagctgccttgagccttacttccttttcctctttgtcgcctagtatgacgccgtgcccatccagtccagcgtggtgttatgttcctgcccatccccatcaatggtgaggacccagactgagtccagcacgccccctggcattcctggtggcagcaggcagggccccgccatggacggcactgcagccgagcctcggcccggcgccggctccctgcagcatgcccagcctccgccgcagcctcggaagaagcggcctgaggacttcaagtttgggaaaatccttggggaaggctctttttccacggtgagtatttgctgctgctgtgtgtcaaacgtacgtgatttccttggggaggctcaccttcctcggggcttgccggagactccaagcaaggctggtgtccttccaggcaggaggtctcaggccccttgaggggtgtcacctgttgtgaaggccacttgagtctttgggggctgggtaccccccaagcagatgacgtgatgagtgtggctaaatatttaacctggttttgtagatgagaacgttagacacatctcttgatggtctgcggaggttttttctgatgtagttaatttcattttaacctggcatcagcaagttacattctgtgtccttgtgtctcactggcagggccctgggaagctgttctttttcttagattgaaagttagtatctctccagggtttttggggacatttattgacctcttcttatttctctgttttgtttttttgaatacataaaacagtacgctctggacatttgctggagacacagcctccagagtcttgtgttccgagtttcacaaacaggagtattgtcgcagtactgtcaagtcacacttgttacctgtcttcggggtgttttttcctctgaaagcaaagaaatgaaggtcgaaagcagctgacatgggacgttttgctgacgtgggacccatgaagccgtgtgtggttgtggatttagtgaaggttgtaacaggttcaggggaggcctgagcaactcggggtgtactgtctccatctgggcctctaaagagacagagtcccgtgccgccactgtggtcgccaaggtggccgccgtgtgcgtgctagggccattccagggagccctgggggcacctcactctggagggcctgggtgagttcctgaataattctttcttgcctgacctttgtgaagaaaccgtaggtgaggtttattttccttttttctcttttttacacataggaaatatttcacaatgcaaagaaaaacatgaaatatagcttacccatattcccaacatattgttttaattaatgttaacttttgctgcccttacactttagattttttaaattgcaggttttatgaaataatttttttataaaaggattatgccctcatgaaaaatgccttcaaccatgagactagtccccaaagttttggggactcagatcctttcagaaagaagaaactctttggaaaaccttgggcattctgcatggctgcttacaaccacccagtgaaagaacaggcctcctcttttctcagctttacctgttttttgagacagagtcttgctctgtcacccaggcttgagtgcagtggcatgatcatagctcactgcagcctcgacttcctgggctcaagtgatcctcttacctcagcctcccaagtagctgcagttacaggaatgcaccaccgtgcccagctaattgtaaaattttttgtagagacagggtctcactttgttgcccagactggtcttgaactcctaggctcgagtgattctctcctcagccttgcaaagtgttgggattacaggcgtgagccactgtgcttggcctcagttttacttccttgtatgtctctttttaatttaactttattttattatgtatgtatttatccttttagaaacagagtcttgctctgtcacctaggctggagtgcagcggtgtgatcatagctcactgcagccttcaccacctgggcttaagcgatcctcctgccttagcctcctgagtagctgggaccacaggcatgtgccaccatacatggcccttaacatttatcttgactgaaaaaggaagactcatctgtgaaattgcctgtttccctgggttctggagatgggtggagagcaggcactgtccctccaggggctgtggtccgtgtctttctgaacctgcaccagggaggtgcccgggagagcacggtgagctggaggctcctccatggggctgtttggaatccacagtactgggtctcagattacatgtgttaccctcagttctttctcagctttcctgaaatggagatcacataaaagttgatttccaggggagggggaaaggacagtgataggaggctgggcaagagccagctgcagcaccggagagccgggaggccccctgaggacggtcacaacctccagggagggacacgtcacgcgccattctctggaagaggatccttccttcttgtaggaaacctgcttgtgaagtgttgagtttagacaacggaaagatcacatcagtatccccttagaaagggttccactaaatatcggtgctcgttcacaattctttcttcctcttttctacttatgaagctagcacgtgctcttgtggagaaacgtgacctcacagaaacacatgagctagagaggggagccctgcccggcccacttcccctttctccctggcagctgagagccatccatgcgtggcgtattcctctgggaagaccttgagtatgtagagtccccagaatccaacttcattcttcttgagtgccacaaggcgtctcacatggtgctttccaggatctcttctgacgtgtcccatcaggagtcctgccccgattgcggctcacagcccggggccaggtggacctggccctgtggcctcctgaaggtcttcctgccagcccccaggaatgtcacgggacaggtttcctctgctccctgctcctcaggccgtccccctgtgggtgtcttaggagacacttgtgtcccacttggtggtggtggggcctccctggcacagctgcctcatgctctctggctaaaccgtgggcccaccaggaatctccagtctggtgcctcagggtgtgccccaggctagtccgagtggagggtctctcccctgtttgggatgcctgccctgctggagtgctctgtctcggaggtggggtttgagtgcagggctcaggggtgctgagaggacagggcaggaggcctgctgcatcccgggcaggtggctccctcttgtgggcacgcagggccatgcattgctggtttagctccctctgtcctttacagccaggctctcttcatggtgcccacaagcaacatcatacaaaatgtatgataacagttatttccaaaaacgaaacttcagggcagcctttgcaatgaatgtatactagaaggacatattgttgtcacagaagcccctgtgccctgccacttgtggtggcgccactgtcttccttctgttggtgaagggcgtggcagtcgaagaggttcctgagtttgtacttgtgttgcaccgttagggctgttagcagctgatccagaagcttctggaaacaacagagagatggatatgttttctcttagctgttagaacacatcaacacgagcattggcttttagctctacttgtcagtacaagacccaaaatatttcactgtagactcaagccttcagtggggacaggaagcgtgcgtgtggggcagagggactcgtcaggcccagtgtcctggttattacattgtgtgtttctttttctccttttctttcccaaccaggttgtcctggctcgagaactggcaacctccagagaatatgcgagtgagtatgggctgcagggagctgtgcgtccgggagcagggcaagcggctccgtgcagggcggctggggtggcagggccggtgtttctgtgctgatttcagggtacaggacactgttggctttagagaccaccaggctgttgtgtacaatgtttgaaagactttaatttgtaccagttacctttgtgagtcatgtctttagtgttttttgttgtttctgatagtaactcacttctctctcacctgaagttaaaattctggagaagcgacatatcataaaagagaacaaggtcccctatgtaaccagagagcgggatgtcatgtcgcgcctggatcaccccttctttgttaagctttacttcacatttcaggacgacgagaagctgtgtatcctttgcgtggttggtgccgtctgaagccacaccagtcacccctctcacttggaatcagaccctgtgtgttcccacaagcagcccccgctccctgccgagtggggtccctcaggccgctgacattcagggaggcagccgaggcagcgccagggtgtggctgggagtctgcacaggacgttacctcccggagaagccaccgatgtggctccagcacagtcctctctgctgcggcttgcttggtcggcgtcccttgctcccctagagcgccatcttttctgttattaaaccttggctcaggaatctgggaggcaaggcccggtggaagttggggtgggccccacctctgccccatccagctgacctgtgggcctgccagtggctgggctggccacgccacaccgtcgtcacccccagcaggtgcagtctgcatctgctcttctcctcccccgccaccctccaagctggcccaagtgtcgtggcctccccatcctgcctggggaggggcctgagtcctcccacctgtcctccccgtctctccccagcacccggctcttctgtgttagagcttcgttctggcctgctcccactctcagcaccatcctgcagctccttcggctgccggcggagtgtgtgtgctctctctgtttggaggtgcttgccaagtgcaggttgatgggtgatggggatgcgctgctatgccgggtggcgtctctgcccacgagaagcttcgattttggtggaggagctggacgtgcactgacgatccgtgtcagaggcttcccggcagcaagatgcgctgccaagagtcttagggctgggtaggggctggcggcagtgtggggctctttcagctcctgggcaggagtgtgtgggggggcatgaaaggctgtggtgggctgggcccctgagccgtggcagcctggcactgactctggacttccttctctttgtggcggggaacgtggggtttgctgtggcttctcctaggccaggcgggagaacgggcaggagagcaggggcaggggccgtggtcgaggtctgatgaacagaccggtcaagagaatggagtcaggggcggctcctgggaggtggccctcaagcctagtgcacagcggtgtctgctgctgagctgggagagaccggggcgggtgctgggctggcatttcatgcatccgctggtgccaccattcaggtctgagtgggcacttaggtgctgccagcagagctccaggaggagtcagggccgtgaggactttcacagcgagctggcaggctgcccagaggttggctcctctgtgagtggagcctgggttccccccagtgcaggggtgaacacgaggaggggcccaccgaggagaggagatggtgatgggatgttgctcccgagctcgaatgatggagacccagaggccacgggatcaaacgatttctgatggagggtgctggctgcccacgcaggggttatgaagcggtcaggtgcacacagcctgacccgtggatctgccctgtgccagttgttgatggtgggtaggcagtttcttggggggactgttcaaggaagagtaagaggtgaggaaatggaaacgacgcaaggtgcttccctgggattttgcctagggaggagcggggcagtggccgagcagctgccaggcacgtggcccggagcgggctttgctgttggtttgtggaaggttgtagagaatgctggcctccaggcaggcctgctgtcctccagtgtcatccctgttcctgcctctgtctcccactctcagtggcttcttcacggtatgttctgtctctcaccttcacgttccccggggccctgcacgtctctgcccccgtatgagccacgggagtccctctgggcttcccgcagagccgtcggaacacggctgcttgttggttgtgaggctgcaacagaattgcacacgcttgacctctcccatcctctcctcccgggggctcagagtccagaggagagtgaatcttgctgactgatttccaaatgggattggccagagcggtgcaggtagtgggaactccaggtctttgtccagtggtccatgttgcccttcatcattaagtcaaattccaaagccccgggaggttgtgaaggttcactcgcccctgacgggaacgagacccagggacttctgccccaccaggcatcctcggtgtgggttgtatttagagatgggcctggacaggggccactttgggcagccttggttgcaagtcccttcgcttctgggtttctcttcgttgccctgaagcttcaggttcatccttggtgggagatgatggtgccctggcaaacagaagtgagcaggcaggccagcctggctctgagcacgagccccccttcctggcctcgagagccactgctcagggcaggcaaggatttgggtccccgtgtcctgggctgccagtaagtgtgaagtatctggaggtttccggtaatggggatggacgtttgccgcttgcaggggaatctgtatctgggatccatttattgtcggtcttaagtcctcttggaaaaggaggctacagatggagccatcgtagggcagtggtgcccagaggagggggcctcccagacacacttcatgggtgtagaagttcatgagatggcttttgtcttacaaagtgtgtcactcggccaggtgcggtggctcacgcctgtaatcccggcactttgggaggccaaggcgggcagatcacgaggataagagatggagactatcctggccaacctggggaaaccccgtctctactaaaaataccaaaactaggggggcatggtggcgcgtgcttgtagtcccagctactcgggaggctgaggcaggagaattgcttgactccgggaggcggaggttgcagcgagccgaggtagcgccactgcactccagcctggcgacagagcgagactgcatcttaaaaaaaaaaaacaaaacaaaatgtgtcactttatccacggaaggagactgcatggaaggggcagtgccacgcgtggatgcgtagcacataaagccggggtctcagggcaggggctgtcgcgctctccgaccctgctccgccggcccccggggtctttgtgcatcgaagcctgcacgtgagttatatgcgctttttggtcggggtctgtaggccctgtcaccagcggttccctttcactgaggccgtggacacggccaggggccagaggggcagtcggggctgagaggctctgttcctgtttcctcgagaccgtgtaatggcgttcttaatgagaaagccctcatcatgctggtgcctcgtcttggagctggggcctgggatgcccggcagatccagtgacatgactgtcttgggccacaggtactttcagtttgcactgaattaaaaattcttatcagacttttaaggttagttttccaaaaatgacttttacaaaataaaacacatgagccaggcgtggtagcgcgtacctacgttcccagccacttgggttggttaaggtgggaggatcgcttgagccagggaggttgaggctgcagtgagctatgattgtgcccctgcactccagtctgggcaacggagtaaacctgctccaaaacgaaacaagagatttttacacttccttaactgcacgatattcagatttcggccttagttatgccaaaaatggagaactacttaaatatattcgcaaaatcggttcattcgatgagacctgtacccgattttacacggctgagattgtgtctgctttagagtacttgcacggcaagggcatcattcacaggtaaccgcgggggtggctgggtgggtttgcaggacgtcagtttgatgatcagggccagtgaccgtttggctcacaggccacggctgatgcccagatggcccccgcccttgaggtcagccaggttggagtgctccctggatgggtgggactgagatgcctgcctgtgccacagcctgagtgccaaggcgaggccacacgtccacggagcgctgacgtggagaggctctcctgccaataccacatgcaatggttgcgtgtctttcctggcgagctaatgattcttttcaccatcttgactgatgctttttatctttttcagttgtagcttctgtgtgtacttctttctggtctcgtttttcatgactttctgataaagtcagctcagaagtgtgcatagctttcattttgtgcgttaaaaatgatagattttacttcgttaaaaaacgacttagaatgacatggagatgtgaggtggtgaatccctactgtgtccagccaacacttgttgcttgtgagctttaggcctgtagccctggttgtcagcctgtaaggatcatatacattcattcgttcattttgttttcagcaaaatttagagtacgtaataatgttgctgttttaagtatttcttctcaaatgtgaaaatctgcttttacagggaccttaaaccggaaaacattttgttaaatgaagatatgcacatccagatcacagattttggaacagcaaaagtcttatccccagagagcaaacaaggtgtgtgagttttatttctagcagagcctggctctgtgcttcagatggaaagcgacttctgaggagtgtttgcattgtgtcatcttcatcaacgactgaggtggggataccttggccgttctcaaacagatcttgaactttctctgggcaagaccctgccacgccagcaggtcttcctgggggggccccaggcagtgtgtgttggtgtagagtgggaggtcgctggttctcctcggcgcctgctctggttcatcctccctactcgtcttctggacagtgtggggggccacattcgtacccagccacccgcgtgcaggatgtggagccggtgtggtcagctcctggctcctcctgcctgtgttgcaggtagtatccgggcgcgcacatccctgtacctcggtgcgctccctccgttagctgtccgtctgtctccctgctggccacgtgcacgtttgtcatcacaaagcctccgagtcctgttcccaagggtagtttctagcctcggaccatgttgtgacaactccatcggagatgttgctgaaagtccactcgggccagagaagtggcctaggttgtcttagccggccgggggtatctcgatgcccttcaggtgcttattgggtagaaatcacaaactctggaggtgtaaagaaaggcagctgaaattctgaagagtgctcccgagtgctgggtagagagaagataaagccttgggatgaggtttggggaagctgaaggctgctgtgtgcattataagtgaccttgaaggtgaacctcgggtgattgctggagtctgtctgggtcaagaggctgggtccaagggcctccaagtggtgcatgggcctctgcctgggcttggggtgcccgtcagagaaaggcctccatagagggctctgtgggggtgagaggtgctggagcccggtttggagggacgcgagtgcaggtttgttggtggaggaaagattcagacagaagtgaccgtgttgttgtagctgctctcgtgtggaaaaggggaaccgtgagcacagagcagtggtggttctggcctcgtctccatggacggccagccggcccccagtagctggaggagagcacagctgggtggagagcaggcccttcagcaaggcaggcactctggactcagctcggcttttctgtttcttaggaattggccctgtattctgtgtgctgggaggtacccagctggtgcctgtggggcctctcttggcaccttgaggtagttgctcgtttcctccaccgggccttatctttcccttctgggcgtttccagccctgtgttttcacactcagggctctggctgagattctgtcagttggtgctttcatctctgcacagtcatggaggccctaagaccttgtcttggatctgggaacttctctcagaatcctcaaacatcaccctggctgtgcatgggagctcacacctgtaatcctagggctttgggaggctgaggcaggaggatcgtttgaggccaggaatttgagaccagccactgggcaacatggtgagactccatatctacaaaaaagccaaaaatcatcctggtgtgatggcacacacctgtagtcccagctactcgagaggctgaaatgagagatggatgatgcagtgaactaggatgatcccactgcactccagcctggggaacagagcgatcaactgttaaaaaatagtagtaataaataaaaaataaaagaagcctgtaatcccagcactttgggaggtcgaggtgggcaaatcacgaggtcaggagatcgagaccatcctggctaacatggtgaaaccccgtctctactaaaaatataaaaaattagctgggcgtggtggtgcgcgcctgtagtcttagctactcgggaggctgaggcaggagaatcgcttgaacccgggaggcagaggttgcagtgagccacgatcgtgccactgcactccagcctgggcaacagagtgagactccgtctcataaataaagaaataaaaaacatcacccttttggggctaagatcgaaactagcaatcaagccggagcctcttgttgtctaaggtggcttagtcctgctgccgtccgctgccttttgtagccccgttcccctccccgtccagtggcatgccagagtgcgcacctcccgcccaaagctgcacagagccagggcggtcttcctggcgtttcagacatgccctgaaaccttgatctgtttgactcattcctgttaaatagtaaccgtcttactgactggtaatcctgtttctgtgtacacagtgtaacctcatctccctcagtgttgtctgtgacaaagttgaaccaaacaggaacttctgtctcgtaagctttcttaggatctgtcagtgtcttgctgtccttgtgctgacttcctgcccagagatgagcccacaacattccgtggggtcaggagcgctgcgggctggctctgcccccagtcagtcccgggaaccgctctctgggctgtgcccacagccagcctcaggaaccacctccctgggctgtgctctgggcatttttcccttcgtgtggattttctttctttttttttcccctcccttattgcaaggctttatttattcataatttcaacttttattttagattcaggggatccacgtgcaggtttgtgacgtgggtagagtttctttggaatctggtatttggcacagggatagtcttgttgccctgtagccacttaaaaaaaacgggcatttaagtgcgctgatgaaatagtgaaatagcttgggcacagtggcccacctgtaatcccaacacttggggaggccgaggcaggtcgatcatttgcgcccaggagtttgagaccagcctggggaacacggcaaaaccctgtctctatataagataaaaaacaaaaattagctgggcgtgctagtgcgtgcctgtagtcccagctactcaggaggctgaggtgggaggatcacctgagcctgggagattgaggctgcagtgagccgtgatcctgccactgcgctccagcctgggcgacagagcaagagcctgcctctggaaaagaaagaagaaatcatgaaataaacctttgctttttggtagcaggaggctaaaagtctttacatcattgtaaaccagggccagttgcttgtgcgtatagatgagttggtggttcttttccccttgtttgaggaaaaggaaaaaactataatttatgtggcggattaattttagtaacttattttctgtttgaggtagttcagtatcttggaatttattcctgcgttgacttcttttgtgcagagatggcttccccaaaacaccttcaaatctagaataaaagtgttgatgggagcaaggcatagcgaggttccttacccgcgcagcagctgtgccacgccctcctcctagagggaggcaggttttcccatcgttcctgtggggtgggtagggtggcccccgtatctgcagggggaggtggtgggagatggagcagggcagtggtgtgggcttgggagattgaggaggacctcctggcagagagggacttctgcctcctctccttgtacaggagcctgtggatgtatcttggtgagggcagctgactcagagtaagcttcccacctgggctgtctctggcctgtgccctctatgcaagaaccttggggagctcggggtgtccttggaggttcagacttggagtagggtttggaaacctgtgttctgacctgtgcaggcctttctggcatgcagccaggtgtggaggcagcactcaccaaacaggaaggagaggaaggccacaggtgtgggcagggctgggtggacagggtggacgctgtgggcttcaggtgtgggcggggctggctggagagggtggatgccgtgggcttcagtcactacagtggctcctctgtcctcatctgtgcatggccatcgtccagaccctcagactagctgccgttgcgcttcccactgtgctgtggactccagacgctctcctgagggccacagctgccttgagcttgccgccattctagcttaggctggatcacccacccccggcacagagaggagctgccttcaagacggattttcctgcatgatggaaagtggagtttgcacaataaaagagagagtccccattctcccatcaccaagagcagctcttcccatcttcacgtggtttattttggtcttttccagattggcattcatttaggattggctatgatgcatggggctggggagaattactgcttattgtaaaaaattcactcggtgctagtgacctgatgcccagcatcctcagtgggttttccctgtaaaaattccagtatgtgtcgctaaaatacaaatctttttaaaagcgtaaccacaataccatactgtttgatatgtaaaaatgaacggtaattgcttaatatctcaaagtgtccagtcagagttatatttccagttgtctcatgtacatcataatgttttgttgctcacttgaacaggattcaaataagttttgcacaatttcatttttaaattttttctttttcttttgccattaaatactctcctatccaaacacatgtattttaatctgtagcttcccccatttttattttttcccttgcagtttgttgaagaaacaagtcatttgcatctgtgtggcgttgttgaacatggtcctctctcctggccactacatcacattcagagttgattctcccctccctgttcagagactggtggtgggtgttctttatccggcatctctctgtgacagcagcagcatttgtggccataattggcctaaattcatgaactcattagagagtgcagaaaggtcacagcctgatacattcatgagatgcaattcattaaagagcaacttctccccagcaacttttgggttgactcgtggtatcatctgtaaaagaaaagtaggataaatgcttctttccccttttcatgccatttttgaaaaccacacattggttctccattctcttccaatgatgattaattcattaaaaaagttattacccttcctcacaccatacacaaaagctcactccagggccaggcgcggtggctcacatctgtaatcgcagcactttgggaggctgaggcgagtggatcacctgaggtcgggagttcgagaccagcccggccaacgtgacgaaaccctgtctctactaaaaatacaaaatttatggctgggcgtggtggctcacgcctgtaatcccagcactttggaaggccgaggcaggcggatcacctgagatcaggagttcgagacccgcctgaccaacatggcgaaaccctgtctctactgaaaatacaggtgtgtttttagctaggtgtggtggtgcatgcctgtactcccagctactcaggaggcaggagaataacttgaacctgggaggcggaggttgcagtgagccgagatccacactattgcactccagcctgggcaacaagagcgaaacgccatctcaaaaaaaaaaaaaaaaaaaaaccaaaaaaaaaaacttagccaggtgactcctgtaatcccagctacttgcgaggctgaggcaggagaatcgctggaacctggtaggcggaggttgcggtgagccaagatcacgacactgtgctgcagcctgggcaacagaggaaaactccatccctgtgcctcccatctccccgcctcaccaaaaaaaa

SEQ ID NO: 11029 - DNA, 2506 bp, Homo sapiens
attagatgtgaggtctcgccatgttacccaggctggtctcccaacacctgggctcaagcagttctcctgccttggcctcccaaaatgggagattacaggcatgagccaccacgcctagcccatttcattagggaggacaaggatagtagacaggtgcacctagggtcttattactgtaaattgttccagagatttaaatttcagaagctgttgagtaactggaagtgttgacttactacaatttggggtcaccaagtgggtggcagatggattgggctgtgcaggggctgaaggactcacccgcaggcccagagtcgctggcctccctgaggctgtgctgcctccatgggactgagtgctgggacggggcgttttgggagcctggcaggaccctaccctgcacgtgggccctggccgtgcgtttcctccagatcgtggcaggcggtctcgggatgctgttaatgcagttgaatcaccacctcaaaatgctacaaaatctaccctttacaacaatagtagtacaaataaacgtttagacacttcacgctcaaagagggcttttgctcgggctttttatttcacaattgatgcttaaaagtgcttttaaaggcaatattgcaactacatttatttatttatttatttgctgcagaaatgaagttatttattaaaacacacccatggtagcaagttctgatgggtctgaagaggaggcaggagcaaggtgttgagcttctaaacatcgtcctgccagggagggaccctgacaggtgcttggctgacatgctgtggccgaggcaggaaggaagttgcagaattccacgaaggcagaagactaccagtaggcaggtcccatgtcatcacacccgtgagagtggcagtggtctggtggccacagagatgtctgacagcgtgggtctggagccggtgatcggctggctttgagaggttccttcaggaggtgcctggaccctgatggacagcccccagcctcacgctcccccttgaggtttgcagagggtgccagaagtgaccccagaaagggttctctgaggtgctgcggtccctacccagcagccaggggctctgtctggaagtggccgtgtcgtggccgtgctgaaccgctatgagtccagagcttcccgggcctcctctgctctgcggggaaggctccggggctctccccaccttctcgaatctttgctcagatatcaccttcccagcaaaggctgtctgattatttgaatttgcaccaccctcatccaaatagtcctgttctctttgcctgctttatttttctcatagtaatcatcatcatctgacacgctgtgcattttcctgctctgtgtatggaagtctgtctgtcctgctggaatgcaggcttctggagggtgtggtcttggtttcgttctctgctgtacttccagtgcccaggacggtgcccagcatggagtagctgctcagccaatgctgtggtcttgatgggactgcattcgctttacatgattgaagctgctggcgtggaagctgtgccatgtcatgtaaagcatgcagtgggaaagcagtggggtgggggcgtctttgtattacatcatctgttgttgccgtttcaaaaatccagaggcctttctacacttcagttggatgttgatttcaaaatgaccgatgtttctttctgactcatgaaggctgctgtctttggaatctgacattagagggaagcgaaactttacaatgtgtggggcagcctggtgtggtggctcaggtctgtaatccagcactttgggaggccaaggatggcggatcactcgagccctggagtttgagaccagcctgggcagcatgatgagaccccatctctacaaaaattagctggacacggtggtgcacacctgtggtcccactactcaggaggctgaggtgggaggatcacttgagcctaggaggtcgagactgcagtgagctatgatcatgccactgaactccagcctgggagacagagtgagaccccgtctcaaaacagaaaaaaagtcaccaggcatggtggcacatgcctgtaattgcatcactttgggaagctgaggcaggcagatcacttgagttcaggagttcgaaaccagccgggacaacaagcaaaaccccatctctattttttcaaaatttgtgtatataaaatttttgtatgaaagctgtgtggtacatgtttagctgttttatgtttcactttctggacatgagtgtgatcctccctgctcttgcagtgccatctaagctgtcatcagttttcctgggcgagtgatgcatctccccagctggtctgtctgagcccctggccagccaaggggctgcccttgactctcccggcacccgcccgtctctgcatagccacccccaccactttaactggatggttttgtattgaggtcaggctggacatcagctttctatgggcagggaccgtgtcctcttattggctgagtaattgggtccatagcgtaggtaagtc

SEQ ID NO: 11030 - DNA, 240 bp, Homo sapiens
tgggggctgaggcaggagactcactcgaacctgggagacggaggttgcagtgaggcgagatcgcaccactgcgctccagcctgggcggcggagtgagactccatctcaaaaaaaaagttcactccgaatgcgttagaggtctgaatgtaagggcgaagactatgacactcttagaagaaattataggattaaatgtgacaattgggttaggcagtgttttcttagatacactgccaaaaa

SEQ ID NO: 11031 - DNA, 6006 bp, Homo sapiens
agaaagaaaaacctgaaggcacaatttcttttctgttcaaaatgtgaacccaggatgtctctagatgatgatggatgataggtggggagattttttttttttttaatacagaatctcatagttttggattaattagcaccaatcagtttaaacactgactgttagaatagctgcatgggtttttttctttaaactaattaagcgttggctacttagtataagtaagtataagccgaattaaggttctgctacatctgtgtttagaatatttttttaaaactaaataagtgttggctagttttgcggtgtaagcagaattaaggttctgctacctctgtgtgtagaatattcccaatggatttttcatttttcaggtgctattttttgaccctgtatagactttaatttaaaatgaatttggtaacgtttctcctctgtctctacatatattcatgctttcacctgctcttttaacacctgcttttagtatctgaggcactttttctgaactctacttgtgcactggatccctcctcctttctctgccaggctgtgtttactttatccttacatcaccacttagtgattcctttctttgtataaacatggtaaatgtcttcattagcctaaaaggaaagaccaaataaaacctttcctaccacttggatgcatttgcatcctgacttctgaaatgcctccagcctccattttctcccttcccagttattccttagcccagccatctctgtctttagctcctacaattttcttaggatattctgggaaagatgagcggagactgcccgccttgtcaaatctagtgtctttttttcagtcctcacactgcttgacctatgtataacctcctatacttccctctttgcatactcctctgggttttctgtggtagtcaagattcctccctgagatttatttcccatgagtcttgacccctcccctcagttggtgctatttccccctacccgccctccgatgatcttatcagagcccacaggttcagttttctttcatgctacctgaatgtcctgataaactggctcgctctcttctttaccttccataatggcattaccatttaccacgccacccaagatacttactaggaacctcaaagtattgtattctttttctccatcacactcatacttaatcatcaagtccttttgagcttgtctcctcttgaatatgtcccttcttaattcctgctgccttcttagtaaaggccttcattcttttttccctagtaataatcttttccatatgttccagttaaaataccatgttctccctattccttattacatagctagcattccttgaaaaaaaacaattctctcaggcctccatacctttagcatgttacccactctgcctctgctcttctggaactagaacactcatccttgaaggctgggcttctgtatgaaggttggtcctgcctccttacttgaggtgaagctttgtacatgcctgtattacggacatcctcttatttaagtgtttgtctctttcgtcattgggactccagcacccagcatagtccctagtatactagttggtgctgaataaatagtagctattattagaaaaggaagggtgaaattgacatgggagttagtaaaatgtatatggaaatgatttttaaagggaaaggtaatgattttctggcaggaaaagcagcaatgacaagattacttaagtcttgtgaaataacacttctcttccttgacctgctgcttcccttttttaccacacacacacgcacacataccacagccctttgagactgaaagcagctctattgagaatagtagtgtcaactgtattatgtagaaattctaaagtttttgggattatttcatagccctgaccttgctacttctctccactttatgtggcaggtttaatctcaggtctccctcatacacttctcagcctcagcacctaaccctcacacaacactccagtattgatgcagtcaatcttgtataacattttttgaatgtccaatgtgcaaagcacgatgttggaaattatacagaggtgaataagacaaaaactcttgctctcaaagatgtcagtctttttctttgcaaggataacacatgtagagtaaaatgcataaaggggactaattttaaatgtacagcttaattaatttttatgtatgttaacacccatgtcaccaccatgtttaggacatttccagcacccctgaaatttccttcatgccccttcccagtctgtacctacacctctaaatctattttcaatcttaatggccttttaaataactgggcttctcacaaccatagtgaacagaaacagctgggttgtcaacgtctaacctaatacttcaggaaaactcatgatggtttccatgttaagagagacatggagcagggcactggcatggtggatggatcacgcctgtaatcccagcactttgggaggccgaggtagggggattgcttgagcccaggagttcaagactagcctgggtaatataaggaaaacctgtctctgcaaaaaaaaaaaaaaaaagaggatacaaccaaatggaagaacattccatgctcatgggtaggaagaatcaatatcgtgaaaatggccatactgcccaaggtaatttacagattcagtgccatccccatcaagctaccaatgcctttcttcacagaattggaaaaaactactttaaagttcatatggaaccaaaaaagagcccatatcgccaagtcaatcctaagccaaaagaacaaagctggaggcatcacactacctgacttcaaactatactacaaggctacagtaaccaaaacagcatggtactggtaccaaaacagagatatagatcactggaacagaacagagccctcagaaataacgccgcatatctacaactatctgatctttgacaaacctgagaaaaacaagcaatggggaaaggattccctatttaataaatggtgctgggaaaactggctagccatatgtagaaagctgaaactggatcccttccttacaccttatacaaaaatcaattcaagatggattaaagacttaaacgttagacctaaaaccataaaaaccctagaagaaaacctaggcattaccattcaggacataggcatgggcaaggacttcatgtctaaaacaccaaaagcaatggcaacaaaagccaaaattgacaaatgggatctaattaaactaaagagctgctgcacagcaaaagaaactaccatcagagtgaacaggcaacctacaaaatgggagaaaattttcgcaacctacttatctgacaaagggctaatatccagaatctacaatgaactcaaacaaatttacaagaaaaaaacaaccccatcaaaaagtgggcgaaggacatgaacagacacttctcaaaagaagacatttatgcagccaaaaaacacatgaaaaaatgctcatcatgactggccatcagagaaatgcaaatcaaaaccacaatgagataccatctcacaccagttagaatggcaatcattaaaaagtcaggagacaacaggtgctggagaggatgtggagaaataggaacacttttacactgttggtgggactgtaaactagttcaaccattgtggaagtcagtgtggcgattcctcagggatgtagaactggaaataccgtttgacccagccatcccattactgggtatatacccaaaggactataaatcatgctgctataaagacacatgcacacgtatgtttattgcggcattattcacaatagcaaagacttggaaccaacccaaatgtccaacaatgatagactggattaagaaaatgtggcacatatacaccatggaatactatgcagccataaaaaatgatgaattcatgtcctttgtagggacatggatgaaattggaaaacatcattctcagtaaactatcgcaagaacaagaaaccaaacaccacatattctcactcataggtgggaattgaacaatgagaacacatggacacaggaaggggaatatcacactggggactgttgtggggtggggggaggggggagggatagcattgggagatatacctaatgctagatgacgagttagtgggtgcagtgcaccagcatggcacatgtatacatatgtaagtaacctgcacaatgtgcacatgtaccctaaagcttaaagtataataaaaaataaataaataaataaataagaaaaagaaagccaggcatggtgacatgtgcctgtggtcccagctattagggaggctgaggtgggaggatcccttgaacccaggaggttgagtctgtagtgagcagtgattacgccactgcactccagcctgggcaagaccctgtctcaaaaaaaaaaaagacttagaattggtgatccaggccgcctaatggcatcaaataatttgttatatctttaatttattgaaggatcaccacatgcttttaaatagcatggagaaatggaaagaatagggactttttactcaggtaatacccagcctgctacctaacaggttgtgttgtactaaataaaatggtacataagaagaaacactgtaaattatatagtgcgaatcaaatattgttaataaaccaatatctgtatatcctatgtcccggattaatctttaatttagatactccttctagttatctaatacacagcagagtgagaaaaatcattatggattaggttctttagtaagaaacctgagatggacttctcattagcattaactagttattgcccagctttggagagccttcttttggcttatcatttattataagcccagaaataggtgactaatcagagataaatgtatgggttgtctgtatctagttttatgccttttttttgcctaagacgtagtcaaattaatattttaactaatacatcttagcagagtttagttaagcacaaagttaacagtgggtaggattgaatcttgaaagtaatcatgtctgtaatgtttttcatgcatgcaaaaagcacagacaaaaccactcatgccctattaataaacaaaatacagatcaaagttttcaaaagtaatcactctatttattctaaatgtctgtggctttaggaaaataccaccagctagtacttacctatttaaagatgtagaatttattatcctctaatattcttatcagttgtttccacaactttagtttactattggactttcaaaaatttaaagaattacaagtaaaattcattaaacacttgtgtgtgaatagtaatacacagtaattagtacagcatgttgcttcttcaacaaattgagttttcagggaaatcagcaagtaaatgaaatataaatttttggtaaaagtatcaaacattcatcttgcccatttttcctcttaaactttattatctaatcaaacatagttttccataagatgtaataaaatatagataaggttggaatatttgaggatccatttgtggaactgaatttaatgagacttcattggtgatacactcaatttttactgggtaattagctaataatgttggtcactgtctcacagttcaagtagctttaagatgatgtggcaaggaaaacacaaagcttttgggtaaccagcgttcttaaatgtatggtttttgaccaggtgaaccctttagaagtgatttctgttttaaaagtatgtacttaaaatacctttggctgtgatgaatgtagatcccagcagaataccaaaatcctattttttttgactgagtatttgtagatgcttaatgactgaaatgaatttggaggcactgatgaaagtgatttttttaaagttctcaggtactgttcaattatttaatgttaagtttagtatcaagatacagttgtttttaaaatgccaaaatgctgtttattatacagaatattttattacatttgcaatatctttgtatatagtgatttttttcttgataataaatggaaaaattctaaaaca

SEQ ID NO: 11032 - DNA, 1650 bp, Homo sapiens
tttttaaaacaagtcaactcataccattcatctgctcaaaaccattcattggcttctcatctcactcagagcagtcaaagtccttaaaagttgcaggcctagactccctgtcctacctcaggtaccaccatatcccacctcctcatgcagctccaggcaccttggcctcagtgctcctcaaagcatcaagtatgcacttgccttggacagtctgtacttggtattccctctgccttgaatgttgttctcccagaaaaatgcatagttcactcttacatccttcaggtgtcactccactgttacctgagcaggtcgtccttgaatatatacatcagcattccctttcccccctgctttatgtatgtccatagcactcaccacgatctgactttactaagtatttattcatttactgtttgttttcccataccgaaatataaactttctaaggacagaaatttttgtgctttattgttgaatctccaatttgtagaaaaatgcctaccttatattaaacactcagtaaatgtttattgaacattaaaagtattactaatagaactttggtttttgaaagaaataataactttaattataagacgtatatgatttttgcagttttacttagtgtgacattgggtttatgagaatcgtgtacattcaagtccaggaataataatggtcatccaaattgtttgaaaggaaaataatcccagtggcaaaatgatggtagaatttgggtaatcttttttttccttttatgaaaagagattttattgaaggtaaaacattagaggttcattgagaatctctaaatccatgttttgacattgtcaagctcattgcaacttccagattgagtaacacttataacacatttccttttcaaagtgcaagatttttaaaagagacttgtcacatattcatttggctggtttcaaatggtgagctgaatgctgggtaatctctactagctccttaatcagatttaaaattctcagtgtttcctagttgtttctgcatactttatgtgagttgttatagctgtaacattacactttatttgctgtttgtgtttcgtgacttttggtaattctggcatttagaaacctttcactttgcttcaaaacgtagttatattttggagttttcatttgatatataattatttattttgcccttttatttcccaaagacattgtaagggttaattagatcattatattttattattacagattaaagttgggcagtaatcttaattatgatggaattatcattatgctaagtaattaactttacctagtttgttttacaactagaacctgccctaaatgttgaatatcttcctagcaagaaacagtctgtcattttacttacacgatgtctaaccaaaccataactttacataaactagtcgtttcggtcaaatagaaaaatgtgtgaatgccataaaaacaaaaattctcagttaaatgatactgggaaatagggaagacagcaaagtgagacttgggctcaggatggttcaggaagaaaaaaaaagaaagacccctgagtaccattaatattcctcagaaattattatttcaaaaggaaatatttctgtattataaatttttcatgagcagccattatgaaatctcacaa

SEQ ID NO: 11033 - DNA, 160 bp, Homo sapiens
acttgttgtctttcatcttttttggtaatagccattctaatagttttgaggcggtgcctcactgtggttttaaatttgcattttcctggtaagtgatggtaagcatttgcatgtcttaaacctgttggccatttgtatgtcttcttttgagaaatgtcta

SEQ ID NO: 11034 - DNA, 3406 bp, Homo sapiens
gaggtacacgtgtgctgttagagccaagagggggtcaaaataaaaagacagggcacggtggctcatacctgtgatcccagcactttaggaggctgaggtgggaggatcacttgaggccaggagttcaagaccagcctgggcaacatagatccccatctctacaaaaaaataaaataaaataaaaaaataagccacacatggtggcatgcatctatagtcctagctacttgggaggctgaggcaggaggatcccttgagccctggagttgaaggctatagtgagctatgatcacaccactgcactctagcctgagcgacagaacaagatcccatctctgaaaaaatggatgagtgaattaaatttcaaaatagagatttaatggaaaaatgagaattgttgtgtacatgatttatgaagtggcttacataatataattttggacatgaaagccctgaaaaatagcttcttattttaaggatgaacagactgggatttatttctgaaattctataattctcagtcagttgtaaggctttcattatataatagacttttttttttaaccaacggaagttggacctcttcaaaatgtgagatccaaaaaggttttggatattgtttgaataactctcttctccaaaggagactgtttttgaaaaatgattctttctgacatgttaaaattgaatatttttgacacgccaaatgcaccaaagtattatatgtcatgtttattgccgagagtagctatatagcttgtgggagacagttaacgtgaagctttcttgcatctggaagtatggggagagagaaggcttcttcacaccccctttcatgttatattctacagggaaagaatttctatcatgtagacactaggtgactcccttgtggataatttcatttaacaatgatttctgggtgttgctctatgccaggcactgttctaggagctgatgcgaaggctcagctgatgggctacagacctgaaggcctgtgctcctcagtggcactctgtaggtagatacagagccaccatctactgggtgcttctcctgagtgtgacagtgtaggctgggacacgatgctacccttcaaggagcttgaagctaaggttctgtgcacagataaaattagaataaatgcagagatgctataacaagatgtcttagaaaaaagaaaaacaaagaataaatgcagagagaaagagaaatgtataaaaggtagagagataaacataccacaagttcatagaaaagaaaggttgtgtgtttatctgtggctgggatgatcaagaaatgcttcatggataaagagcctttgagccagacattgaaagaaaggtaatgttggacttgaggtcttggagtatcctcgttgaaggaaacatgagcaaaggcataggtagggatgggaaatgccggggtgcagagtgggcaggaatcgatttgtagttgctgggcaatgatgtgtgtaaaccactaaggagaagatcaggtagcaaaggtccttggaggccagaacccagagggccttgaatggcatgtgactaaatgatttaaacttaagttactggggagcaatggaagaatttgagtggctagagtccccatcctgaagaggccttgcggggatcagcatgtgggtgcctctggactgtgaaatagccagagctgggaagccttttagagctgctgttgtggtccaggagggaggtggggagggcctgggtgaggggaaggccactagatggagaaattgaatttatgagatgggatttaggaactgcctagataataggggttggccgatgggaagcaaaaatgcccccagagctttgaacccaggtgccattcattatttctatgccatctgccaggcattgcatagctattatctcatttaatctcctcctaatcttgtgggttggtattttcatccttatatcagagacgagaaaactaagggtcagagaaaattagcaattggtctaaaattgtacagttgtaacaggatctagaacagggacttcagtacaggcctccctgacccccaagcctgtgttctttctactgtactaggcttggaagacagcgtacgtgagagcaaagacaagctctgtccactctgtgcatattcagtgtaggtgctggtgagattcccgccttcaggtgtccagcaagtggttggagacatggagccgaatctcaaggacattgggaggattgaaggtcaaggcttaagaaccatctgcatcctcatttatttattcagcagctatttgttgtgtcttcgtggaccagcttggcagcatgaatgctgtgaccaacaagagaggtgtgtccttcacggagctgccaggctgggagggagccctgatggcgtggcttgagtgtaaggcaggaggtgtgcagattggctgtgggaacttactggcctaaccttgtcaggtcagggaagctctctagaggcagttgtggttctcaacatgagactcaaatgatgaggacccagataaaaagtgggaaaacagcataccccaggccgtggaagtagcgcgtactcaggcagagcaagataagaacacagtgtctttaaaccaaaaaccacgtgtggctggaatggagggaagagcaaggagataagacaggtgagcaggaaccagaacaagaaatgccctggaagctgtgagacgcttggaattcacctgtgaagaaaagagtagcctcatctgaattccttgcctcgattatggtctccaatagaagattaaatggctgtggagtctagaggttttttccttcggtgtgggcatcaccccttctgaaaggatggtgtaatggctaattgtatgtatcagcttggcgaggccacagtacccagatacttggtcaagcaccagtctagatgtcgctgtgcaggtatttttttagatgaggtttaacatttatatcagtagaaggagtgaagcagattatcctttgtaatgtatgtaggcctcatatatcatcagttgaaggccttaagagaaaaagattgaagtccctaaagaagaaggaactctgtctccagtctcccttcagactcaagactgcaacatcggcctggcacggtggctcacgcctgtaatcccagcactttgggaggctgagatgggtggatcgcttgagatcaggagttcaagaccagcctggccaacatggcaaaaacctgtctctatttaaaaacacaaaaattagttgggcatggtggcaggcgcctgtagtcccagctacttgggaggctgcggcatgagaatcacttgaacccaggaggcagaggttgcagtgagctgagatcatgtaactgcactctagcctgggcgacagagtgagactctgtctcaaaaaaaaaaaaaaaaagact

SEQ ID NO: 11035 - DNA, 3406 bp, Homo sapiens
gaggtacacgtgtgctgttagagccaagagggggtcaaaataaaaagacagggcacggtggctcatacctgtgatcccagcactttaggaggctgaggtgggaggatcacttgaggccaggagttcaagaccagcctgggcaacatagatccccatctctacaaaaaaataaaataaaataaaaaaataagccacacatggtggcatgcatctatagtcctagctacttgggaggctgaggcaggaggatcccttgagccctggagttgaaggctatagtgagctatgatcacaccactgcactctagcctgagcgacagaacaagatcccatctctgaaaaaatggatgagtgaattaaatttcaaaatagagatttaatggaaaaatgagaattgttgtgtacatgatttatgaagtggcttacataatataattttggacatgaaagccctgaaaaatagcttcttattttaaggatgaacagactgggatttatttctgaaattctataattctcagtcagttgtaaggctttcattatataatagacttttttttttaaccaacggaagttggacctcttcaaaatgtgagatccaaaaaggttttggatattgtttgaataactctcttctccaaaggagactgtttttgaaaaatgattctttctgacatgttaaaattgaatatttttgacacgccaaatgcaccaaagtattatatgtcatgtttattgccgagagtagctatatagcttgtgggagacagttaacgtgaagctttcttgcatctggaagtatggggagagagaaggcttcttcacaccccctttcatgttatattctacagggaaagaatttctatcatgtagacactaggtgactcccttgtggataatttcatttaacaatgatttctgggtgttgctctatgccaggcactgttctaggagctgatgcgaaggctcagctgatgggctacagacctgaaggcctgtgctcctcagtggcactctgtaggtagatacagagccaccatctactgggtgcttctcctgagtgtgacagtgtaggctgggacacgatgctacccttcaaggagcttgaagctaaggttctgtgcacagataaaattagaataaatgcagagatgctataacaagatgtcttagaaaaaagaaaaacaaagaataaatgcagagagaaagagaaatgtataaaaggtagagagataaacataccacaagttcatagaaaagaaaggttgtgtgtttatctgtggctgggatgatcaagaaatgcttcatggataaagagcctttgagccagacattgaaagaaaggtaatgttggacttgaggtcttggagtatcctcgttgaaggaaacatgagcaaaggcataggtagggatgggaaatgccggggtgcagagtgggcaggaatcgatttgtagttgctgggcaatgatgtgtgtaaaccactaaggagaagatcaggtagcaaaggtccttggaggccagaacccagagggccttgaatggcacgtgactaaatgatttaaacttaagttactggggagcaatggaagaatttgagtggctagagtccccatcctgaagaggccttgcggggatcagcatgtgggtgcctctggactgtgaaatagccagagctgggaagccttttagagctgctgttgtggtccaggagggaggtggggagggcctgggtgaggggaaggccactagatggagaaattgaatttatgagatgggatttaggaactgcctagataataggggttggccgatgggaagcaaaaatgcccccagagctttgaacccaggtgccattcattatttctatgccatctgccaggcattgcatagctattatctcatttaatctcctcctaatcttgtgggttggtattttcatccttatatcagagacgagaaaactaagggtcagagaaaattagcaattggtctaaaattgtacagttgtaacaggatctagaacagggacttcagtacaggcctccctgacccccaagcctgtgttctttctactgtactaggcttggaagacagcgtacgtgagagcaaagacaagctctgtccactctgtgcatattcagtgtaggtgctggtgagattcccgccttcaggtgtccagcaagtggttggagacatggagccgaatctcaaggacattgggaggattgaaggtcaaggcttaagaaccatctgcatcctcatttatttattcagcagctatttgttgtgtcttcgtggaccagcttggcagcatgaatgctgtgaccaacaagagaggtgtgtccttcacggagctgccaggctgggagggagccctgatggcgtggcttgagtgtaaggcaggaggtgtgcagattggctgtgggaacttactggcctaaccttgtcaggtcagggaagctctctagaggcagttgtggttctcaacatgagactcaaatgatgaggacccagttaaaaagtgggaaaacagcataccccaggccgtggaagtagcgcgtactcaggcagagcaagataagaacacagtgtctttaaaccaaaaaccacgtgtggctggaatggagggaagagcaaggagataagacaggtgagcaggaaccagaacaagaaatgccctggaagctgtgagacgcttggaattcacctgtgaagaaaagagtagcctcatctgaattccttgcctcgattatggtctccaatagaagattaaatggctgtggagtctagaggttttttccttcagtgtgggcatcaccccttctgaaaggatggtgtaatggctaattgtatgtatcagcttggcgaggccacagtacccagatacttggtcaagcaccagtctagatgtcgctgtgcaggtatttttttagatgaggtttaacatttatatcagtagaaggagtgaagcagattatcctttgtaatgtatgtaggcctcatatatcatcagttgaaggccttaagagaaaaagattgaagtccctaaagaagaaggaactctgtctccagactcccttcagactcaagactgcaacatcggcctggcacggtggctcacgcctgtaatcccagcactttgggaggctgagatgggtggatcgcttgagatcaggagttcaagaccagcctggccaacatggcaaaaacctgtctctatttaaaaacacaaaaattagttgggcatggtggcaggcgcctgtagtcccagctacttgggaggctgcggcatgagaatcacttgaacccaggaggcagaggttgcagtgagctgagatcatgtaactgcactctagcctgggcgacagagtgagactctgtctcaaaaaaaaaaaaaaaaagact

SEQ ID NO: 11036 - DNA, 360 bp, Homo sapiens
caacttgcaacgagctttcttggaaacatagacgtgtttatgttgttgagtcttgagatgaacatgtgtgggcttctgacgacactgatgcccagtttgtatgattggatgatacctgaaaagtgggtcacttcctagtcagtgaagggtacacagggctgaataggcagggctttttggctttttccatgcttttgtttttgtttttggtgtgtgtgtgtactaattttagatactcagctaggtacttgactggctatcctttttagcatgtgatttaatttggttttacccatcagtatttatttcaaggggactaaataaacacattaaatgaagcacttaagaactttctatctt

SEQ ID NO: 11037 - DNA, 360 bp, Homo sapiens
caacttgcaacgagctttcttggaaacatagacgtgtttatgttgttgagtcttgagatgaacatgtgtgggcttctgacgacactgatgcccagtttgtatgattggatgatacctgaaaagtgggtcacttcctagtcagtgaagggtacacagggctgaataggcagggctttttggctttttccgtgcttttgtttttgtttttggtgtgtgtgtgtactaattttagatactcagctaggtacttgactggctatcctttttagcatgtgatttaatttggttttacccatcagtatttatttcaaggggactaaataaacacattaaatgaagcacttaagaactttctatctt

SEQ ID NO: 11038 - DNA, 4758 bp, Homo sapiens
ggagaaactcctcctcataccttctgcaaagttgacaaaaacttaaattgtggaatggtaagaataaagttttcatcttcaaagtttcatatgaaaccaaaaagggatacgttttggattcctgtttactgttgggtatatactcacattttatattttcatgatgcttgtttttatttttcctaatttttatgatttgtaataatttttaaagtcctatcccatgatttataataatttcatctttaagtcagggatatttttgagggagtaaatcctaatattgtctgtgttacattaacaaaggttttattcacttttggatttcagtggtgtcttcagggacaactgtggggttagagtgggtagaagctctccttacattcatttattcattcattcattcatttgtttgctttttttatttttttgagacagggtcttgctttgtcgcccaggctggagtacagtggtgcaatcacagctcactgcagccttgaccccccaccaggctcaagtgatcttcccaccttagcctcccgagtagctgggactacaggatagtagagacagggtttcatcatgttggccaggctggtcttgaactcttgaccttaagtgatccacctcccttggcctcccaaagtgttggaattacaggcgtgagccaccatgcccggcctgtttttgtttttgagacagggtctccttaagttgcccaggatgctcctgaactctagggctcaagagaaaatattgcagttttgcatacttatttttttttttcagacggagtctcgctctgtcgcccaggctggagtgcagtggcgtgatcttggctcactgcaacctccacctcccaggttcaagcgattctcctgtctcagcctcccaggtagctggggctacgggcgtgcgccactacgcccacctaattttgtatgtttagtagagatgaggtttcaccatgttggttggccaggatggtcttgatctcttgaccttgtgatccacctgcctcagcttcccaaagtgctgggattacaggcgcaagccaccacacccaatccatgcatacttactctttaaaaggactgtagtgaagaagaaaatgaacataaatgtttgattcatagtttttaaagactacagcttacttttggttcagatttactttgaaaaatatcttcaggtcaaactaatattagcttaatgttgtataggcggagatgacaaatgcacccagaacaattagtgaagacagggttgcctctggaggtgatgacctcatagtcctccagtgacccaagtcttccccaatttgggctccagtgcacactccgttttgtgctgtgtcttacaagaaggggcaatctctgagtgattgtgaaattctaaatcttttgaaatggccttcatatcagtttgatttttgtagcattgttttcttactctcttattttagtgttctgaacttcatgctttgctgtattttatactgcatagttcattatataaacgttttaaatagactcttctgagtaaataaatgaatctttagttggtatccaacaaaatcaatttcttttcactcttttgtcttttttataaacctaattcatgttttacagtggggttccagcgtgtttctgtgttataagaagtctgtacctgcttcaaatgcaatagcatataaggctggtaagtgagttaaaaaaaattgtctcaattgctatagttattggtgcatattaacatttggctaaaagagataaagtatgctcccttacatagtttgtagaattgatctattcataaaattatctataattttagcatataaagatatgtgttttcttaaatacatatacaagatatattaatacccccaccaaacatgctgttaatttaatttaaacatttatctaaagcaaacatatgtggaataaacattcaagcttttggtctacgttaatagacttaacagtataatggaaagttgctgactctctgaccttttatattttggcaatcagaaaggtgtcaaactgcgtctttacttcttatatttccttctcttatctctttgtgtctgatttgaaaccacatgttacttgccatgaaaggtggacttgcttcctttctcctttgttgcaaagaatcagctatatggaggagaggagggcctgagaaacttttctgccatgaagtgtttgagaaatctatcgccacattcttactgcacattaaagtgtcaagggctgtaaagatttaagtgtcacgtcttcattccactggtatggtgggataaaaactgaaaatacaggtatgctccagttgtaaatagaaaagatactggaatacttctttgtgaaaagaagcagtgctaattactatttgattatgcacagttcttgaaataaagttttacttcagggaagtcaggcaaattcatatccaaaaaatcgtgattttcataaaaacattcatactaatgaaccaaaccatttaatttataatataaaaataatggcaacgactaacgtataaaattcagtatcattttaaaatctgatactgtaggctgggcatggtggctcacgcctgtaattccagcactttgggagagtgaggcgggcagatcgcttgaggccaggagtttgagaccagcctggccaacatggtgaaaccccgtctctactaaaaatacaaaaattagccaggcgtggtggcacgcatctgtagtcccagctacttgggaggctgaggcacgagaatcgcttgaacccaggaggcggaggttgcagtgagccgagatcacaccactgcactccagcctgggtgacaaagcaagatcctgtctcaaaaaaaaaaaaaaaaagtgatactgttaatactgctgtaatatgttgattatgtgtgatgtcctttttttgttgttgttgttgtttttggtggagaaaagatatcacttaaaaaacttatagaaagaaactgtaccaaagtattcagttatttgatatgagacacttattttagaatagagagttttagatactgaatttgggctcaaaattctactactgattttgaagtttttcacttagagatggtctatatattgatgaccttagaggctaatgaacagatgccatgtagctaatttattctgtgggtcttcattgtggttctcaaagtgtcacttgctcctactttctgggtctcacatactctgtacttagtcacagtgtttctgtctcatttacttttcatgttgcatgccttttacactgcttccctcttaagatgagtttaggggctgtgataatttctgttgcctcagcattatttcataacacttgtctcttccctgaatttttcacagaagactaactgaaatagttggtaaatttttctgtatgtttcttaccattttccacaaggtgttggcatgtgtagaagaaaatacattaagattggtgatcaagattggttgaatggaatctcaactagtatattaatacattttaaatgttacaatgaactgtaaattcatgggtaaaatatcaggggtaaacttattttagtttctgttatagcaagggggaaatcaattttaaaataccacacaagtattgccatgaaattcggcattaaaatattccattaatacctatcatatgcaatttatggaaaagtaactatttaaaaaatttattgttgtctcattcttcaaaaggtttaatttttagatatccagaagaggactatgagtcatttccactctcagaatcagatgtacctcttttctgccttcctatgggagctactattgagtgctgggatcctgaaaccaaatatccacttccagttttttcaacttttgtcttgacaggttcttcagccaaaaaggtatgtttttgtctcattgattaaacacattttgtccatgtttttatttcataaaaaggttaatacaagttttatttgaatgttaggattatttggacatgatacattttggtttaaatttacactgtcatccccaaggtgagaaatcaacatgaaaattgctatcaggatattgatacctctggaacttctacagaagcaaagataaagtctctctggatagacaccttcaaaacccaggtgtcaagatgagatgattatgacagatcaaggacataggtaccatagaaagaatcgacagacacaattaaaaagcagggttagaccctcaagacattgaaatgacagaatgacaatataaaggatgttataaattaaaatatcattgagatgacctaagaactaatggaggggctcaaaatatcaaggaaggaacaggatattttgaaaaatgaatagattgggaaaagaatcaagtgtttagaaatgaaaaatatggtccttaaaattaaaaattcagtgaatgggttaaacagcagagataaggccaggtgcggtggctcacgcctgcaattccagcactttgggaggctgagacaggtggatcacttcaggccaggagttcaaggccagcctgggcaacatagcacaactccgtctctactgaaaatacaaaaaattagccaggcttggtggtacacgcctgtaatcctggctactcgggagggtgaggcatgagaattgcttgaacccgggagacagaggttgcaatgagctgagactgcaccattgcactccagcctaggctacagagcgatactctttctaaaaaaaaaaaaaaaaaaa

SEQ ID NO: 11039 - DNA, 439 bp, Homo sapiens
ttctcctgctgaaagtagtaaatataactgaaaattttaagatcttcaaacattagttacctaatatgctttggcagtagagaacaataaagtctcatttgagatgtgggtactaggtgatctgcttggctttttcattgtttaggggatatcaacatgtaagcattgaggtgtgtaaaatttaggtatttgtcattgcttgttaaaaactttgagatcactttgaaataattatatctgggaatattgtgtgtataaaggcaagggttataatgaaaaaacagttggcaagatttataaaatacagaagtaaggattgattgttgggagaaggggatgggttaaaaactttgagatcactttgaaataattgtatctgggaatgtgtgtgtaaaggcaagggttcctgtgatatatataatgactaaacagttggcaa

SEQ ID NO: 11040 - DNA, 10885 bp, Homo sapiens
agcaaagaagattttctgaatatctgcattgaacctgacaccatcagcaaaggagactttataactatagggtaagtggactggggttcacaggaaatgaggcttgtgattttctcagattttactattcagagtgccccatgaagtctaagacagaaatccagccaaagccttgtcttgtttgggaatttcgatgttatttctttcctatgggctgacatgtagagtgcccctctcctatgctggccatcactgttcattttgtggggatcagaatgtaagagcagtctttgtttttcaattgaaaccaaagaattcaatggagcatgacacagcgtcaagaactttggtttcagggtcaaagagctgaatgcaaattttgattctgccacttacccgacgtcatgactcggatcatttagcatctctgaattctttccgtctacagaatgaaataatcatctctgccgatctcaggactggctttcagccttgagtaagagaatgtgtgtcaagcctttttatattttgaagcacttcacagtatccattactatttatgtcagttcaccatgtcctcctattcccagggccttcatgaaaaactggaaaaggtattgagtaccttggacatttcccaggcctttttcccttttccaatacagaatacccttccaagttctgtgatttgttaagtcctacctctgccagaattttattggtaaagaacactataaatcctccttcagggcatctgaggagctggtgtgttcccatgccaactggtaatctgctcagctccgcttttctgtgctttgtctcagagctccctctcgtgcccatttagggatcacacatttctgctgcagcggcctggtctccatggctacttcattatctacacaggcacataagtttgttgttcttgcctttggcataaattcttcagagactgaatagctgattctgcagcctttgattttcttgctgtatctataagaagggaaaatcctgttccttctacagaatgtccagaaatcacacaatcttcattgacagtctggccagtgagaccagcaatattcaaatctcctttatgatactggtatccagaaatagagaccccaattctattgctaaggttaggcgaagccactatgttctgcattgttagcaccagtggcagccagtgtccttctgttctctacaggaagtgaaatcaagtaatgtctgtttcctctggatatctgaagagaacatagtgaagctgcgttagaaaactctgataccgttttgtagagttactgttgttaataaatgataaatggactgatttacttagattagcttttactgtatttccactgcctaaaagatacatctgcatgaggtggagtgtgtgtctgtatatgcgctggaaattttactccatagtcactcagtcaaggtagatattgtatgccaagtagaccgcgttataaatacagtcatcccacggtatccttggggtattggttccaggacctccctcagataccaaaatccacaggttgtcaagccccttctatatagtggcacggtatttgcatagacttaggcacgtcctccctatgcacactaaatcatctctagattacttataatactcaatataatgtaaatgctatgtggatggttgctgtcctgtattctctaggggataagatagtctgtacggattcagtacaggtgcaaaaatatgtattctctatcctcagttggttgaatccacgggagtgggacccacagataggaagggttatcagagaacttctaagactagttgttcatatacataaaagaaatatctacattaaagtaaaaatattttatccttcaagtaatcacaagaagtaccaaataccagacgtttagtacttttcctaaagaatttcattctaatttttaaatttgagactaacaatctaagaattaggtacatgtggaatgattatttttaaatcaatcaatttttaaatcaaattaagagcatttcagagaaagtcataacttcatgcccagttctctactttcagtctagaatgtatcacaaggctaagcaagaatcactgttggaaaaattatttacagaattctatggcttaatagaccatctgtccacttatgtaagctcataaaaagggggaaagaagttgctacattgttgcaacctagtgcagttgccatcactggtcttaagcttgctttttcctgtgctcacagaagtcgaaaggtgagaaaccccaagctgcacgtggagggcacggagtgtctccaagccagccagtgcactttgcttatcccggaggtgagtggggaaggggtcggtagtcacagcatttgattcgttcgtcatcggcctgcccctctgtggtgtcccatccttcctctctgttagctgacctagacttaggcacatattgtgtgccaagcattttgccaggctctgggtcatattagcggggagctgaaaaggatggcagaatctccttgggagtcatggatttagagttggacttctgaagactcccatcgttttcgaaccaaggttcttccctaaagtgagttttaggtctccttttatttttccatatgtaaataatgcagaaggttactacattaagacacatagagaattgtctagctggcaaatgttaatagtggcttttactttaacattttttataaaggatctggaagcagttttcagttcaacactgaatttttctgtattatgaaatgccatgcttagaataacctatgtaagtgaaaaaaattggaaatagaatctggaattgggaggttattcaattgtcaatacggaaaaaaaggaggctcttcatatagcctttgaagacatgtggccatatattactgtattcagacaagactataggtaaacagaaggtatccccatagtgactggcgtcacagtttcgatataaatattgaattaaatgcatgagttatggaagggtttcatagactgtaatgatattaatgttgatacaccttgggtatatcaagctaaacaagtcttagagaataatgaaaatgatccagcagatacaatagcatgtcataagagaattagctgtctttatttttatttgagaaggattagcataatatagaaagactatgtatatgagttccttaagacatggcaggacccttgccttttaatacatatttgaaaattataaccatgttgttcaaatcccaaaatactctgggaggagataggggccaaaaaaagaaaataaatcctttttcatggatggtagaattaggatgtttccagaaccagcactgtgcccatcgtagtaggcactgaatttttttttgtaaaagaacattaggatagctcctcaagagaggatgttgttttccataatgaacttcttctggtgctgctgtgagacctccaactccagtaggccactgatgtgtttgagctgttctgaatattctcttctccccagggagcagggggctcttttagcattgacagtgaggagtatgaagcgatgcctgtggaggtgaaactgctccccaggaagctgcagttcttctgtgatcctaggaagagagaacagatgctcacaagccccacccagtgagcagcagaagacaagcactctgagaccacactttaggccaccggtgggaccaaaagggaacaggtgcctcagccatcccaacagtgtcgtcagagggtccccagggcattttcatggcaagtacccctctgcccccactccagcagtgcttcccaaagtgtgctctgtcacctgctttgcaatcggcttccattagcgcatgttttattttggtgtgacggttggccctcctaaacacggactttcctcaggctggttcaagacggaaaaggactttcttctgttttcttccaaagtgcaaccacagtggagagcccacggtgggcttagcctgcctaggcccttccatttctcttctttgaccgtgctaggaattccaggaaagtgcattcctgccctggtgaccttttcctatgtctaggctcctccacaggtgctgctattttgtgagctccggctcctgtttagcttttatttcagttctaacctcagtccagaaacatatgtgaggttgtttccctcttcagccacggctacaataccggaaaatgctagtttttatttatttttttaagtagtgcttcctaaatggtttgcatgagagccacctggggtacatgttgaaaacttatttggggtctaccccaaacctaataacccaaatttggggatggggcccaggaatatgcatttttaaaaagtcatctgcccttcccaggtgattctgtaagttgtccctcaactgtacttggagaaatcgtgttttaaagcagtagtccacaaagtattctgctcatgtgcccccaaaagtattttgaaaaatcatgtataccctcacccatctaagttgatatctaaaattttatctaagttggtatctaaaatttttcatgggaagttaaatagttgacaaagtatgtatttgctggtgtcgtgtaaatattggtattttaaaataaaaactgttacatcactattttaaacatatccagtacaatttaaatatcacaacaatttgacacccttcattcatttataaaaataaatgagctagttctttagtagttaaacatttcaaattggcttttctccttctgtatttccataccacttttcagccaagaatcctatcataatgtaatctattatgcccgacatcttttaatcattcaccccattacttcttgtcaacaaaaaatataaatggaaattttttttttagctcttgctttaagtgtttgtttgttatctcagtccagaaccaatattatcgtaattaattattggtatataatgaaaacggtattaattcttggatgattaaaagtttttttattagaatgttctttatcctaattagttcatttatccaagaatacatgaatgtgatttacagctgagatggggttcaacctcagctgtattccttgtttctgtatagatgtaagcacataaattcgatggaatagaattacgttaacaatgtttttacagttctttggattcctttggcattttgacaaagatcacagtgctctatcatcaagaattattaatgatgatctatcaactaacaaacaacttgattagattctcctttagtctgttgaaagcagagaactgaaatccacctgatttaccatggctttgccagccagtcattagcaccatttacttttactatcgctgacattttcctttgttcagtggccctgaggttcttacactctagggggcagtgcaccacaggaagatagatcaatgagggaggattgcgagggggaaggggaggaagcagagctggcaggccttagctacaggctctctctcaggcagatcccttttaagatacatacaccatgcccacacatcccatggagagagaccaatgctttagtagattacagaacagctatgaaaagtccatgaatgaagatcacaaaaaggaaggctttcttatttcatactgtattcttcagggtggtaaaatttctgcttttggcaaaaacataacagacggttccaaacatcagcataaagatcactcatcccataccacccacaggtagggaggaaggatgctgtagtatatgaaaacaaaagttttcacctgagctgagagcatttagcatatcgtggttctgtaacaatatcaaggaccagtgcagaatctggctttcttttctgataggctaccagtgtgtgtttatgtgtgctcattttgtggttctaatcataatggtacatataattagggaaggatatggaagccactttagaatcttattcatttttaaatataaatatgccttgtttcaaactttgttttcttgattcaggctttctttcctgtgagggcttggtttccttattgttgactgctttgttctttgccttgtccttccctataaagcctgcatggaagacgtttaatagtgcaactaaaagagagtcagctgagtgaggcttgtcagccaaagctggaatgctgagctatctggaggagatcctaataacccaatttggggatggggcccaggaatctgcattgggaagtcggccacccttcccaggtgattgtttagtacaaactttttgacagattaatttcactcaaatgcaaagattaatcccagcactttgggaggccaaggaaggtggatcacctgaggtcaggagctcgagaccagcctggccaacgtggtgaaatcccatctctactaaaaatacaaaaattagctgggcatggtggcatgtgcctgtagtcccagctactctggaggctgaggcaggagaatcgcttgaacccgggaggcagaggttgcagtgagccgggatcgcaccactctgcactccagcctgggtgacagagcaagactccgtctcaaaaaaaaaaaaaaaaaaaaaaaaccgtagttgctttctattaagatagggttttaaataaagcttttttcctttccctcacagctgttttgcacatatctggatgcagttatatttcctaagtgccagtgcttcacatatgtaactgatgcatcagttctcacaacaaccctaggaagtagctacaggttgagcatccctaatctgaaaaggcgaaatctgaaatgctccaaaatccgaaagtttttgagtgccaccatgatccttaaaggaagtgcccagtggaacattttggattttggatttataatgcaaagattctaaaatcctaaaacatctgaaatctgaaaatacttctaagtcccaagcatttcgaataagggatactcagcctgtaataatatatggttacatagcacagaaaataggaacctgactttgaatccaggccatttgatttacagagccaccgatagcaatgtactctataccggttctaaatacatactgtaactccccaagaggttaaaaatgaaataaaagtttagaatatacacatataccaaatatatatcaagtacataaagttttaaactgaactttgataagagagtttgtaaagtaaaagggtggtggtctctgtgggattctagaagtttcctgatgtaattaagggtacacagccctggctcttctgggtggcgcagttattcccaactttgtttcccattacctggagaaagtttgtccagaccgtggcttctagaaggacaggtagcagctccccaatctcctccatcatcactgtaagtgaagtcaggttcagcccccacaggctctgctcatggagtaggccaccattccttcctaccacaaaccacatttctcggactggagaagggattgcagcacgcacgttcatgttaaaatgtgaactttaattgtaaaaatcattttctgtaaatatagttatatcaacctctctgcacacaacttggttcagatatatacagatatgatattcatagatgttatttgtaccacagaacaaaatcaattcaagaaacatttacttttagcttcaggattaaccccagctttctttaggccttaaaattaccaccactggaaacagagagagagcacggcatacctgggcacaccagtattcagggcaaaatctatgcagtgtcttactaatttcatactatgaggtaaagacccgaaacaaaaatagattcagtctctcgtattgctataactcttaggctggggtattaatcaaaataggatttttacatttaaggcgacagggaggctatgctgattctaactcagaaagaaatgggaaaacagtttttctaaggctacaactatttgtttaggcttattttcccggacctatacaaaaattcagtcaacaagttttgggtaaataaaggaaattcattttgctttcctctgctctgtccctgaagtcactcatccaggttggctgctcaaacaccaagaatctccaccattcttcacttgacagtctttgtggacacgttagacccaaacttttttttgtataacaccatcttaaaattttttagtatactttatctttctttagtttacccaaaggaaggagttttcactctaatgtcaatatatttgcaaccatccaactcaaagacctctgtgtcgactgttcactttgtggatcatctctggctcatttaaaacatcctgcctcatccccacattcgctgactggccttagaaagcaaagtaaatttattgttagtctaaataagcattctatagcaaacataagtaattcacacctggcctactatgaaaattaaattttctgaatttagatcatattagctctaaaagccccacagtatgctaaaaatcgaaaataaattctaaaaagaggaaagcaaggcttttgtctccatcatcatttctttatatagcactagaaaattcttattccccttctaaatttgcaatttcatccaactgcccctaaattctagttccaaaaacaaattaaagtgccagttataacactacctcccactcccacctctctcaagaaagaggcctaaaaataagaatgatgacatttacccttttttgtactagagctttactgaaggttggtatttttatgtcaaccttcctaggactgtcaagtctgcctcctaaagagcgctgtcaggatttcatagcacaatctccttattcactctccaaattatttacatagtaaaacttctatggggtctcagccaccaccaaattacaaaactgcccatttcttctagaataatagttttaaaatttccttccatttcagtatatgcatactcagttcatcacatagtaatatcaataaaaaaataaacttccatttcttataagaaaaacattaacttaattcacagttagccttttcccacaacactcaatactccagtagcttctaggaagagaggtatattagtgataaaaatggaatattaaaaatccatgacttgggagtaaacggagcccttaactcctcctctccccctacctgaatcacaaaagggttttcctgaaatgagaggggatgggactggggtcagcaggattctcacctcggtctaactacaaggtacggggagaagacaggagggctggccatttggcagaatccaagcctactagcttgggatctactagggagataaaagcccatgcctggcatattggtccccattctaattgtcttgcccatgttagacctgtcatcacactaaggcaagtccactgccaagctgagcattatcctattttattcatccacctgcccctcctcctttacctctgcaaggttgacctatacagggtctggagaaagcatctcaatccattccctgggctatacagtttcgaagggaaataaatggtccctcgggtttctgccttttctcggagggttgatgtcctaaaactgaaagcctaattcattactgtcctttacaaaagcttccctgaaggcctcagtttaaagatgagtgatttcatcttttactgtgtttgaagggctttcagtgcatcaagactgagagcaaattcatcctcatagccaccagaaggaaaaacaatgatttagctaagatttaatttatcttctagctaaagtgtcatcggtagtcacatgatcaacaaatgttcacatgtggcatctggaagcatgtgcacctgtgtgctatcttaactttcttgtcttgactttaaagtggaacaaaacaaggtaagttatagatgcaagttcctaagctaaattacttctattgatacatcaatgatttcagcttccctccccctaaccaggtggaagcacagatgctataatggatgatggatatggaaggcaaaagccttctaattcattgcaatcataatttactgaggactgtacaggtcccaggtgggacactgacactggaatggtctctaccaggcatagggaatggttcgtgtttaaaggccaagcaaattctaaacacataatttgggccatacttttagtctggtaggggataagccctaccatttcaaactccttgtggagagtcctaagccaggggccaactggacattttcccaaaggctgggcagtatcatctgctgagcctacagaattgaaaatgccctcttgaacaggcctttgtcatattttgcatggataccaacgagccccaaacctgaattccactcccacctggaacttcttctgacttattcaggaacaacagggcagcccagccagcatctcaggtcagcaatcatttccaaactggcacatagttcatttcacagtgtggcatgagatcaggctgacagcttcacaggagaactaggcctgctcaggcaggcgagggctgaggcccggcaggagatggtggcagaaggtgtcacaccacaggtatccaaccctcctccaggaggccggtggtcatcataatgcccgcccctaaagagcttacagacctagaagtctgtgaacgatgttcagcactttcttctgaacaaaagcagatggtttctcagaaaatatttcaagactggcagaaaagcaggtccacatggctcctagcttctgctgccactgtggaattccctagtagagaactggtagcaaaggatcctaggttgtgcctgttaatctgtcatgttggggagcagaatctggcatagagcaaggcttcgaaaggtgatttccgaagccacaggctccacttcatagcccaggcaagacatactctgaggatgctcaacagtggcaaagg

SEQ ID NO: 11041 - DNA, 269 bp, Homo sapiens
aggcgcccgccaccacacccggctagtatttgtacttttagtagagacggggtttcaccacgttggccgggctggtctcgaactcctgacctcggctgatccgcccgcctcggcctcccaaagtgctgagatcacaggcgtgagccaccgcgcctggccaaaaattatttattttttagttgacaaacaaaaaccagagtctgaatgttacctgctctacagtggcacctgctaaagtttgagaaccactgccctgggtggccacatcg

SEQ ID NO: 11042 - DNA, 2013 bp, Homo sapiens
tgcctctaaccacctacccccagcttaaaacaccctgaacctcaggataccacgaaaaataaccattacttgacagaaaggacccctcaacccttgagaggcaagaagagagggttgcatgtaaaggagaataaaaggtgaggcttcaacctcgaaacacagatttttttttcttttgtaaacatacacattactgaaatgacagcaacccacattgcagaggagaaaagtctattagctgtacagtttacatttcaatgcccaaacttatttatatatttacataaagatgctaccttgattaatcaatgtctatttgcatttccacatgtgaatttcttcagttttgatattccatatgaaggagctacagtgaaaacacttttgaataaagcagtgaaccctaagaatcttatcttgagatgagatgtgtgaaccaccatttgaatgttatttctccctgctgtgtacattagtctggctgggtgttggtcacagacatggatgcactgacggctattcccataaccgagccaggcgggaagggggaaaaggaagacattatttgtcaccaacaacccagtatcccaagtcaaaattctcaactatggccaaaaaggcctaaactcgacccacaggaactggctttctaactggttgacaaacacgtaagctgccctcctgcaaaagccaaccagagaacaggcaggtggcaacaggacccagcctagagcagagcacttcagaagaggatggataaatccatcagggatgctcagggcttcctgaccactgtcccgggtgaaggcactgccacattttctctcaacaaatctgttatgtccctggatccaattatttagcctaaggaatgtcacctctgctaaagagaagtgtgtttgtgaggggtccaaaatgataaaccgtcttgttagcatcatgctccaccctctgagttaaccagctcagatccttgctagattttggaatccagtaaatctgtgttgacccagaggtgctgctgctaatgcctccagagaattcgtgtccagatgaagagacttagagtggcttctccatcctgctcgaacttcaattgctctatcctccggtagtccaaacttcagcctttaaaaatacccaacttactccaagagcattattgaacccttaagagactaaactggaaaattaatttgcttgcaagctccaaggccagcattggcccttagcaattcaccaattcatcccaagaagaggaaggttcagacaaagaggaacattacattgcatggccaccatcaagttactttgaggaaggtttccaggcttcattctataattttagttttcagctcactgataagcaacctctttcattctgaccataagataagctcatatttggtgtcagaaacatccttttttccctctttgtggtccctactcaagtaaacagagaagacataaagttgccctaatgaacaagaaaagggatttgatcccaagactatagactcctagaactactaaaaaccttaaaagatcatctggtctagtttctgcctttaggcagatgaacatctaaggccacaggggacaggtggttgtcttattctcaaatacatcaagggacaaagaccacacagactttctgaacagtccatcccaatgtttccagagctcagcctactcctagtgatacaactcccatgaccaagcccagaggaccagcagctctgggagaaagtggcagattccaatatcctaacatggcaggacacaaaaccaaggtgatctcaccttatctctagggaaaagggcagaaaggaaattgcaaaaattatgtttgttggaaagtataaacaatattcctttgtgtcaacttaataaaaaatgaggccctctggggccctggggtgaactccgggctgctgacatcccacgtgaagtggctcccagtcctgttggctcctcctacgggcaacaggggttgtcgataaccagcatgac

SEQ ID NO: 11043 - DNA, 1624 bp, Homo sapiens
tcagagtgtgtgagctccctagtaggtgcagtagtaatagtaggcaccctttgctgttattgttatgaaaactgtcagctccaggatggtgctggaggtgacgatgatgttgatgacagggttgttaggaatggagttagtggcaagtggagctacagatgggcccacgggtatgagagctactaacaggaactttgactcaatttggcaaaatcgtatttcaaatctaaattctctttccaccagctccttttgctataagggaaagccaagtggaaacgtagaggcatgtgcacccagatctcctgaaaagggcaataggagagggtagcagggaggagacaatcctctactgagctgaactggaaacgcctgattgtcatttcttccctgctttgccactgacgcccgcagcagctgatcaggaaagtatcagatgccttcactagctgtcactaacacctgcctcctgaatcctgatggggaaaatggtgtcatcgggccctccacataaaatatttagtggcacttgcttccaaagaggcaagcgtggcctctccttggcatcaggaacgctccgagttcatgtgctgggagacctcttgttcaggcagaatcctggagcagcatacttggtttgagacttggagtaggagagagggaaactggtagaacagagactaggcaagttttggctcttgagaatgcatgtgacaagtgacttcatgcactaaacagagagggatgtgacagaaagaagaaagcatcattattaagagaaaactcctgaggttgacactagcagaaaattggggataggaggaagtcacactgggtatgcaaagtcaaatgcatgtttgtttaccagtgtctaccaaactgaggatgggaaattcattctaagacagatgatgggatggatggaggtgaggagctggaaataatgacaaataaattgctaataacaaaggctaatgtatcttaaacacttaagatggccatgaactgttctaagtgcttttatatgtattaactgatttcattgtaataatcctatgacgtagctactagtactaaacctattttatatagatagttagataacatcatagaatggctaagtaccttgaccaagtgtacacagctataggctccatttgcgtccaggcacctaagttcagagctcatgcatttaattgttatatcgcactgcctctcaccagaggcacaaaggtgggctccatcctcccttactcagaatgtggataggagtcctgatctttgcccactgggctctgcttggaacagccacttagtcacatcaatttggcatagaaagatgaaggctctcaacgtgcccttgaagtcagctgtcttcatgaaggccacactcccaaggtggggtgcaaacctcccctcactgcaggagactgtgcctcctcttgactccagtgtccaatgacagctgctcccccccgggcagtccctgagtcctgtgagatgaattcacttggctggttatcaggagtggcctgtcccaaagcaaatgctgcatgagggtgagaggaaaacagcccagctggagtggtctgtttagaactactggcctttaaaaaaaaaaaaa

SEQ ID NO: 11044 - DNA, 2317 bp, Homo sapiens
tgaggacccacccaatggaaggattcttctcagccttgaacctggagcactgggaacaactggtctcctgtgatggctgggactcctcgcgggaggggactgcgctgctatagctcttgctgcctctcttgaatagctctaactccaaacctctgtccacacctccagagcaccaagtccagatttgtgtgtaagcagctgggtgcctggggcctctcgtgcacactggattggtttctcagttgctgggcgagcctgtactctgcctgacgaggaacgctggctccgaagaggccctgtgtagaaggctgtcagctgctcagcctgctttgagcctcagtgagaagtccttccgacaggagctgactcatgtcaggatggcaggcctggtatcttgctcgggccctagctgttggggttctcatgggttgcactgaccatactgcttacgtcttagccattccgtcctgctccccagctcactctctgaagcacacatcattggctttcctatttttctgttcattttttaattgagcaaatgtctattgaacacttaaaattaattagaatgtggtaatggacatattactgagcctctccatttggaacccagtggagttgggatttctagaccctctttctgtttggatggtgtatgtgtatatgcatggggaaaggcacctggggcctgggggaggctataggatataagcattagggaccctgaggctttaagtggtttctatttcttcttagttattatgtgccaccttcttagttattatgtgccacctcccctatgagtgacgtgtttgatcactagcagaatagcaagcagagtatcattcatgctggggccagaatgatggccggttgccagatataactgctttggagcaaatctcttctgtttagagagatagaagttatgacatatgtaatacacatctgtgtacacagaaaccggcacctgccagacagagctggttctaagatttaatacagtgctttttttcctctttgaaatattttactttaataccagtgccttttcttgttgaacttcttggaaaagccaccaattctagatcttgatttgaattaatacacacaatatctgagacacttacacttttcaaaagatttgtgtatgcattgcctaattagagtagggggagaagggcaactattattatccctattttacaaaactgaggcttagtgaggttcagccacatgcctagacttatatactagttagtggtgcagccagggagaggactcagatttcctggaggcaaagtctatctctgaaactccatgaagacttttgcagccagttcccaccaatatgccccagacgtgagacaaacaaggacttttttttttatatagagccatccataaaatcctaagcccttttattaatgtataaccaggagaacatctgtgccaacggttggactttttatggctgagattcgggaggaagtgtgacaccaagcaggagaggaagaatgattttctttgtacttaggttttctaaggacattgttttaatctgtatcgtgccaaagttgtatcactgttaaacttctgaagacataaccagttgagtcttatttcaagatatgttctcaagccaattgtgtgcttctcttgtttctgtgattgctttctagccaaagcgaagcttgtacaggttgagtatcccttatccaaaatgcttggaaccagaagtgtttcaaattttagattattttcagattttggaatgtttgcatatacataatgagatattttgggaataggacccgagcctaaacacaaaattcattgatgtgtcagttacaccttatccacatagcctgagggtaattttatacgatattttaaatagttgtgtacatgaagcatggtttgtggtaacttatgtgaggggttttcccattttttgtcttgttggtgctcaaaaagttttggattttggagcatttcggattttggatttttggattagggttgctcaacccatattattggctgtacatcctggtcacttctgacttctgtttttactaatggaagctttgcaaattgaattctcagtgagttgtatatttatacacctggcttgaagccttaattgtatataatgatgctttttaaaaaatgctatttggaagactatttatttctcgtgtatataatgtatataaaaaaatatggttagtgtttacctaaggttaaccaatttcaagattaaaatttttaaatagtaaaataataaaaaattataaagttcttaatggtc

SEQ ID NO: 11045 - DNA, 440 bp, Homo sapiens
catttcactgaagacgagaagaaaaattatttcaattgtagcagcttgaaggcctgaaggtggatgttaggaagaacagggagcatggctggacactggggagcattagtgagattattaggtttggttgaattggaactagatatcagtgacttagaccagagggaagctgatttctctattggttaaagtcccagctggtagtaaggttctattctacaggccaagagggctgcaggttcttagtttttcactgtgccattcatggggtattcctcgcatccccacagcccaggggtcccctaccagccaatggaaagccagaaaagggaagggatgaacagtctcctcttaaagacatgactgagaagttgcttacattctattggccagaaataaatccatggtcacatgacaggctgggaaatacagtctttatt

SEQ ID NO: 11046 - DNA, 335 bp, Homo sapiens
ctgataaggagcctgagattcagagaggttcagtggtgtgttcacatagctgagactagaatccaggtctcctaactctcagtcttgccccctttctgccaatacagtgtctctcttgtatttctagatcaaggcaaagaggacactttgatagttctccccacacttgtgtgtccatgattgtgtgtgtgtgtgtgtgtgtgtgtgtgtgtgtgtatgttgtgggtggataatatgtaaatgcaagaactgtgatgtactcaactcagggtccagagggtgctgcagtgtggtgtttctcaaagtgtatctatggcttgtcaggttagggagag

SEQ ID NO: 11047 - DNA, 7910 bp, Homo sapiens
  SITE (3042): n equals a,t,g, or c
tcaggcatgaagtcatcaatatcaacctgaaaaataagcctgagtggttctttaagaaaaatccctttggtctggtgccagttctggaaaacagtcagggtcagctgatctacgagtctgccatcacctgtgagtacctggatgaagcatacccagggaagaagctgttgccggatgacccctatgagaaagcttgccagaagatgatcttagagttgttttctaaggtttgtgcataagaaatttcagctcctatttgaaaaacctgttttttaaagcgaaatcagtgctgccatttatggttcagtgatttgggagagaaaaacaaaacaggaatatgcttgtcagctctgagtgtcctgcaagtcctttcacgatccagttcctgtttacctccaaaattatcccttttcactcgtctcctgacactttatatatgccagccatactaaacttttctcagaattcccaaattcgcccctttctctttcaattcttgctgtcagattcttcccacttctcactgtgcctggttatctccacgtcatttttcacatgtctgctccgacactgctgccttttcaggagcttggcaggctggttagtgctctagcttctgagttcccatccgtgtgaacttttgcctgccttcttgcctgtgtactgcactggggctgtgagctccttgagggtgagggctgtgttttgatcactgttagttcactgcctagttttatgactggctctgctactttcttgtgactctgagcaagttacttattactttgcctctccgttcatcattggtaaaatggatatagtaattgttcccacctcataagataaaaatcagttaatataaaacacccagaacagagtctgacacatgggaactacttaattcttgtccttatagccatagcatcaagcagtgagcatctactttgtgttggcaataactcagatgactgaataaatagcaatcctgtagaagaactgtttgtaccttacttagcatcaacactgtggattagttcaaacaattagtattaacaaagaaatgactaaaagatgtgtgtttagacaccaagaatagcatgtctggttatatgcctataacattgtcaccttggtagtacggtcagtatataaaggattatctttagagaaaaagatggttaaagaaatgccctaagagagagttatagggaaaacattctgttttaggagacattataaagggaagccaatgggacaggaagagtgagtcatctgcttagtaagatgagggtgaaagaatagtagaggcggctgctgtgaaagataatgtaaagggaacatgacattttcaagaacgatgtgggagagttttacaaagtagtaacaagttaaaggcatgcagcttcaagacacgaagtcatcaataccaaccaaaaaaaataagcctaagtggttcttaaagaaaaatctctttggtctggtgccagttctggaaaactttttttagtatggctggaatataaagtgtcaggagaagagataaaaggggtaactttggagaggtaaacaggaactggatcgtgaaaggacttgtaggacacgtcagagaaaatgagctttaaaagtaaagcttttagacatgaagctttactttcatgcataaagctactactttaaaaagtagtcacaagagattcattgtactatctagaaagaaaatgagatttaaaagtaatgctgaagatgcccacctttacttccctgcttgggttttaaaggagaggtggctttatgtacatatgaccctgctctcctggccacagcccatcagaacagaaatgtaccccaccccacacacctgggccagttatcttctctcctgggaacttggaaatgagacacagaactaagacagtaaaggttaggacagtaaagacaactaagcgttggggctcaaataatgttaattagaggctagaaaaaccaaagccacttaagaaataaatttttagaggagcaagaattaaaaacattgcaaagggactgaagtatgcaaagtaatatggagcagaaatgtgaggaaaaacagacgaaagaccaggcagacccaggtggaaatgtggatgaaagggctgcctgaaagccttcagtcccagtgaaggcaggctgaactgatgtggatgggatttcatgggattctatatttttacaagtgcctgtttacttaaactaggatgagtggacttctgcgtcttgcaataaaatgataccaaagaccaaagtattaaaacacataaacaccatcacgagcattaaagcatctgatgctacacccatcaagtctttaggtagtcggtcccttttgaacagtctcctggtgtcctccccaacaaagaaatcagaaaaattttcttccctagctctttgcagttggggccaagttttgtgacctaggctcttcctgtcagacacacacatagagttcaaatcagaaacgagcaaggtaaggaaacaggcttggtgggatatctgcttaagatattcagctctccactggttttcctggtgagagcagcggcagagcttctgggtttcagcagtgtgggttacaagataaaattccagagtagaaatggcatcagtgccagtggtgttagcagttatctcagactctactttctggcagcctcacaaactgaagcatctggtgctcagcttggactggcagcagtgagtgcttcccattaggccatttctcagcatgaatttgggatgttctgtcttaattccaagcctgtttgttccgcctcccaataattctatgagccactcagtctcctttaaagaaagttgtgttggccgggcgtggtggctcaagcctgtaatcccagcactttgggaggctgaggcagatggatcacctgaggtcaggagttttcagaccagcctggccaatatggtgaatccccatctctactaaaaatacaaaaattagcctggcgtggtggcgcacgcccataatctcagctactaaggaggcgnagacaggagaattgcttgagcccgggcagtggaggttgcagtgagctgagatcgtgccactgcattccagcctgggtgatacagcatgactccatttcaaaaaagaaagaaagttgtttcttaaacgtgccagggtagcttctgttatttgtaattaataaaatcctgaccaagccagcattttaaaccacaaaactgttcctaagaccagtccattacctctgtgagcgcaggaacttgatgcacccttggtgtttctagaacaccttgacaccaggactgtaagggttctaccatatttttatgtgagggggccgatacagttagccataaactgataaactaagaaattattctctgtctaggtgccatttttggtaggaagctttattattttccaaaataaagaatattatgctggcctaaaagaagaatttcgtaaagaatttaccaagctagaggaggtaattatttctcctagctatcatcagagtaaacgataactatatctaccctccttttcctcctattcttttctttatattcccactttccaagtcactttaaggtaattaggaaaattcccctaaacatttttgtttacagcagactgctgttataaagcagaaagctgtcctgcttaagatataaatcaaaacacctaaacagactttgtcatgggcttgcttttaaaatattctgctaatgttaaaataacaaggaaaaaggaaattgtacccacgtttccacaagtttttatgtatccagttttccatgcttgtttgcagtccttgtccatatatttaaaaaaaattaatatagctctaatcagagcatagatatcattctgtgtcctgctttttttcctgtgtccacttagtattacatactaaatatttcccaccagaaaaagtttgcaatgaacagtacagacacttgagggaagcccagatgtattttaccttcttttggggacagctgacatttgggccttggagtctgtctcttggccttgaaatatttcattcatgctaagcctgaagtttttactgacagaagacatagttcctgtctttcatgggaatgcattttaacattttatcagtaagcatgatgtttgctgtaggtttttcagaaacctttttttcattataaagttctcttctattactagtttgctaatttttaaaaaagtcataaatgttgaattttattgaatggtttttctgcatctgttacatcaattgaaatgttcatagaattttttcctcttaatctggtgaatatggtgctattgacaaatttttttttttttaatgtttaaccatcctagcattcctaagataaaacctacttgttctctatggatttttatatgtactgtagaattagctaatgaatgatttttgtatgtgtgttcataaatgagattggcctataaattttctactcttatagtatcattattggcttttggtttcaaggatattctgacctcataaaatgagttgggtaactaacctgtttttctaatctctgaaaccatttggtagggactagcggtttctttaaaacatttgagcctggtgtctttaacaggggtagatttttcattactagtttgatttctttaatggtaattggttttttggttttatatttcttcttgaatcagtgttggtacttttatatttttctgctgaacagtgtgggagctggaaagtaagatgcagtccatattcttcagataattagtttagtagtagacagaacacagtaggtagatataagcaatctaaaatgcatattatgcattgaaaaaaaactatggaggttatttataaagggcaaattagtttggtggtttaaatagccagataatattctcaatcaccccctttggcaaaccctgtaaccaattcgccttcttaaaatttcagaaacatacaatttgtgttttgttttcaaatgattgtcatctgtttagcagttaatccagtctatttccagtatattttaagtacaaatgcttttgcacttacaatggggttacatccaataaacccaccgtaagctgaaaatatcataagtggaaaatgcatttaataaacccaacctacagagcatcatagcttagcctagcctgctttaaatgtgctcagaaaacttccattagcctgcaattaggcaaaatcatcaaacataaaaccatcaaacataaaatatttataaagtgttgaatatctcatataatttatcgaatacctgcatccaaaagatgctggcaacacagcacactttagagcattggttgtttactctcttgatggtatggctgcccagcatcaagagttatcatactgcaaatcgatagcccaggaaaagagcaaaattcaaagttcaaagtagagtttttactgaatgcttgcttttgcaccgtcgtaaagttgaaaagaatttaaattgaaccatcataagctgcagactgtgcattttatattgaaaagttaatatttttaatttttaatgcagagaagtacccaaagcataaaaacacaacacgttttcacaaagcgaacacagccatggaaccagcacccatatcaactaacaaaatactagtttgggcttttttgtactttatacaaatggactcatataatgttcatcttttgggtctgcctgctttcattcaatattaggtttgtgggttcatctctgctgtgtgtagttctttcctgttctttatacagtgttccaaagtatagtatattacactttacccattctactcttgatagtaaacgttttcacatttgggctattacaaatagtgctgcagtgaacattcacataacatatcttttggtgaacatgtgttacattgccaagtacaattgctgggtgatgagtatgcatactcttaaaacatggttgtaccaatttacacctctacgacagtggttccatacccttgccaacttcattttgttcattgtaggcattctcttgggtgtatagtgttattgcattttggttttaatttgcatttccctaatgactaatgcagttgaacacctttccaaatgataattggccatttggacatcatctttcttgaagatcaagtcttgctcatttttccaatgggtcgtttgctatttttcttactgattcccaggaatcctttctatattctgaataccagtcctttgtattacaaatatgttgtactctgtgacttgttttatttttcaattttccagtttatgttgttgattgttttacttcatcccagaccaacagattctaaagcttaattaagctttttgatcagaaaaaaacccaacttggatacatcggagtaaaaactgcttctctcacctgctctacttatttcccttcagcatttctagtgagtcttactacatgcacaagtaagaaatacttttatgctgtttaatgttcaggttctgactaataagaagacgaccttctttggtggcaattctatctctatgattgattacctcatctggccctggtttgaacggctggaagcaatgaagttaaatgagtaagatatttgaatattttgtgcataatttaggatgacaggtggaatagtatatattgacctttctttataacagaagttgaaatatttaatacaactggtctgaatgagaacaagcagacaggggaatcttggactatcccaggcatgtcatatacctacactaactactctccatcactgcaatggggcaggggatttctgagacatgtagtaaagtgctttaaaatttattccttccttcctgattaaaaacccataaggggaaggatatggtagcttacgcctgtaagcccagcacttcgggaggccgagacgggtggatcatctgaggtcaggagttagagaccagcctggccaatgtggtgaaaccccatctctactaaaaatacaaaaattagctgggcatggtggtacacacctgtaatctcagctactcgggaggctgaggcaggagaatcacttgaacccgggaggcagttgcagtgagctgagatcatgtcactgaactccagcctgggcaagagcaagacacttcatcaaaaaaaaaaaaaaaattccataaggttgtaaatttttgtaaggatgttgttgcgggattgtacgaccagtgttacctcccatttaccgtaagatttccacattattttccaaattctgttttgagtttggcagccaccttgccttactccggcttcttggacgatagagctattcagggttacttttggtcataatctgggtgtagaataattaacatagaacattcctgattgtattccctgttcttattttaataaattgtcagtttctctctttgggcaagttctcacattaactgaacaaattgcttcactctagtctcattccttttgtgtaaaaaagggacctctatagtgtctttcaaattgaatattctattacaggcatttttaaatatttttaatgaaatatttaagggaaaaaagtgaaactgtagagtaataattacatatgggagactctgtgatgtcatcctagttgacctagctcacacctttcattttttcctcttcccacaggtgtgtagaccacactccaaaactgaaactgtggatggcagccatgaaggaagatcccacagtctcagccctgcttactagtgagaaagactggcaaggtttcctagagctctacttacagaacagccctgaggcctgtgactatgggctctgaagggggcaggagtcagcaataaagctatgtctgatattttccttcactaatatgaataatagcatgcttttatttt

SEQ ID NO: 11048 - DNA, 2575 bp, Homo sapiens
ctggcaacacagcacactttagagcattggttgtttactctcttgatggtatggctgcccagcatcaagagttatcatactgcaaatcgatagcccaggaaaagagcaaaattcaaagttcaaagtagagtttttactgaatgcttgcttttgcaccgtcgtaaagttgaaaagaatttaaattgaaccatcataagctgcagactgtgcattttatattgaaaagttaatatttttaatttttaatgcagagaagtacccaaagcataaaaacacaacacgttttcacaaagcgaacacagccatggaaccagcacccatatcaactaacaaaatactagtttgggcttttttgtactttatacaaatggactcatataatgttcatcttttgggtctgcctgctttcattcaatattaggtttgtgggttcatctctgctgtgtgtagttctttcctgttctttatacagtgttccaaagtatagtatattacactttacccattctactcttgatagtaaacgttttcacatttgggctattacaaatagtgctgcagtgaacattcacataacatatcttttggtgaacatgtgttacatttccaagtacaattgctgggtgatgagtatgcatactcttaaaacatggttgtaccaatttacacctctacgacagtggttccatacccttgccaacttcattttgttcattgtaggcattctcttgggtgtatagtgttattgcattttggttttaatttgcatttccctaatgactaatgcagttgaacacctttccaaatgataattggccatttggacatcatctttcttgaagatcaagtcttgctcatttttccaatgggtcgtttgctatttttcttactgattcccaggaatcctttctatattctgaataccagtcctttgtattacaaatatgttgtactctgtgacttgttttatttttcaattttccagtttatgttgttgattgttttacttcatcccagaccaacagattctaaagcttaattaagctttttgatcagaaaaaaacccaacttggatacatcggagtaaaaactgcttctctcacctgctctacttatttcccttcagcatttctagtgagtcttactacatgcacaagtaagaaatacttttatgctgtttaatgttcaggttctgactaataagaagacgaccttctttggtggcaattctatctctatgattgattacctcatctggccctggtttgaacggctggaagcaatgaagttaaatgagtaagatatttgaatattttgtgcataatttaggatgacaggtggaatagtatatattgacctttctttataacagaagttgaaatatttaatacaactggtctgaatgagaacaagcagacaggggaatcttggactatcccaggcatgtcatatacctacactaactactctccatcactgcaatggggcaggggatttctgagacatgtagtaaagtgctttaaaatttattccttccttcctgattaaaaacccataaggggaaggatatggtagcttacgcctgtaagcccagcacttcgggaggccgagacgggtggatcatctgaggtcaggagttagagaccagcctggccaatgtggtgaaaccccatctctactaaaaatacaaaaattagctgggcatggtggtacacacctgtaatctcagctactcgggaggctgaggcaggagaatcacttgaacccgggaggcagttgcagtgagctgagatcatgtcactgaactccagcctgggcaagagcaagacacttcatcaaaaaaaaaaaaaaattccataaggttgtaaatttttgtaaggatgttgttgcgggattgtacgaccagtgttacctcccatttaccgtaagatttccacattattttccaaattctgttttgagtttggcagccaccttgccttactccggcttcttggacgatagagctattcagggttacttttggtcataatctgggtgtagaataattaacatagaacattcctgattgtattccctgttcttattttaataaattgtcagtttctctctttgggcaagttctcacattaactgaacaaattgcttcactctagtctcattccttttgtgtaaaaaagggacctctatagtgtctttcaaattgaatattctattacaggcatttttaaatatttttaatgaaatatttaagggaaaaaagtgaaactgtagagtaataattacatatgggagactctgtgatgtcatcctagttgacctagctcacacctttcattttttcctcttcccacaggtgtgtagaccacactccaaaactgaaactgtggatggcagccatgaaggaagatcccacagtctcagccctgcttactagtgagaaagactggcaaggtttcctagagctctacttacagaacagccctgaggcctgtgactatgggctctgaagggggcaggagtcagcaataaagctatgtctgatattttccttcactaatatgaataatagcat

SEQ ID NO: 11049 - DNA, 10043 bp, Homo sapiens
ggctcaagcaatcttctcacctcagcatccggagtagccgagactacaggtgagtaccaccacacttggctaatttttatattttttgtagagatagggtttcatcatgttgcccaggctggtcttgaactcctgggtttaagcaatccgcccactgcagtctcccaaggttctgggattacagatgtaagctaccaagcctggccttgtgggtggattttaaggattccttaatatcttcataaaaaccaagaaactttttactcaaattagcaaaataaattgaattttatgttggttctcatatagtggatagtggacacaattcaattagttgcctcatatgatttataactaagatacctcttagccataaatggagtatcttattgacaattttgaagcatttccacagatttattcattcatttatatgaaatattcaaaacaaaaatatttactgagtccttatttgacactttttattttcttcagagcatttatatctatatagcattttgctcatttacatgtttgtttattactatgaacagatacacaagatcccacctttcgtgaagcttacattctaggaagataacaaacttgtaaataagtgagcaaagtaatttcagatacatattatcagttcaatgaagaaagtaaaacatgataatcatgtaatagaagctgctcagcaacttcagagctatggtcagggagggcctggggatgtgtgtttgacctgggaagacctgggaaaaggcaggcagaggaggcagaggaccatcaagtgcaaagactctaaggtggaaacacatttggcaaattcaaggaatataaaaaccgccaacgtgtaaaagaaaacataggggaaaagcttcatgacactggccttggcaatgatttcctggacatgacaccaaagaccaggcaacaagaccaaaaataaacacatgagactacagcaaacaagcttccacacagcaaaggaaacgattaacagagcaaaaaggcaacctatggaataggagaaagtacttgcaaaccacatacctggtaaggggttaatctccaaaatacataaggaatctctacaactcaacaacaaaaaaacctgattttaacatgggctaagatcttacatagacacttctcaggctgggcatggtagctcacgcctataaccccgaggcagacagttcacttgagcccaggagttcaagaccagccttggcaacatggcagaatcctgtctctacaaagaaattagctgggtgtgatggtgcacgcctgtggtcccaactactcgggaggtaggaggatcgctttagcccaggaggtcgaggctgcagtgagctgcgatcaagccactgtactccagtctgggagacagagtgtcaaaaaaaattaaaaattaaaaaaatagacatttcttcaaagaggatataaaaatgggcaacacatatatgaaaaagttcttatcactaatcatcaggaaaatgcaaatcaaaatcacataataacctcacacttgtcaagatgactataatgaaaaaagacaagtgttagcaaggatgtgtagaaatcagaacctttgcacactgttggcgggaatgtaaaatggtacagctgctatggaaaacagtatagatgttcttcaaaaaattaaaactagaactaccatgtgattcagcaatctcactactgggtatatatccaaattaaatgaaatcaagttctcaaagagatattagcactctcacgtagactgcagcactgttcacaacagcataatgtcaatgtccatcagcagatgaatggataaagaaaatgtgttaatgctattccacctaaaaaggaaggaaattctgcaatatgtgacaacatggatggacattgcggacattatgctaagtaaaataagccagacacagaaagacaaatactgcatgattgttcttaaaaggtgtatcaaaagtagtcagattcataaaatcaaaaactagaatggaaggaatctaggcagactcctaaatttggggtctgatcagctaagtggatggcaaagccagtgagaatttatccaaaagcacaaaagttgtttccttctcttcatagtctcctatgtgtctttcaggcatgaagtcatcaatatcaacctgaaaaataagcctgagtggttctttaagaaaaatccctttggtctggtgccagttctggaaaacagtcagggtcagctgatctacgagtctgccatcacctgtgagtacctggatgaagcatacccagggaagaagctgttgccggatgacccctatgagaaagcttgccagaagatgatcttagagttgttttctaaggtttgtgcataagaaatttcagctcctatttgaaaaacctgttttttaaagcgaaatcagtgctgccatttatggttcagtgatttgggagagaaaaacaaaacaggaatatgcttgtcagctctgagtgtcctgcaagtcctttcacgatccagttcctgtttacctccaaaattatcccttttcactcgtctcctgacactttatatatgccagccatactaaacttttctcagaattcccaaattcgcccctttctctttcaattcttgctgtcagattcttcccacttctcactgtgcctggttatctccacgtcatttttcacatgtctgctccgacactgctgccttttcaggagcttggcaggctggttagtgctctagcttctgagttcccatccgtgtgaacttttgcctgccttcttgcctgtgtactgcactggggctgtgagctccttgagggtgagggctgtgttttgatcactgttagttcactgcctagttttatgactggctctgctactttcttgtgactctgagcaagttacttattactttgcctctccgttcatcattggtaaaatggatatagtaattgttcccacctcataagataaaaatcagttaatataaaacacccagaacagagtctgacacatgggaactacttaattcttgtccttatagccatagcatcaagcagtgagcatctactttgtgttggcaataactcagatgactgaataaatagcaatcctgtagaagaactgtttgtaccttacttagcatcaacactgtggattagttcaaacaattagtattaacaaagaaatgactaaaagatgtgtgtttagacaccaagaatagcatgtctggttatatgcctataacattgtcaccttggtagtacggtcagtatataaaggattatctttagagaaaaagatggttaaagaaatgccctaagagagagttatagggaaaacattctgttttaggagacattataaagggaagccaatgggacaggaagagtgagtcatctgcttagtaagatgagggtgaaagaatagtagaggcggctgctgtgaaagataatgtaaagggaacatgacattttcaagaacgatgtgggagagttttacaaagtagtaacaagttaaaggcatgcagcttcaagacacgaagtcatcaataccaaccaaaaaaaataagcctaagtggttcttaaagaaaaatctctttggtctggtgccagttctggaaaactttttttagtatggctggaatataaagtgtcaggagaagagataaaaggggtaactttggagaggtaaacaggaactggatcgtgaaaggacttgtaggacacgtcagagaaaatgagctttaaaagtaaagcttttagacatgaagctttactttcatgcataaagctactactttaaaaagtagtcacaagagattcattgtactatctagaaagaaaatgagatttaaaagtaatgctgaagatgcccacctttacttccctgcttgggttttaaaggagaggtggctttatgtacatatgaccctgctctcctggccacagcccatcagaacagaaatgtaccccaccccacacacctgggccagttatcttctctcctgggaacttggaaatgagacacagaactaagacagtaaaggttaggacagtaaagacaactaagcgttggggctcaaataatgttaattagaggctagaaaaaccaaagccacttaagaaataaatttttagaggagcaagaattaaaaacattgcaaagggactgaagtatgcaaagtaatatggagcagaaatgtgaggaaaaacagacgaaagaccaggcagacccaggtggaaatgtggatgaaagggctgcctgaaagccttcagtcccagtgaaggcaggctgaactgatgtggatgggatttcatgggattctatatttttacaagtgcctgtttacttaaactaggatgagtggacttctgcgtcttgcaataaaatgataccaaagaccaaagtattaaaacacataaacaccatcacgagcattaaagcatctgatgctacacccatcaagtctttaggtagtcggtcccttttgaacagtctcctggtgtcctccccaacaaagaaatcagaaaaattttcttccctagctctttgcagttggggccaagttttgtgacctaggctcttcctgtcagacacacacatagagttcaaatcagaaacgagcaaggtaaggaaacaggcttggtgggatatctgcttaagatattcagctctccactggttttcctggtgagagcagcggcagagcttctgggtttcagcagtgtgggttacaagataaaattccagagtagaaatggcatcagtgccagtggtgttagcagttatctcagactctactttctggcagcctcacaaactgaagcatctggtgctcagcttggactggcagcagtgagtgcttcccattaggccatttctcagcatgaatttgggatgttctgtcttaattccaagcctgtttgttccgcctcccaataattctatgagccactcagtctcctttaaagaaagttgtgttggccgggcgtggtggctcaagcctgtaatcccagcactttgggaggctgaggcagatggatcacctgaggtcaggagttttcagaccagcctggccaatatggtgaatccccatctctactaaaaatacaaaaattagcctggcgtggtggcgcacgcccataatctcagctactaaggaggcggagacaggagaattgcttgagcccgggcagtggaggttgcagtgagctgagatcgtgccactgcattccagcctgggtgatagagcatgactccatttcaaaaaagaaagaaagttgtttcttaaacgtgccagggtagcttctgttatttgtaatttataaaatcctgaccaagccagcattttaggccacaaaactgttcctaagaccagtccattacctctgtgagcgcaggaacttgatgcacccttggtgtttctagaacaccttgacaccaggactgtaagggttctaccatatttttatgtgagggggccgatacagttagccataaactgataaactaagaaattattctctgtctaggtgccatccttggtaggaagctttattagaagccaaaataaagaagactatgctggcctaaaagaagaatttcgtaaagaatttaccaagctagaggaggtaattatttctcctagctatcatcagagtaaacgataactatatctaccctccttttcctcctattcttttctttatattcccactttccaagtcactttaaggttattaggaaaattcccctaaacatttttgtttacagcagactgctgttataaagcagaaagctgtcctgcttaagatataaatcaaaacacctaaacagactttgtcatgggcttgcttttaaaatattctgctaatgttaaaataacaaggaaaaaggaaattgtacccacgtttccacaagtttttatgtatccagttttccatgcttgtttgcagtccttgtccatatatttaaaaaaaattaatatagctctaatcagagcatagatatcattctgtgtcctgctttttttcctgtgtccacttagtattacatactaaatatttcccaccagaaaaagtttgcaatgaacagtacagacacttgagggaagcccagatgtattttaccttcttttggggacagctgacatttgggccttggagtctgtctcttggccttgaaatatttcattcatgctaagcctgaagtttttactgacagaagacatagttcctgtctttcatgggaatgcattttaacattttatcagtaagcatgatgtttgctgtaggtttttcagaaactttttttcattataaagttctcttctattactagtttgctaatttttaaaaaagtcataaatgttgaattgtattgaatggtttttctgcatctgttacatctattgaaatgttcatagaattttttcctcttaatctggtgaatatggtgctattgacaaatttttttttttttaatgtttaaccatcctagcattcctaagataaaacctacttgttctctatggatttttatatgtactgtagaattagctaatgaatgatttttgtatgtgtgttcataaatgagattggcctataaattttctactcttatagtatcattattggcttttggtttcaaggatattctgacctcataaaatgagttgggtactaacctgtttttctaatctctgagaccatttggtagggactagcggtttctgtacaacatttgagcctggtgtctttaacaggggtagatttttcattactagtttgatttctttaatggtaattggttttttggttttatatttcttcttgaatcagtgttggtacttttatatttttctgctgaacagtgtgggagctggaaagtaagatgcagtccatattcttcagataattagtttagtagtagacagaacacagtaggtagatataagcaatctaaaatgcatattatgcattgaaaaaaaactatggaggttatttataaagggcaaattagtttggtggtttaaatagccagataatattctcaatcaccccctttggcaaaccctgtaaccaattcgccttcttaaaatttcagaaacatacaatttgtgttttgttttcaaatgattgtcatctgtttagcagttaatccagtctatttccagtatattttaagtacaaatgcttttgcacttacaatggggttacatccaataaacccaccgtaagctgaaaatatcataagtggaaaatgcatttaataaacccaacctacagagcatcatagcttagcctagcctgctttaaatgtgctcagaaaacttccattagcctgcaattaggcaaaatcatcaaacataaaaccatcaaacataaaatatttataaagtgttgaatatctcatataatttatcgaatacctgcatccaaaagatgctggcaacacagcacactttagagcattggttgtttactctcttgatggtatggctgcccagcatcaagagttatcatactgcaaatcgatagcccaggaaaagagcaaaattcaaagttcaaagtagagtttttactgaatgcttgcttttgcaccgtcgtaaagttgaaaagaatttaaattgaaccatcataagctgcagactgtgcattttatattgaaaagttaatatttttaatttttaatgcagagaagtacccaaagcataaaaacacaacacgttttcacaaagcgaacacagccatggaaccagcacccatatcaactaacaaaatactagtttgggcttttttgtactttatacaaatggactcatataatgttcatcttttgggtctgcctgctttcattcaatattaggtttgtgggttcatctctgctgtgtgtagttctttcctgttctttatacagtgttccaaagtatagtatattacactttacccattctactcttgatagtaaacgttttcacatttgggctattacaaatagtgctgcagtgaacattcacataacatatcttttggtgaacatgtgttacatttccaagtacaattgctgggtgatgagtatgcatactcttaaaacatggttgtaccaatttacacctctacgacagtggttccatacccttgccaacttcattttgttcattgtaggcattctcttgggtgtatagtgttattgcattttggttttaatttgcatttccctaatgactaatgcagttgaacacctttccaaatgataattggccatttggacatcatctttcttgaagatcaagtcttgctcatttttccaatgggtcgtttgctatttttcttactgattcccaggaatcctttctatattctgaataccagtcctttgtattacaaatatgttgtactctgtgacttgttttatttttcaattttccagtttatgttgttgattgttttacttcatcccagaccaacagattctaaagcttaattaagctttttgatcagaaaaaaacccaacttggatacatcggagtaaaaactgcttctctcacctgctctacttatttcccttcagcatttctagtgagtcttactacatgcacaagtaagaaatacttttatgctgtttaatgttcaggttctgactaataagaagacgaccttctttggtggcaattctatctctatgattgattacctcatctggccctggtttgaacggctggaagcaatgaagttaaatgagtaagatatttgaatattttgtgcataatttaggatgacaggtggaatagtatatattgacctttctttataacagaagttgaaatatttaatacaactggtctgaatgagaacaagcagacaggggaatcttggactatcccaggcatgtcatatacctacactaactactctccatcactgcaatggggcaggggatttctgagacatgtagtaaagtgctttaaaatttattccttccttcctgattaaaaacccataaggggaaggatatggtagcttacgcctgtaagcccagcacttcgggaggccgagacgggtggatcatctgaggtcaggagttagagaccagcctggccaatgtggtgaaaccccatctctactaaaaatacaaaaattagctgggcatggtggtacacacctgtaatctcagctactcgggaggctgaggcaggagaatcacttgaacccgggaggcagttgcagtgagctgagatcatgtcactgaactccagcctgggcaagagcaagacacttcatcaaaaaaaaaaaaaaattccataaggttgtaaatttttgtaaggatgttgttgcgggattgtacgaccagtgttacctcccatttaccgtaagatttccacattattttccaaattctgttttgagtttggcagccaccttgccttactccggcttcttggacgatagagctattcagggttacttttggtcataatctgggtgtagaataattaacatagaacattcctgattgtattccctgttcttattttaataaattgtcagtttctctctttgggcaagttctcacattaactgaacaaattgcttcactctagtctcattccttttgtgtaaaaaagggacctctatagtgtctttcaaattgaatattctattacaggcatttttaaatatttttaatgaaatatttaagggaaaaaagtgaaactgtagagtaataattacatatgggagactctgtgatgtcatcctagttgacctagctcacacctttcattttttcctcttcccacaggtgtgtagaccacactccaaaactgaaactgtggatggcagccatgaaggaagatcccacagtctcagccctgcttactagtgagaaagactggcaaggtttcctagagctctacttacagaacagccctgaggcctgtgactatgggctctgaagggggcaggagtcagcaataaagctatgtctgatattttccttcactaatatgaataatagcatgcttttatttt

SEQ ID NO: 11050 - DNA, 808 bp, Homo sapiens
ccatcatcaacttaatttcacattctctctattgttggccctgaagaccagacgcacattacccgaaagctgggtggctgggcagactcctatttggtctccctgtctctaaccccttcaaatccttcctatcaaatcccatgttgggcacataggtggtgtcccatttatgtaattaaatactgtgtaggctgcatcagtcaattctgcctacaaggttgatgagtaataggtaagagccccactgagaaatagaaatgccatcttccacacatttccatagcccactgggttgctcactattcaatttttattatcacatcaccaccacgagaaggtaggtcggagagcaatcatttcattctatagatgatgcaactaaggtcccgaggttaagtgaggccttaaggtgctggcagaaagatcacacccagcgcactgctcttaccattggaatcagggctgtcggtccgctccaattgtctggtttcctgaacttattttcaagttcgccattgagagaaacctccgaatgactaattcttaaatttaagggtgcataataatcacctatggctcaccgctgcatttccgattcagcaggctggggtgggtagcgaagtctgtatttcaaatgagcccctcaacccaggtgacgcaggcggtgtggggaccgcatccggagggcgacctggagccgactgacttcacaaaggcctcctgccgcaaaccttcagcggccaccaaagccccggctgccggcggcggaccacctctgctgccgcgcgcctaccggagccgcttggcc

SEQ ID NO: 11051 - DNA, 267 bp, Homo sapiens
tttactgagtccttatttgaaactttttattttcttcagagcatttatatctatatagcattttgctcatttacatgtttgtttattactatgaacagatacacaagatcccacctttcgtgaagcttacattctaggaagataacaaacttgtaaataagtgagcaaagtaatttcagatacatattatcagttcaatgaagaaagtaaaacatgataatcatgtaatagaagctgctcagcaacttcagagctatggtcagggag

SEQ ID NO: 11052 - DNA, 808 bp, Homo sapiens
ccatcatcaacttaatttcacattctctctattgttggccctgaagaccagacgcacattacccgaaagctgggtggctgggcagactcctatttggtctccctgtctctaaccccttcaaatccttcctatcaaatcccatgttgggcacataggtggtgtcccatttatgtaattaaatactgtgtaggctgcatcagtcaattctgcctacaaggttgatgagtaataggtaagagccccactgagaaatagaaatgccatcttccacacatttccatagcccactgggtttctcactattcaatttttattatcacatcaccaccacgagaaggtaggtcggagagcaatcatttcattctatagatgatgcaactaaggtcccgaggttaagtgaggccttaaggtgctggcagaaagatcacacccagcgcactgctcttaccattggaatcagggctgtcggtccgctccaattgtctggtttcctgaacttattttcaagttcgccattgagagaaacctccgaatgactaattcttaaatttaagggtgcataataatcacctatggctcaccgctgcatttccgattcagcaggctggggtgggtagcgaagtctgtatttcaaatgagcccctcaacccaggtgacgcaggcggtgtggggaccgcatccggagggcgacctggagccgactgacttcacaaaggcctcctgccgcaaaccttcagcggccaccaaagccccggctgccggcggcggaccacctctgctgccgcgcgcctaccggagccgcttggcc

SEQ ID NO: 11053 - DNA, 808 bp, Homo sapiens; identical to SEQ ID NO: 11052

SEQ ID NO: 11054 - DNA, 1539 bp, Homo sapiens
cttgatacatttgttgaaaatgaattgatcatatatgtgagtgtttatttctacattctctattatattccattggtctatatgtccatccttgtgtcctagagaccacattgtgtcagtaccacattgttttgattactgcagctttgtaaaagttttgaaaatggcaggcctgagtcttccaactttgttctttttcaatatgattttagattgtttggggccctgggaaaattccatttacattttaaaatcagtttttacatttctgcaaataaaaaggcccttgggattttgataagggttgcattgaatctgtagatcactgggtaatatcgccaacttaacaatatttaatcttccaatctgtgaacacaggatgtatagttctatttatttaagtcttctttaatttttgtcaacagtgttttgtagtctttagtgcagaagtctttcaccttcttgttttaatttattcctagctattttactctttttgatgctattgtaagtggaattttaaaaattgacttccttcttgggctgttcattcctggtatatagaggcacaaatgattttcttaaaataaatgttgaacatgtaccctgcaattttgctggacttgtttattagctctactagtttgtggattctttgattttctagatagaagatgtcattattgaataaagagttttactgcttcctttccaatttggatgctattcatttacctgtttgtttatttatctgcctaattgtcatggttaaaactttcagtacattgttcaatagcactgggtaaagcatacagccatatcttactctttgttatgggagaaatttttcagttttttttctcattaagtatattagttgtggatttttcacaaatcctctttaacacattttgaaagttccatgtttttatcctgaaaggttgtagaattttgtcaaatgcttgttctgagtgaattgaaatgattgcatggattttttatccttcattgtattaatgtggtgtattacattgattgatactcttgtactgaaccacccttgtattcttgagataaattccatgtggtcatgatatataatcctttttaatatgctgctgaatttggcttactagtactttgttaaataaaagattttagtatctagtttgtcttttcttgtggtatatttgtctggctttggaatccatgtaatactggcctcatagaatgtattgcaaagttttttctcctctgttttttggaagagtttgagagggattggtgtgaattcttcaagtgtttggtataattcaacagtgacgccatctgtgtagcattttcttcattggaaggtttttggttactgattcaaactttctacttgttatgggtctgctcataatttcaatttctgttttggtctgtattagtattttgtgaattcgtccatcttatctaggttatataatttgttggtatacagttattcatagtattcttttatcacactttttatttctgtaagatcagttatat

SEQ ID NO: 11055 - DNA, 486 bp, Homo sapiens
caagagttccctaaccctagccaacacttaatagctattctcatgagtgtgaggtgatatcgcatagtaattttgatttgcatttccctgacgattagtgatgttaaatgtcttttcatatatgtgtttgccatttttataacttctttgcaaaaatgtctactcagttccactgcccattttttaattgggttatctattttcttgttattgagttgtatgcattccttataaattttggatattatcctcttataagatatatggttggcaaatattttcttctagtccataggttgccttttccttttgttgactgtttccgttcctgtgcagaagttttttagtttgatggtataccaattatttgtttttgtagcctgagcttttggtgtgatctccaaaaaatcactgccagagccatgtcgagcttttcccctatgttttcttctggttgtgggttttggtcttatgtttaggtctttt

SEQ ID NO: 11056 - DNA, 263 bp, Homo sapiens
cctgtattttactgtctgcttgcaaaaggtctcacagtcagccaaggataagtagatagcaggaaacctctctgatctctcctgcaagcatgtacaacttccatatctccagaattccttttaaaatttttcttaatctgtcgcttgcccaaccagtattgaaacattaggttgctgtgatgtgggttgcctccaattatttgccactgaaatccttgttgcttaacatagtgcatagggttttctatggaattcaaaatcag

SEQ ID NO: 11057 - DNA, 997 bp, Homo sapiens
tgttaatccaccaatcctaatccctcctaaccccactcatagtccagagaagataaaaagttcagggacatggtgtactgctctccagatcctttcccagctgaaactctatacccatttagcactaatttcccattttccctagcccaagataaccaaccaccattctactttctctttgaatttgactcctaggtacctcacatatatattcctatttagtggaattgtagactatttatccttttgtgactggcttatttcacttagcactgttttctaggttcatccatgttgtagcttctgtcataatttccttcccttttaaggctgaataattttccattgtgtatatgtaccatattttgttcatccattcattcattgatagatacttgagttgcttctaccttttggcaattgtgagtgatgctgttatgaacatgggtgtacaaatgtctgttttgagtccttgttttgctttcgtgcattctattaaaaatgttaaggttctttgctttttacttttttttctcttttatccaccttttgactttattcttaaagttttatcttggtataataatttatggtatgttgcagaattaggagcaaagtcccgtgtgtccttcactcagtttcccccaatggtaacatttttcataattacagcacaatgtcaagaccgggaaattgacattgatacagtccatatacaggtgtcccttggtatctgtgggggattggttccagaaccctcgatgataccaaaatccatggatgcttaagtttattagataaaatggcatagtgttttcacataacctacacacatcttcctgtatactttaaatcatctttcgattacttataacacctaatataatataaatgccgtgtaaatagttatattgtattgattttatttgtattttttttattgttgttatttttcattgtgttttttccctgaatattttctatctgtggttggttg

SEQ ID NO: 11058 - DNA, 997 bp, Homo sapiens; identical to SEQ ID NO: 11057

SEQ ID NO: 11059 - DNA, 997 bp, Homo sapiens
tgttaatccaccaatcctaatccctcctaaccccactcatagtccagagaagataaaaagttcagggacatggtgtactgctctccagatcctttcccagctgaaactctatacccatttagcactaatttcccattttccctagcccaagataaccaaccaccattctactttctctttgaatttgactcctaggtacctcacatatatattcctatttagtggaattgtagactatttatccttttgtgactggcttatttcacttagcactgttttctaggttcatccatgttgtagcttctgtcataatttccttcccttttaaggctgaataattttccattgtgtatatgtaccatattttgttcatccattcattcattgatagatacttgagttgcttctaccttttggcaattgtgagtgatgctgttatgaacatgggtgtacaaatgtctgttttgagtccttgttttgctttcgtgcattctattaaaaatgttaagattctttgctttttacttttttttctcttttatccaccttttgactttattcttaaagtttatcttggtataataatttatggtatgttgcagaattaggagcaaagtcccgtgtgtccttcactcagtttccccccatggtaacatttttcataattacagcacaatgtcaagaccgggaaaatgacattgatacagtcccatatacaggtgtcccttggtatctgtgggggattggttccagaaccctcgatgataccaaaatccatggatgcttaagtttattagataaaatggcatagtgttttcacataacctacacacatcttcctgtatactttaaatcatctttcgattacttataacacctaatataatataaatgccgtgtaaatagttatattgtattgattttatttgtattttttttattgttgttatttttcattgtgttttttccctgaatattttctatctgtggttggttg

SEQ ID NO: 11060 - DNA, 208 bp, Homo sapiens
tttttttttttttttttttgagagggagtctcgctctgttgcccaggctggagtgcagtggcacaatttgagctcactgcaagctctgcctcccgggttcacaccattctcctgcctcagcctcccgagtagctgggactacaggtgcccaccaccacgcccggctaatttttttgtatttttagtagagacggggtttcactgtgtt

SEQ ID NO: 11061 - DNA, 277 bp, Homo sapiens
tttttttttttgagagggagtctcgctctgttgcccaggctggagtgcagtggcacaatttgagctcactgcaagctctgcctcccgggttcacaccattctcctgcctcagcctcccgagtagctgggactacaggtgcccaccaccacgcccggctaatttttttgtatttttagtagagacggggtttcactgtgttcatcaggatggtcttgatctcctgaccttgtgatccgcccacctcggcctcccaaagtgttgggattacaggcgtga

SEQ ID NO: 11062 - DNA, 965 bp, Homo sapiens
agcattgtgttaccatagattagttttgactgtttttaaattttgtgtaaatgaaatttggcaatccatacttttctatgccttgtttctttcaatcaacaaaatactactgcatattatgtttttgtatgtatcagtagtcttcctcattttattattgaatagtagtcaattgtgtaaatacaccgcaatttatctatacacctacttttgaatgttgcttttttcccaagttttttcatattatgtataactaccatgaatattcattacaagtctttgtgtggacttaattttttaggagtaaaatcggtgaataatatagtaggtgaatgtttaatttttcagggaattgcaaaattatttttatagttgttataccattttatatctccaagagcaatgtttcatacttccgtttgctctctatttttgaaaaccattgatgttgttagtatttatatttatttttgccattctatgagtatctttctcaatatggctttaatttggattttgagagtctatagtctttgctgttttatgtgcttattggtcctttttatatttttctttgtgaaatatatttgtgaaatatttactgttaattaacctatatctaagcttttaacttaatatctttatacatatgtttgtatttataggcataatgcagtgctagattttcttaattataaatcatgtaagagtacaaattgtaagcatttgtagccaaaatattaggagtattttgtggtctactgtaataaaatactgttctgaaagtcactactgttattttccaacttaaaaaaatggcaattgtgctatttctgagaccaaaaaatttttgagttcagatggctctatgctgaccaacagatggatcaggaaatagcagatggttttatgagcagttctgtcatctcagcatctgaaatgctttacatgccaaggctatagaa

SEQ ID NO: 11063 - DNA, 962 bp, Homo sapiens
agcattgtgttaccatagattagttttgactgtttttaaattttgtgtaaatgaaatttggcaatccatacttttctatgccttgtttctttcaatcaacaaaatactactgcatattatgtttttgtatgtatcagtagtcttcctcattttattattgaatagtagtcaattgtgtaaatacaccgcaatttatctatacacctacttttgaatgttgcttttttcccaagttttttcatattatgtataactaccatgaatattcattacaagtctttgtgtggacttaattttttaggagtaaaatcggtgaataatatagtaggtgaatgtttaatttttcagggaattgcaaaattatttttatagttgttataccattttatatctccaagagcaatgtttcatacttccgtttgctctctatttttgaaaaccattgatgttgttagtatttatatttatttttgccattctatgagtatctttctcaatatggctttaatttggattttgagagtctatagtctttgctgttttatgtgcttattggtcctttttatatttttctttgtgaaatatatttgtgaaatatttactgttaattaacctatatctaagcttttaacttaatatctttatacatatgtttgtatttataggcataatgcagtgctagattttcttaattataaatcatgtaagagtacaaattgtaagcatttgtagccaaaatattaggagtattttgtggtctactgtaataaaatactgttctgaaagtcactactgttattttccaacttaaaaaaatggcaattgtgctatttctgagaccaaaaaatttttgagttcagatggctctatgctgaccaacagatggatcaggaaatagcagatggttttatgagcagttctgtcatctcagcatctgaaatgctttacatgccaaggctata

SEQ ID NO: 11064 - DNA, 997 bp, Homo sapiens
attctccaggctgacacattaatcaaagaaaatgtccatcccacatctttggtgtcatttttttaccttcttacttccttgcattaagaggcaaaagatccatatcaaattatgccatgtcttttgataaatacatttatgtgaaaacatataactcataactcttgatttttttcaccaaagaaagtagctgataataaaaaatgttccatttttcgtagcacaagctctatcaatttgagcttgttgatgcatttaagtgtgatgacattaattacactggcaaacactccaaaagcgcactttcttttatagcaaaatgccttttaaataaaatgttttcaaatctggcgaagaaagtttagaagggagataagcctcattattacttgtgattattataaatattaaacccttttatgtcataaattatagaaccttaaaaaagaattatcagcttcaagctaaatgctaaaataatttttcttcatagcaatatatctcaaagcaatgtgtgcataattataacttctgatatgttattagagctaaattttgatatgagaaatttttaaaactttatattttaatacaatttaagatttttccaatttttttaaatattgcatatttgatcaaagtggttgtgatttaagatgtaaaaattccccatttttggtaaacaaagtcttgtcaaaggatgagtagaaactacgtagctatgaaaaggttaattcatatattaggaacagttttactgcagaaaatttaaatcggcttaaaatgtttataccctcccactttctactgcaccaactctataatgaggtaggtcaattgagctttttacctgctttcaaaaatagcacaaaaatagttcttaagaattacgttgagtgagaatcagagattgaaaattatctgcaagaatatgtataacttccttctcccggcaccatcaaacgtgtttctctcctttattccccagattggttga

SEQ ID NO: 11065 - DNA, 997 bp, Homo sapiens; identical to SEQ ID NO: 11064

SEQ ID NO: 11066 - DNA, 758 bp, Homo sapiens
tcttttagatttaggatcttagcccatttacatttaaggttaatattgttatgtgtgaatttgatcctgtcattatgatgttagctggttattttgctcgttagttgatgcagtttcttcctagcctcgatggtctttacaatttggcatgtttttgcagtggctggtactgtttgttcctttccatgtttagtacttccttcaggagctcttttagagcaggcctgatggtgacaaaatctctcagcagttgcttgtctgtaaaggattttatttctccttcacttataaagcttagtttggctggatatgaaattctgggttgaaaattcttttctttaagaatgttgaatattggcccccactctcttctggcttgtagagtttctgcccagagatcagctgttagtctgatgggcttccctttgtgggtaacccgacctttctctctgtctgcccttaacattttttccttcatttcaactttggtgaatctgtcaattatgtgtcttggtgttgctcttctcgaggagtatctttgtggcattctctgtatttcctgaatttgaatgttggcctgccttgctagattggggaagttctcctggataacatcctgcagagtgttttccaacttggttccattctccccatcactttcaggtacaccaatcagacgtagatttggtcttttcacatagccccatatttcttggaggctttgttcgtttctttttattcttttttctctaaacttc

SEQ ID NO: 11067 - DNA, 758 bp, Homo sapiens; identical to SEQ ID NO: 11066

SEQ ID NO: 11068 - DNA, 1060 bp, Homo sapiens
ttctacagcattgaaaatcaaataatctaaaagaaaaaaaacaaacaaaaaaataattaactgaggagaaaagacaactactatcagagaacaggtcataacaagatacttcttttccccaaagccattgctagctagtatatatatattccctttccctgtagtttgttccaaatttcaagtgtgatgatagtttatttgcacaaacgagacagacaaaagttattctaactagaatgcatgctctctgagagcaagactaatacctctgattcttttagagagcctaggtcatgtattttgggtgtgggaggccagattgtgccacccccaaatatgaagtattactgagctaaagacaattaagggaagcaaatgcaggaaagctctctactcttcctctctttgtcttaaagcaggacatagatttataaggacaaaaggcatcccacccctctttctccaagtagaacaaaggttaaccactaaagacaacttttgaccctgattgtctagagatggtactggaagaattttcatgcataagtttcactaaccagcctttatctgccattgttttgccttctcacaacttgctgctcctgggagactcaaagttcttttcctttgtcttgtcacttctctaaaatgtactgttctttgttgaagatgttgttgggacaactaagtttctcctcaaagactcaacctcctggtcataagttgcaaaagttgtaaatcagccctacccactttcttccccaccttcttcttttcacaaatcacatgtttaccttatttggaaaagtttaagtctcagccaatcaggatcagcttagattgtgtggtccaaccccagccaataggcaaaggacacagaaacaggaactgcactagggttaaaagctccttcctcctttgttcagtgtgctcttgtgattgcatcaggtgcaagtagtacccttctgcagaagtaaagttgccttgctgagaaattttctgtctgaatgcgggtttcttttggctacactgagcacttgtttccaacaatgctatataa

SEQ ID NO: 11069 - DNA, 1060 bp, Homo sapiens; identical to SEQ ID NO: 11068

SEQ ID NO: 11070 - DNA, 1060 bp, Homo sapiens
ttctacagcattgaaaatcaaataatctaaaagaaaaaaaacaaacaaaaaaataattaactgaggagaaaagacaactactatcagagaacaggtcataacaagatacttcttttccccaaagccattgctagctagtatatatatattccctttccctgtagtttgttccaaatttcaagtgtgatgatagtttatttgcacaaacgagacagacaaaagttattctaactagaatgcatgctctctgagagcaagactaatacctctgattcttttagagagcctaggtcatgtattttgggtgtgggaggccagattgtgccacccccaaatatgaagtattactgagctaaagacaattaagggaagcaaatgcaggaaagctctctactcttcctctctttgtcttaaagcaggacatagatttataaggacaaaaggcatcccacccctctttctccaagtagaacaaaggttaaccactaaagacaacttttgaccctgattgtctagagatggtactggaagaattttcatgcataagtttcactaaccagcctttatctgccattgttttgccttctcacaacttgctgctcctgggagactcaaagttcttttcctttgtcttgtcacttctctaaaatgtactgttctttgttgaagatgttgttgggacaactaagtttctcctcaaagactcaacctcctggtcataagttgcaaaagttgtaaatcaaccctacccactttcttccccaccttcttcttttcacaaatcacatgtttaccttatttggaaaagtttaagtctcagccaatcaggatcagcttagattgtgtggtccaaccccagccaataggcaaaggacacagaaacaggaactgcactagggttaaaagctccttcctcctttgttcagtgtgctcttgtgattgcatcaggtgcaagtagtacccttctgcagaagtaaagttgccttgctgagaaattttctgtctgaatgcgggtttcttttggctacactgagcacttgtttccaacaatgctatataa

SEQ ID NO: 11071 - DNA, 1221 bp, Homo sapiens
aaccaaacaactatcaagcagtagtaatctatctttaaatttctactcggtcatgcaagtaaaaatgccatcacgccttcaatcccaaaattcccaaattcccaaatgtaaaaaagtccatgcaacaaaatgagaaataagaaccgttacaactgagattactggagtctcttccggaagacaaattatcactgtaatatgtaatatgaacatgtgaaggtctggctcatgttttatgatacacaggcttcaaaagttgtatgagctcagatagagactgtgtttgcaatttgttctttcactaattagctatgtgatttagttaaaaagtcaaaaagattgtagtaacgattaaacaaatgtgtggaagtttgacctagcagtgtctgacccactcatgatatatatccaaccaatactagttagttctgattaccttaaaactggctgctcaacttacaaatcttaggtcaaatcacaggccctctaacgactacatataagaaaaacctatcaccaacgatcataaggtgccatatcaccaaggatcttctatgccatgcagacccaatcaatacaaggcagaattgatttaatacagtgtttctctaagtatgaataggcaggtatcctaatcattaagaaaaggtgctttggaagcagaaaggctgcgttcaaattctggctctatcacttaccatctacctaaatttaggcagttcttttattctctgagcctacttaacttatctgtattattcctataccccactgagttattgtgaggattaaataagtacagagaaagtgtgtggaaaagtgcttcaataagaatgttagctattgccactgctattattatgctccctaaagaatattccatgacccaataaacaggaaacactgctagagagtcacatgtgttattgcatttgacatcctgaggaaaaaaaaaaaccctatttaatcaaataattcttaaatttatttaactctggcatccttttctcaaataacattaactactgtggtagtaatgtgccgaagaatactcttaagtgcaatgaacactataaattttctataaagctgtatatctaaacataccactgtaccacatagcctatttctagtccattccagatgcaatcaaaatttccctggcctcaaaaattagaagactaaaactttcattacctcttgttcagaaggattggttga

SEQ ID NO: 11072 - DNA, 18138 bp, Homo sapiens
gctgctctttggtgattcccaacttcttatgagtaaaagtacatttgtaaatacctgatagaaaagaatgtgacaaattttataagttaacaccataaattcatagaaatcatgaaaataatatatgtatacgaaatcccttgataatctgtgtagtacaagtttttcccaatcaatgcctagaataatgatgttcttacatatgaatcagaatgatttcagcctttatcatcaggccagatttaaacaccatgacatatttatcctgtgttcttttggtttaggagtacatttaatgatagcataacataagaagcttatcagaaccaggttcaattcttattgtgcagcagtaaggttacagaatggccttctattctgaaacatctaaatatatatttcagaaatcatactcaaggcatctatttcaaagggtatagtataggtacagtcaaaatataagtcctacacctttattcacttcttcagcaaatcaaactcaacatgtttgaaatttaataactgaattcaattccacaaaatccttccctattgtctcacctatttactcaatcttcaagaccccacttgttacatctatccacaaagccttcatttggtaaactgagtacatttccgcctcattctctgaatgcttttgagttctaagtgttttgtatataatccaaagctttgtgaaataccatcccccattattctgttaatgtgcacatgacttatatacccaaagagtaactttattgggcacctactaaatgcttatttgctgagcactatgcttgttactttccctttgtttcagtgaagtctcacaagaatcctaaaatgacgttagtctcatcctcattggataaataaacttttcaaagtcacctcaagaactgacagagccaggattagagccagggctcaaatttctactatgccaaactcctgctcaaaaagactttttttttaagacagggtcttgccctgttgctcatgctggaatgcagtgacacgatcatgggtccctgcagcctcaacctccctggttcatgtgattctcccacctcagactcccaagtagctgggactacaggcgcatgctaccacacctggctaattattgtatttctagtagagatggggttttgccatgttgctcaggctggtcctgaactcctgggctcaagtgatctacccaccttggcctcccaaagtgctgggaatacaggtgtcagccactgcatccagccaagaagacaaacttctttctgcacaaaagattcatgcgatatccctagagtaccttccatgtctatagaggtccacaataaatacttgctaaccattcccacaaatatttactgagcagtttctgcaggccaagcactacattaggtgttaagaatacatggatgaataatataatttttcttaaaaattaacaaagaaccaggcggtaatcccagcactttgggaggccgaggcaggtggatcacaaggtcaggagttcaagaccagcctggccaagatgatgaaaccctgtctctacaaaaaatacaaaaaaattagccatgcgtggtggcaggtgcctgtaatcccagctactcaggaggctgaggcagagaattgcttgaactcgggaggcggaggttgcagtgagctgagatggcaccgctgcactccatcctgggtgacagaatgagactccatctcaaaaaaaaaaaaaattagcaaacaaccttaaattaaataaaaaatgaacctgttaaatgtttttgtgactctatagctatgcctattttattagtgcagcagacccctggcattttcagattggacttctataactttaactatatataaatgatttcagagtttcttagtaatttgtaattatgctgagagaacagaatgtcctataaggttaacatgcttcatcagcatatcacttagccacaaaatatactaattaagacttaaacatattagaaaaccagctcctatcacttaccacttatatgatcttgaatcacttattttacctctctgagcctcagtttccttataaaatagaaacaatagtacctatttaattgaatttggggaagaataaaataacataacgcagagaaaatactttgcctcttacaaattgagtatcaaataaacctcagatattactactaagaccagtatcagcatttccagtagctttgtttgcctctctcactttgtaccattttatggggaaaactacatgctatcatgatattcgtaaagctagaattcttaaatatcttattcctttataaatgtcaagattctactgcttttgctaaacttaaagagaaaagttatattatggtatttatcacatcattcttcaattatgaaatgctatatacacgaaaggagagtataattgttttatagattggaaaatttatttgcatgataaaatagcatcaaatgacattaaattttcagctacctaaaattcccatgaggaccgcaggttccttggatggaatttgttgtaagaagggtaggatatcatcaagtacaaaccacttatccaagtattccaaaatctttcctaagcacactaatgaatttacacgaacctattaaaagaggtaaattgcattagtcattaaaagttttcaaaatctagaacaaaatatttaagtgtaaacttaatcttcatataaatatgttaaagtctcaagaataaatgtagatttagaagctctcatcctttatcaacataggaaattcacttatttactaattttcctggcttgtttcacaaagaatttatgattgcttcaccaggtcactagtgagctaaagtcaaggaatgactacaatcttgtagcattttaaagtgattagaatttgagaaacttttactacattatgtgttactatcataagaacactcctttggggacatttgaataataaaaaggactacattctttgcaccaagtgatcattttcacccacattccagtattttactctaacttgggttcaattcatttttaaactaaatattttaacatgtgaaggtatccatatatgtgttttctatttccaaatatacagttattaagacctcttatttagaagcttttatcaaaattccatatgcacttgactatttgataaatacatcataccctacttctatttggaatttcttaagatagaatatctttaagtcaggactatagtattaataaaactccagttttcaaaaaacagtaaaccaacaaaggcagaaaataattttgttggctaataaagcaccatagttctacaggaaaaatggggaaaaatttccatttctaaaaaacaatgtacaattgttttctgaaattaaaacacaagagatattataaattcaaaaaggtatctgaacgcttaacttgtactcataattcgttttataaaaggaacagctgcattctactgagatatatatatattttaagcaaaaccgagaatactaattttatttacttttaggatatataaaatattagtcatgtaagtaatgaataaatatagctcttggaggattttacctaactctgtgtagaatttttaaaaattttattttcagggaagagtattaagacacaatactaactcacgactcaggaatttcctagtcagaattttaaacttttagagatagaggactatgaatacaatttgggaattcctatttgccactctgaaggtaggcagaagcactgaaagtactatctaaaatccacttaaaaggtgacatataaaatgtaaatccattcctagttactgttctaaatataaatacattcattataacttcttgtaaacaacatgccttaacggccagttggcatcttaaaaagaaacatacatataactgggcagcaattcacatcatttaagtatccatgtttcccatttctacatacccctacatatgctcagaactgaactagaacaggtactcgctttgctttggttttggattttttttgggcggggtggggagcggcgggggcttgctctgtcacctagactggaaggagcagcacaatcacaactcactgcagcctcgacctcttggtctcaagtgatgctcccaccatgccaccacatccagctaaatttttttatttttagtagagacgaggtctcgctgtgttgctcatgctcgtcttgaactcagtgctcgagatccactcgcctcagcctcccaaagtgttgggattaaaggtgtgagccaccatgcccggcctacaacatgtactttgagaaaatgtatgttaatataaatttatgctgccataaaataaggtacatagtatgattgtaagatctttaaaagggcattttgaaaactaaattttaagctgtatattactaccatctattttaaaaattcaattgtaaaattgagaattttagagaaaacagctacttttaatgatagtgaagactcagagaggcacagtgacttttcaaggtcacaggggttgttagtaacaaagtgagaataagaactaaaacttgactttatttcatttcatacttgtttgtttcagtaatgatttctttttctactttggtgttacattttccatttcaaagcctttcaaccaagaaatgaactaaaatagattcaatggctataagataaaatcatatcattcaaattacttttgcttataattttattaagctgtttatttttatttaaattcacattccaccagataaagacgggatctccagagaactagttttacaaaatgcaaatttaataatatgtccgttatcaaaaatcaatatcaagaactggtcaggcaaaagagaacatttctccctctttaaagctgctattttgaagacagcattcaatattacttctataaagaaatataaatgtgataaactattatatttagtgttagagaaaaggctggggacatttattgctttcaatatgagataatgaaaactttgttattaattctaccttccttgactaacaagtaactgaatgttaaaattttgtattcaaagaaggtaactatttccttggtctacattttttagcacaactatttatcctacttgtattcacattaatttattgctttcttgtactctacttttttaagaagtgggcaagtcagtgagaaataagacatttagagaccaataactaaaaataaaggctatttataaaaggaaacttttcaacaagtttttacgcttagataccaagttaaactctcataatatttttaaactaacaacaaaataaattcagttaaagcagaaaaggattaagaaaaaaataatcacccaacttttttactgaagcactcaaagtaaagggacagcaagtaaggttaggaatgcaatattataaattatgtatcaaagaaaactacagctcatttttatagtactatatacaagttatctacagccaagatgaaatacatcaacaatctataaaagggttattaaacaataagaaaatgatttaaagcactgacaagtgaaaagaaaaacaaaaattaatatgcaattacttaccgcaagggaagatgtttgtagacaagcatttttaattcttggtatcaaagcgtttttcatggatgggtagtctataagatttgcaaaggttggaatgatgtttagacagagctcctataaagaaaataaactgaatcaatattagggaaagactcatcttttctctctgatattacaaagttttgcatttgcatggctaaactgtcatatagtttgaaacaaattttcatatatattatttggtcctttcaacaactctttgaaaaatgaatggttataatcacttttcagtcttacagatgagaaaaaaagctcagaagacattactcaaagtcatactaggtcataataactagtgtatgacatccaaactccctgatctcattcctaatctctttctttgataacacaagtcctcgtttatctttaaataacaacacataagttttgctatctctcagaagaagggaaaatcaagtatgaaatcatgtaaaaatactcctctcaagtaattctcttagctgttacatatatccatatgataacatacaacagttttttaaaacaacataccgaaaggagtgtttaatttttttttttttttttttcttgagacaggaccttgctctgtcacccaggctggagtgcagtgacgcaatcatagctcactgcagcatcaacctcccagtcttgtgggatcctctggcctcagcctcctgagtagctgggactacaggtacacgccatcatgcccagctaattttttttttttttttttgagacggagttttgctcttgttgcccaggctggagtgtagtgacatgaccttggctcacagaatcctccgcctcccgggttcaagcaattctcctgcctcagcctatccagtagttgggattacaggcacatgccaacacacccagctaatattttgtatttttagtagagatggggtttcaccatactggccaggctggtctcaaactcctgacctcaggtgatccacctaccttggcccatgcccagctaatttttcaattttttgtaaagacaaggtctcactatgtttcccaggctggtctcgaattcctgagctcaagcaatcctctcaccttggcctctcaaagtgctaagattataggcatgaaccactgagaccagccttaaaagagtgtttaataatttttagaagaaaattgaggacagagtattacataatcccaattcttttttttttagttttctttttttttttttttttttttgagacggagtctcgctctgtcgcccaggctggagtgcagtggcgcgatctcggctcactgcaagctccgcctcccgggttcacgccattctcctgcctcagcctcccgcgtacgtgggactacaggcgcccgccaccacgcccggctaattttttgtattttttagtagagacggggtttcactgtgttagccaggatggtctcgatctcctgacctcgtgatctgcccgcctcggcctcccaaagtgctgggattacaggcgtgagccaccgcgcccggccctttttttagttttcttgggtttttttttcttttttttttttttttggagagtcttgctctgtcacccagggtggagtgcagtggcaaattcatagctcactgtagcatcctgggctcaagtgatcctcctccccaactcagcctcccaagtagctggcactacaggcatgcactgccatgcctggttaattttatcatcttttatttttggtacagacagggtcttactatgttgcccaggcaggtctcaaactcctggcttcaagagatcctcccacctcagtcttccaaagtgctcaaattacaggtgtgagctaccgcacctaatcccaagttctaaaatgtgtaggtacctgtgtctatccataggtttaggaaaaaagactagaaggatatatatgaaaatgttaaccatcgtcatctgtgagagcgaattttaatttcttttttttgttatttgtaagtacttccaaattctgaaacttaaagcaagcataactcagaaatgggggaaaaaaagatttaaaacattcttgttaactaatgtggtgccatagtagaaatgataactggcaaattctgggaataacaggaaaacagagggatgactgggggctagggaactaaatgagaaaatgaaaagaagaaatggcttgagaactaactggctaaagtacacacatctcaggcagtttatgagagatgatccttgtagcaaagcataagagaagggatcactgaggaaaacggaagcacaaatgtgaattaggaaggatactactgaaaatactggcaaacttcaagacatccatttatagttagaagacagaaataaattaactactaagaatctgttatcagaacactggatatattttatttgctttaacttattcttaggcttccaaaaggcaaatgtaagagagttaattgtttgtatccactcagaactattaataattaagtgattgataaaatttaaaaatgagccaggcatggtggtgtatgttcctgtggtccctgctactatggaggctgagggaggatcacttgagcctgagagagcgtgggaggtcaaggccacagtgagctaagattgtgccactgcactcaagcctgggccactgcactcaagcctgggcaacagagtgaaagcctgtctcaaaaatatataaattaattaattaattaaggaccacagatgggagaagagaatgggcaagtgtaagcagtcagtgggacactatgttcctatgttcccgtaaggagcttccttacagaagatcaggctttaagacagagagacagagataggcagacttacaggaaaggaccccctaacacctgtattattaaaaagcgactggaaagtgccatgctgtccaatcaaagtcatagcaggaggttacaaagaggcaaatcttaaattctgtctaaatcacttagctaacatagggagagctctctcccgaagaggagacaggatgaggaactttatttatttatttatttatttatttatttatttatttatttatttttgagacggagtctcactctgtcgcccaggctggagtgcagtggcacgatctcagctcactgcatcctccgcctcccgggttcaagccattctccctgcctcagcctcctgagtagctgggattacaggtacccgccaccacacccagctaatttttgtatttttttagtagagacggggtttcgccatgttggccaggctggtcttgaactcctgacctcaggtgatccgcctgccttggcctcctaaagcactgggattacaggcatgagccaccgcacccagcccgggatgaggaacttaataacagccgggatgaggaactattttaataacaggagattgcaaaacacaaaatcaaacctcaaaggagtctaattagcaaactctcagaaacttctgtttattttacactttataatgggtggtgggtggcggtgatgaagataatttcgatatccatttaaaaggtaaattaattttcaaaaattgtgtctgatacacgtttataatgcctctttttaagaatcctaccttttgcaaaccatcttctacccgtccaaatgttttcagaaccatctgtagcctcttaaatatttctaatcaaacttagctttaaaaatttcaatttaaaaatgaatttcagatgttactttctagcctactatttgcaagaacctggaggaaaagatttcttatttcttgctttctctaggattctcctaattgtttagatatgctttatcaactaagcagtgctaatttcatgactaaagacttacactgaatgataccagaaatgctggtttccccaacctggccaacatggtgaaaccccgtctctactaaaaatacaaaaaaaattagccaggcatggtcgcccatgcatgcaatcccaggtacctgggaggctgagacacgagaactgcttgaacccaggaggcggaggttgcagtgagccaagattgcgccactgcactccagcctggaaaaacaaaggaagaaatgctggtttccaaatcttagcaaagttacaaaagtcaatctgaattatatactacttcaataaaatacttgctgacacttattggtcaaattaactataaagaaaaatggatttcatgtcacttaatcttcccctccctcttctttaatatcactaaatataaaacaagtttggctgcacagagcctgtgggaatgttttgtgaggctataattcacaatttctttaaaaagaactaagaaatagaggtagacacaccttccccactcatccatgtcatttggacaaaggcagcataccctcacctttaagaaggcaaatctaattataaggaaaaaaatgttaacatcaacctcacagccttgaacaaacgaaataacttagcagacaaagactgaattaagtccaaaaagtgaccttaaatatgtagtattaggttcatattaactttagagtaaataacttaaaaaaatcctattttattaaaatgtttatactagcagagactataagcttttactacaaaaccatcctgcagtgagatgttcttaacataagtatgtattttcaaagtgaaaaaacttaaattacacttttaatagtgatccagaatttctttcagacaaagaactcatagaaccaaaattttaatcgcaaagactacaaaactaacagtctggcaaagtatatggtgttttaagatggcctttgtggaacaaaagttataactatacatgcattaagaatggtcacactaaattactgtctgcttttccatctacctgctgtacaaattaacttcattgcagaagaaacagcatctctacatagaaaactgagttaccaagcaagaaggaaaattatgagtatgggaaaatacctactcaatgttttcatgagaaaaaggcacacgtggccacgcccaatggctcaggcttataatcccagtactttgggaggctgaggcacgaggaccacctgaggtcaggagttcgagaccagcctggccaaaatggcgaaaccctgtctctactaaaaataccaaaaattagccgggtgtggtgacaggcacctgtagttccagctactagggaggctgaggcaggagaattgcttgaacccaggaggcggaggttgcagtgagccgagattgtgctactgcactccagcctgggcgacagagcaagactcagtctcaaaaaaaaaaaaaaaaaaagaaagaaaagaaaaaggcacatgcatcttcggaatttttgttcataattatcagtttagaaagaagcagaaagatgaaggtatacaataatacaaactacaacatatcaaatcttcttccataatagtacatttctgataaataaaagcaacaaatctacctcataatgcaggtattatgtacacagactgattacttttttcacttacaatacactgattctttaaattagttaggagtgaatatattttagttacagtatatcaataatgtgattcaaaagataaatatatttactattgagttatgtattttatgacttaaatccaaaatgtactttatacctcttcttctgctttaagaatcaaaatcatcattaaagaaaaacaaatcagatactgtacctggatctgaatggaaggagcttctagtgctctgtaaaccatgggtagaacactgttctttatctcatcaggaggggttttggttagtagcaaatccattttttgtaggaaaattaacaaaatctgtttagaaaacggaaacaatgtattaaaacctggaatctttaaaagattcaatatatgccaaatgtaaagcttcttcaaaagaataactcatatattttgacactcaccatgttgctagcctgaatgcgtggaagacaaaaacacacaaatcaagtctcttacatttctggaggcacaatatttaacatctgctctgagtttaaatgttaattaaataaagactaatctcctctcacatatctacagtaatctatcacttgcccacacataccaactatctggaaagctacagggtgaaaaaagccagtaaagtgagatatcccaaagaagtaaagtccatcacttggcttctatgaagctcaagagaaaaagaaagtacagaactgagagggagtataagaaaaaattctagacgccaggtgcagtggcacacacctgcagtcccagctatttgggcggctgaaacaggggaattgcttgagcccagaagttaagtccagccaaggcaacatagcaagaccctatctcttaaaaaaattttttttattttagaaaaaaatgtttttaagttgtccctggtcattcttccacatacctaaattataaggaacatactgccccttctatttatacagaaattagttttgccaagactcagggaagaatattcggaagaaattttttctttttttttttttttgagacagggcctcactcactctgtcacccaggctggagcgcagtggcgcgatcatagcttaccgcagcctcgacctcccagggctcaggtgatcctcccacctcagcctcctgagtagctgggaccacaggcaggcacctggcttatttttgtatttgtttgaagagacagggtttcaccatgttgcccaggctggtcttgaactcctgggctcaagcaatctgcctgctttgacacgacaaagaactgggattacaagcgtgagccactgcacctggcccaaaaggtatttttaactggacaactaagagaaaaaagaatggaggcaaataagaattcagattataggatccttagggtactatcttgactgatgcatagcttagggaacagtggctccaccaactttccctcatgacaccttgaccatttgggggaaccctgcttcacaggctacagctccctcacttgttctttccctaattcacagaaattctcaccttaccaccacatacttccttctgttcccctcctttcaagggaaggactacaaagaatcataaaaccattaaattagatagttgatatataactaataagctattcctatacaatgctacaaacatgtaataatacctgctatgtgccagaaaatttcatttaatctcaacaatccttttcattttagaaatgaggaaatagaagctttaagatggcaacgacacaagtcatacttcaagtaaggagataaagaagccccaattcaacccaggtgtgtgactctactgctcttaaatccaacattaccttcaatctagcaaatatatattatatacatgagagactgattacttttttcacttacaatacatatacacattattcccatggtgctgtaagcattttcctattctagtggaagtagttattagcaataaaatggagagaaacaactggcacaaagcacctacatattaaagacttaaataacaaaataatcaaaaatacttcaaatacttcaaagtgcaagagaaaaacaagtatttattttcctaaacctgtaactttctacaaagtatatatatggtacataaagaacagtataacacatgcaaaatttcattgcagtttatcttctgagatagtaacttatggagagctacagacatttaactgcaaagttcaatcataattttaaaaatagtttggttcaaacatgtaaagcagctttctgactaatggaaaagaaagtctcatacacttacctcagttttttttaagtcatatattcattccttttgttttcagtgatagtcacaatcataaataacagtagataaatacacaaaaatatctataacatacctggattggctcctgctgcttaaacacagggccaagttcaggaagaattaatttgacatattcttctttggtgcattcctcagcaataagtagaacattgggcaaaacaaaaggtaccatgtcagggtttacaaattctgaagtcaaacaaggcaaaattctctgcacaatgacacgctgaaaggcaaaaatgttttttaaaaaaaaaataaaatttattaaaggtttttagtattagttaacactaaggtctaaaacctctaatccctttaggtaacgtgacgatacaatttatggttgaaactggtatattttcagagtaaagtgggatgctattgctaattatgcaaggataaatagcataaactggaaaggtcatgggtaaaaggggacacacggtcaccctacctgtaggaaacttaccctaattagtctccaccgctatgtttgtttttcctcttgattccttcattacttacgattcataccacacaacataaacactatcatgtactgttaactgtttcacacgttaaccctagctacacttactataagggcctgagagcagggacagtattttatgcctcctctttactctccatagcatctaagtaaagagtcagacaaacagtaggtaactaacgaatatctgatagattaaacactggaaatgtttttacaaccaggaattattagtattccaaccagtgcctcttcagcattcaccaacattttaaaaactgtattacactcatcatttaataagtcagaaaaggagtaaaggaattggaaaggctaacatcaacagaagtacccctttaactgctggtgagacaatgaactccacatgatagcttatggactcttcttctgacctttaatatccaactgctgtctctgcctagttagtatccttctaaattttttagcctatttatttttggaccacgcaaaaaaaggtccactgaacttttggcttcagttggcagtgttttatagtcatttatgtacctcaggcaaagttatattattttcttggaagagttatggtagtaagtcaaaataaactttaacttctaaaatcctgattattaataagaaactaacaataacaaaccttgggcagttttggtagaacctttggcagtcctttgaaaaactgtgatttctgaagattatctctttggaataaggtatcaaaatattgcagtgttactgcaccaacatcatcaaagaagggaatctaaaaaaaatggaaataaagtattttgataaatgttaaattgaaagtacttctcatatctgaaactgtcacaatatggtaaaaaaaatactcagaaacatttagcaaaatgctgaagatcaccttagaaattctaattataaaactctgaataagaaaataaatgatttttcaagttcaaatctttggaatctgtacctgtgaattggctgggtaaaaactttcttttatgtaagtctaaaatattgaaagattaaataaaataatttgaaggcataaaaataccagttattagttaaaatccatggttggcccgggcacggtggctcatgcctataatcccaacacttcgggaggccgaggtaggcagatcacctgaggtcaggacaagaccagcctagccaaaatggtgaaacactgtctctaccaaaaatacaaaaattagccaggtgtggtggtgggggcctgtaatcccaattacttgggaggctgaggcatgagaattgcttgaacctgggaggtggaggttgcattgagtggagatcgtgccactacactccagcctgggtgacagagtgaaactctgtctaaaaaaaaaaaaaaaaaaatccatggttatatgagtgaaataaaggactatgaattctctaagagtctagaacatctgtttacttaattgtgactgttagcactctgcttatttgaaatcttaattttctatcagagcaattacgtacatatttagctgtgtaagattaagcaaaattgaatatttaatacactcaaggatacagatgttatttggggctgtatctgactgttgctttagaagaacttaatctcagaacagggatccctggggaaaaatatttttttaaaacccaaaaacttaatctacttcaactcattttttgttcctccatcttaggcagaaatccacatgtactcacctttgtcatttgatctgcatctggtcttacagtcggagttacatttaacagtagctttacatgttcacgaacttcctcaggtatatttgtaagtgaactagatcctaaacgactcaactattcaaaagagtgataacattaaatgagtataaaatatttaaaaagacatatacatttaagaaaacatttaaaaatttactcaatattttactacaaatatactgactacattttaaacacactgttaattctattgttgcaaaacaaaacccttatctttaatacccaaaattgtttctattcctacagtaaaatgttccagtatttatatttactcaaatgccatgactaaagttctgtaacaaattttaactagtcctctttatttatttgaaaaaaatatttttttgagacagggtctcactctgtcaccccaggctggcatgcagtggcacaatcatagctcactgcagccccaaactcccaggctcaagtgatcctcccaccctgatcggccttccaagtagctgggactacaggcatgtgccaccaagcccagctaactttttgtatttttttttttgtggagaagtggtttggccatgttacccaggctggtctcgaactcctggactcaagtgatccacccgccttgggtctccccaagtgctgggattacaggcgtgagccagagcacctggcctagtctgcgttacttataaatttgttaaaataaaaatataataaattattaagctgatcttatgcaaacttaaaatgagatactcatgtcatttaaagaatttcctgaacacattttggaaaaaaatcaaagacacatttaataaattttttaatgcaagcaaattatttataggcaaatacctgatccaactgcctactgaaactcttgtaaatatcttgcttgttgacttcaaatataggtttccctttattaaatacagcatacataacagttcctaaagaatacatatcactggctgtttcacagctcacagaaagtatgtattcaggagccaaatattcaggatttggaagacacaatgaaggtaaatttgggtcccattctttacaaggaaatttaggctgtagtaagaaaaggaattacatgggttacttcaaattcaaccaaacaactatcaagcagtagtaatctatctttaaatttctactcggtcatgcaagtaaaaatgccatcacgccttcaatcccaaaattcccaaattcccaaatgtaaaaaagtccatgcaacaaaatgagaaataagaaccgttacaactgagattactggagtctcttccggaagacaaattatcactgtaatatgtaatatgaacatgtgaaggtctggctcatgttttatgatacacaggcttcaaaagttgtatgagctcagatagagactgttgtttgcaatttgttctttcactaattagctatgtgatttagttaaaaagttcaaaagattgtagtaacgattaaacaaatgtgtggaagtttgacctagcagtgtctgacccactcatgatatatatccaaccaatactagttagttctgattaccttaaaactggctgctcaacttacaaatcttaggtcaaatcacaggccctctaacgactacatataagaaaaacctatcaccaacgatcataaggtgccatatcaccaaggatcttctatgccatgcagacccaatcaatacaaggcagaattgatttaatacagtgtttctctaagtatgaataggcaggtatcctaatcattaagaaaaggtgctttggaagcagaaaggctgcgttcaaattctggctctatcacttaccatctacctaaatttaggcagttcttttattctctgagcctacttaacttatctgtattattcctataccccactgagttattgtgaggattaaataagtacagagaaagtgtgtggaaaagtgcttcaataagaatgttagctattgccactgctattattatgctccctaaagaatattccatgacccaataaacaggaaacactgctagagagtcacatgtgttattgcatttgacatcctgaggaaaaaaaaaaaccctatttaatcaaataattcttaaatttatttaactctggcatccttttctcaaataacattaactactgtggtagtaatgtgccgaagaatactcttaagtgcaatgaacactataaattttctataaagctgtatatctaaacataccactgtaccacatagcctatttctagtccattccagatgcaatcaaaatttccctggcctcaaaaattagaagactaaaactttcattacctcttgttcagaaggattggttgatgatacacaaaaatcaaaacccattattttccaggctccacttttattcaaa

SEQ ID NO: 11073 - DNA, 1065 bp, Homo sapiens
agtagctttacatgttcacgaacttcctcaggtatatttgtaagtgaactagatcctaaacgactcaactattcaaaagagtgataacattaaatgagtataaaatatttaaaaagacatatacatttaagaaaacatttaaaaatttactcaatattttactacaaatatactgactacattttaaacacactgttaattctattgttgcaaaacaaaacccttatctttaatacccaaaattgtttctattcctacagtaaaatgttccagtatttatatttactcaaatgccatgactaaagttctgtaacaaattttaactagtcctctttatttatttgaaaaaaatatttttttgagacagggtctcactctgtcaccccaggctggcatgcagtggcacaatcatagctcactgcagccccaaactcccaggctcaagtgatcctcccaccctgatcggccttccaagtagctgggactacaggcatgtgccaccaagcccagctaactttttgtatttttttttttgtggagaagtggtttggccatgttacccaggctggtctcgaactcctggactcaagtgatccacccgccttgggtctccccaagtgctgggattacaggcgtgagccagagcacctggcctagtctgcgttacttataaatttgttaaaataaaaatataataaattattaagctgatcttatgcaaacttaaaatgagatactcatgtcatttaaagaatttcctgaacacattttggaaaaaaatcaaagacacatttaataaattttttaatgcaagcaaattatttataggcaaatacctgatccaactgcctactgaaactcttgtaaatatcttgcttgttgacttcaaatataggtttccctttattaaatacagcatacataacagttcctaaagaatacatatcactggctgtttcacagctcacagaaagtatgtattcaggagccaaatattcaggatttggaagacacaatgaaggtaaatttgggtcccattctttacaaggaaatttaggctgtagt

SEQ ID NO: 11074 - DNA, 301 bp, Homo sapiens
tataatgaagaataagctctaataaccagtctttgaggagtttctaatcttcaggaagaatcagtcacataagaacacagctgtgacaaacagcgatagaggtatgcagagagacaattccataataatctttggacacattattcctttactcaaacatttaccacaccttgaaagttcaaatacctaaaccagacaggcatttaaagtctacctattctagtctcaatttatctttctcccattattctcctactgtattatatatatctgccaatcaaattgaattattccttcccag

SEQ ID NO: 11075 - DNA, 955 bp, Homo sapiens
tatagcattgcatttcttaagtaactacatacacacataaatatatcactatcaaaaaacatttctgtcacctgagggagtttcgaattttctatgtctcttcctagtctctttccccaaacctctactaaccatagttaattttgtctgaggattttatataagtgaaattatacagtaagtgtaaagtttttgagatctattcttgatgtactttatctgtaatttgttgcttttacttggacatatatatgtgtatatatggatgtctgtctatatatatatgtataagtaaaaactttagaaattttagaaagaaagcttttagaaatagagctactatgatcactctcgaaccaggtagtctttctttgttcatatgctttcttttctcttaagaaagtattaaggagtggaattgctgagtcatagcaaaaaaaatgtatgtttaacattttaagtagcttctaaatcatttttcaaagtgattgtgtcatttcacactcccctcatcagtatatgagagttttcacttaatttccagcatttaagattgtcagtctttcattttaatcatcttcttttgatgcttctttttgtctctgttctctaattaatgaaaaacattgggatcacatcaagagatataaaaaaaattatgcctttccaaggattaacctttgtgaaatttcagtgtgtcttgttttctcactataaatcaacaggtctgctgcacgagagtcagaacatcactacaaaatgaaaaacctgcaccaggagagaagcgagaaggcactgctaagggacactcgatttactcaagatggaataagtacaaagttacgtagtcaggagaactagtacgaaaaaggaatcaggtctgtgtcagagtaaaaattgcatctagcaaatttaaacaggcaaaaaagagttattcaaggccaatgcaatagaa

SEQ ID NO: 11076 - DNA, 6474 bp, Homo sapiens
ttttttatttatttatttatttatttttttaaattatactttaagttttagggtacatgtgcacattgtgcaggttagttacatatgtatacataagccatgctggtgcgctgcacccactaactcgtcatctagcattaggtatatctcccaatgctatccctcccccctccccccaccccaccacagtcaccagagtgtgatattccccttcctgtgtccatgtgatctcattgttcaattcccacctatgagtgagaatatgcggtgtttggttttttgttcttgcgatagtttactgagaatgatgatttccaatttcatccatgtccctacaaaggacatgaactcatcattttttatggctgcatagtattccatggtgtatatgtgccacattttcttaatccagtctatcattgttagacatttgggttggttccaagtctttgctattgtgaataatgccgcaataagcatacgtgtgcatgtgtctttatagcagcatcatttatagtcatttgggtatatacccagtaatgggatggctgggtcaaatggtatttctagttctagatccctgagaaatcaccacactgatttccacaatggttgaactagtttacagtcccaccaacagtgtaaaagtgttcctatttctccacatcctctccagcacctgttgtttcctgactttttaatgattgccattctaactggtgtgagatgatatctcatagtggttttgatttgcatttctctgatggccagtgatgatgagcattttttcatgtgttttttggctgcataaatgtcttcttttgagaagtgtctgttcatatccctcgcccactttttgatggggttgtttgtttttttcttgtaaatttgtttgagttcattgtagattctggatattagccctttgtcagatgagtaggttgcaaaaattttctcccactttgtaggttgcctgttcactctgatggtagtttcttttgctgtgcagaagctctttagtttaattagatcccatttgtcaattttggctttggttgccattgcttttggtgttttggacatgaagtccttgcccattcctatgtcctgaatggtaatgcctaggttttcttctagggtttttatggttttaggtctaacgtttaaatctttaatccatcttgaattgatttttgtataaggtgtaaggaagggatccagtttcagctttctacatatggctagcaagttttcccagcaccatttattaaataggcaatcctttccccattgcttgtttttctcaggtttgtcaaagatcagatagttgtaggtatgcggtgttatttctgagggctctgttctgttccattgatctatatctctgttttggtaccagtaccatgctgttttggttactgtagccttgtagtatagtttgaagtcaggtagtgtgatgcctccagctttgtttttttggcttaggattgacttggcgatgcgggctcttttttggttccatatgaactttaaagtagttttttccaattctgtgaagaaagtcattggtagcttgatggggatagcattgaatctgtaaattaccttgggcagtatggccattttcacgatattgattcttcctgcccatgagcatggaatgttcttccatttgtttgtatcctcttttatttccttgagcagtggtttgtagttctccttgaagaggtccttcacatcccttgtaagttggattcctaggtattttattctctttgaagcaattgtgaatgggagttcactcatgatttggctctctgtttgtctgttgttggtgtataggaatgcttgtgatttttgtacattgattttgtatcctgagactttgctgaagttgcttatcagcttaaggagattttgggctgagacgatggggttttctagataaacaatcatgtcgtctgcaaacagggacaatttgacttcctcttttcctaattgaataccctttatttccttctcctgcctgattgccctggccagaacttccaacactatgttgaataggagcggtgagagagggtatccctgtcttgtgccagttttcaaagggaatgcttccagtttttgcccattcagtctgatattggctgtgtgtttgtcatagatagctcttattattttgaaatacgtcccatcaatacctaatttattgagagttttcagcatgaagggttgttgaattttgtcaaaggctttttctgcatctattgagataatcatgtggtttttgtctttggctctgtttatatgctggattacatttattgatttgcgtatattgaaccagccttgcaccccagggatgaagcccacttgatcatggtggataagctttttgatgtgctgctggattcggtttgccagtattttattgaggatttttgcatcaatgttcatcaaggatattggtctaaaattctcttttttggttgtgtctctgcccggctttggtatcagaatgatgctggcctcataaaatgagttagggaggattccctctttttctattgattggaatagtttcagaaggaatggtaccagttcctccttgtacctctggtagaattcggctgtgaatccatctggtcctggactctttttggttggtaaactattgattattgccacaatttcagctcctgttattggtcgattcagagattcaacttcttcctggtttagtcttgggacagtgtatgtgtcgaggaatgtatccatttcttctagattttctagtttatttgcgtagaggtgtttgtagtattctctgatggtagtttgtatttctgtgggatcggtggtgatatcccctttatcattttttattgtgtctatttgattcttctctctttttttctttattagtcttgctagcggtctatctattttgttgatcctttcaaaaaaccagctcctggattcattgattttttgaagggttttttgtgtctctatttccttcagttctgctctgatgttagttatttcttgccttctgctagcttttgaatgtgtttgctcttgcttttctagttcttttaattgtgatgttagggtgtcaattttggatctttcctgctttctcttgtgggcatttagtgctataaatttccctctacacactgctttgaatgtgtcccagagattctggtatgttgtgtctttgttctcgttggtttcaaagaacatctttatttctgccttcatttcgttatgtacccagtagtcattcaggagcaggttgttcagtttccatgtagttgagcggctttgagtgagattcttaatcctgagttctagtttgattgcactgtggtctgcgagatagtttgttataatttctgttcttttacatttgctgaggagagctttacttccaactatgtggtcaattttggaataggtgtggtgtggtgctgaaaaaaatgtatattctgttgatttggggtggagagttctgtagatgtctattaggtccgcttggtgcagagctgagttcaattcctgggtatccttgttgactttctgtctcgttgatctgtctaatgttgacagtggggtgttaaagtctcccattattaatgtgtgggagtctaagtctctttgtaggtcactcaggacttgctttatgaatctgggtgctcctgtattgggtgcatatatatttagggtagttagctcttcttgttgaattgatccctttaccattatgtaatggccttctttgtctcttttgatctttgttggtctaaagtctgttttatcagagactagaattgcaacccctgcctttttttgttttccatttgcttgctagatcttcctccattcttttattttgagcctaggtgtgtctctgcacgtgagatgggtttcctgaatacagcacactgatgggtcttgactctttatccaacttgccagtctgtgtcttttaattggagcatttagtccatttacatttaaagttaatactgttatgtgtgaatttgatcctgtcattatgatgttagctggtgattttgctcattagttgatgcagtttcttcctagtctcaatggtctttacattttggcatgattttgcagcggctggtaccggttgttcctttccatgtttagtacttccttcaggagctcttttagggcaggcctgttggtgacaaaatctctcagcatttgcttgtctgtaaagtattttatttctccttcacttatgaagcttagtttggctggatatgaaattctgggttgaaaattctttcctttaagaatgttgaatattggcccccactctcttctggcttgtagggtttctgccgagagatccgctgttagtctgatgggcttccctttgagggtaacccgacctttctctctggctgcccttaacattttttccttcatttcaactttggtgaggaggaagtcaaattgtccctgtttgcagacggcatgattgtatatctagaaaaccccattgtctcagcccaaaatctccttaagctgataagcaacttcagcaaagtctcaggatacaaaatcaatgtacaaaaatcacaagcattcttatacaccaacaacagacaaacagagagccaaatcatgagtgaactcccattcacaaattgcttcaaagagaataaaatacctaggaatccaacttacaagggatgtgaaggatctcttcaagaaggactacaaaccactgctcagtgaactaaaagaggatacaaagaaatggaagaacattccatgctcatgggtaggaagaatcaataccgtgaaaatggccatactgcccaaggtaatttacagattcattgccatccccatcaagctaccaatgactttcttcacagaattggaaaaaactactttaaatttcatatggaaccaaaaaagagcccgcatcgccaagtcaatcctaagccaaaagaacaaagctggaggcatcacactacctgacttcaaactatactacaaggctacagtaaccaaaacagcatggtactggtaccaaaacagacatatagatcaatggaacagaacagagccctcagaaataacgccgcatatctacaactatctgatctttgacaaacctgacaaaaacaagcaatggggaaaggattccctatttaataaatggtgctgggaaaactggctagccatatgtagaaagctgaaactggatcccttccttacaccttatacaaaaatcaattcaagatggattaaagatttaaacgttagacctaaaaccataaaaaccctagaagaaaacctaggcattaccattcaggacataggaatgggcaaggacttcatgtccaaaacaccaaaagcaatggcaaccaaagccaaaattgacaaatgggatctaattaaactaaagagcttctgcacagcaaaagaaactaccatcagagtgaacaggcaacctacaaaatgggagaaaattttcgcaacctactcatctgacaaagggctaatatccagaatctacaatgaactcaaacaaatttacaagaaaaaaacaaacaaccccatcaaaaagtgggcgaaggacatgaacagacacttctcaaaagaagacatttatgcagccaaaaaacacatgaaaaaatgctcatcatcactggccatcagagaaatgcaaatcaaaaccacaatgagataccatctcacaccagttggaatggcaatcattaaaaagtcagaaaacaacaggtgctggagaggatgtggagaaataggaacacttttacactgttgatgggactgtaaactagttcaaccattgtggaagtcagtgtggcgattcctcagggatctagaactagaaataccatttgacccagccatcccattactgggtatatacccaaaggattataaatgatgctgctataaagacacatgcacacgtatgtttattgcggcattattcacaatagcaaagacttggaaccaacccaaatgtccaacaatgatagactggattaagaaaatgtggcacatgtacaccatggaatactatgcagccataaaaaatgatgagttcatgtcctttgtagggacatggatgaaattggaaatcatcattctcagtaaactatcgcaagaacaaaaaaccaaacaccgcatattctcactcataggtgggaattgaacaatgagatcacatggacacaggaaggggaatatcacactctggggactgtggtggggtggggggaggggggagggatagcattgggagatatacctaatgctagatgacgagttagtgggtgcagcgcaccagcatggcacatgtatacatatgtaactaacctgcacaatgtgcacatgtgccctaaaacttaaagtataataaaaaaaagtaagtaactaaataaataaata

SEQ ID NO: 11077 - DNA, 672 bp, Homo sapiens
aaaaatgttaacatatttcttaaaagttaagttagctgattcagcttcaaaaaaagttacttaattgaaataagttctttcaataggggaggtgctctgacatagcgatagtatggtttgataatacagtttttctcctctagctgcctcctgttcttgaggtaatgctcagtgattaactagataggactagataatttatttcaccttggcaggtcttgcctccaagttggcctattcctatggtatttccttttctttcttttgcttcttcctgcacactaagtatggtattttctgacagtatttttcttaattctttatttatttttcttggtaatttcttgctgtagagctggtacccattagacataatgactttccttgacttgcttcttgctcataaatttctgtaagacaatcaggaagtttttagaaacaaacagtggaaccaattaggctgttaagtgagacacgcctaaattaagctatgaggaaataaatacagctccagcaaaaatagaaataattttcagattatccatgcttttgtttccctggttttctttgaacctcatttcctcaagctatgaagtgaaatgaagtggtaagtacacctctaagtaggacattcagggtgaatccaaaggaacttgtgaatttgaccaaaaa

SEQ ID NO: 11078 - DNA, 267 bp, Homo sapiens
ctacagaaatggatcacacataacatacaaatgatgcaggcatgtagcaatcagttcttggtgtccaaactccttaagatctgatgaaacattttttgttctttccagaaaaaaagcgcaagcacacaagcttccaccaatgctctcatccttatttcacatgtgattctagggagtgtattttctccctgaagctcatttcatggactcccaattaaccacactctaggcctgcactgtccaacacagttcccactagcctcatgt

SEQ ID NO: 11079 - DNA, 321 bp, Homo sapiens
tgctctccctttggcagcttattaaggaatgtagtcgtttttcagcatttgccagctccctgtcgcagtcagtcaatagtacttattttaaagtgggattctcattgggattgcaagtaagaatcaatgtttttgttcctacccacacattttaatagacctcaaaaatagaatgcggggagaactgatagagaaacaaagaattttaggtacagaaagcacaaatagaataataatagaataacaagaataaaagaggaagtaatatactcttcgttctcaatgtagcatttatttgcacctcaccaaatgtagagcatt

SEQ ID NO: 11080 - DNA, 1398 bp, Homo sapiens
acggaagtttccaatcagatcaccctcgtggaagacgtcttagccaagctctgtaaaaccatttacccgctggccgacctcctggccaggccactcccggagggggtcgatcctctgaagcttgagatctatctcaccgacgaagacttcgaggtaagcggttcttccggtggggtggggatgggagtaaaacaacacacgcacgcccggctcctttcactgagccgcggggcgcttctcccaatgtttccagtttgcactagacatgacgagggatgaatacaacgccctgcccgcctggaagcaggtgaacctgaagaaagcaaaaggcctgttctgagtggggagacgccagaggagcctcacggtcacgtccaacaacaccactgcaccagggaaatggatatatatttttggactggtgtttttcacaaagtatttttcaatcagagttttcagaacctgacattgttaaagatactgcttgtcccggagttgtgtattttgtaaatgttcaagggaactgtttggaaacttctttccaccattcaggaggttatcagaattaataaaagtatctgttatgtgcacttaagccgcagctgctatagatagcactgccttcttgttccagctaggcaatgccttttttttttttttttgaagcagttctctttataaagtgttattttgatagtttgtggattctaaaatatatatatatttatataaacaccatataagtcaaatatgtatttaacaaagcaatatgtattcattcactttcaagatttgttttggtgtcaaaataacatgaaaaggtagatggagttgcttctgttgaattagctctgccaccaatatgtatcttcatacacgtttggaaatgtttcctgcagcattaggtatgacttgttctgagtactgcttccggtgctaaaatgaacaaagaatttgtacttaatggcatggactctggagaatctatgcgaatcaacctttctaccttaatatctccccaaaaatgtatagtgccttgtttttatgtacagtttatatacagaaaagtttgctctgcatttttgatgatggtttggaacattatctacaattttactctcaaatagtcaaaataaaaacatctcaatttctaataccggttgtaaacagtacacatgtcattttgtgatataggactcccaaataaaagtatcagaataaacacaacaattaactggttcacattgaattccaagcatgttcctttctggaattttttttttttttggtaaatattaacatagcaccaaattttgtaattaagtataaatgactatacatttgaatttagtttagggcaagattttatacaaggtcataagattaaatacagagtta
